United States Patent Application Publication US 2017/0114356 A1 - sequence listing, part 113

SEQ ID NO: 211826 - DNA, 3888 bp, Zea Mays
actcgcgactccgcccgcctgcccagcgatagcgccatagcggcgaccggcgagctccaatatcacgcggatcggcggcggcgcccttgccccggagccccgcggcggcgcggccctgtccccgttccccgccccggcggtaggcagccccgtctcctgtcgagcgctcccaccaccccagccccggcgcccccgctcccagcccgaccgctgtatccgcggcgaccggcgtcccgaacggacgcggcccgagcgcctggctcacagaaaatctgcacacaaaactacaaaagtttaaggtcaccaagaaccttgcaggataacacaagtgctggattttggaaatggaccatgggctttatgctccacaacatggatgggagaacaacagtgtaattgcagtcttttcctttactaactactgaagatgatgaaatagcagaattttggccatgtgattggcctctgtgtatccagcctttagttgtaaaggagttcaagaagaggccgttgcttaaatggaatggatttacctgcctgttctgtagaatttgttgctgactccacttattctgttgaatctacaggcatcaaatgggtatggtgcaatcaatgagccagattttaggtctggtggatcctacaatggtaggagatctgtggatgaaggttttcctagagattcatatgggaggggtgcatactgtcaggatacacatgatagaaatatgtatgcaccaccgccatctgttggtggaatatggtctcagcctcgaaggaatcatgatgaggaatatgcaactgcaagagatcacagaaggcacaatactgattatcacaatgatggaaaacatcatgagtttgattcatacagagttgatagactccatgataattatcatgctactgacagctattatgaatctggcagtcgccctgattttggtgttgataggagcaaaaggattggaagcagagaaagtgcggagtttcatggtgagtttgaagaccggtaccacagttctaaccaaagcagagatgacagctatgagagagatcatgaatatggtcattatgattatgattcggaccatgagagaggcaggagagatagtagctggaaaagacgcgattcatgcgagagcaaacgtgaaagaagtggattaagtcgtgaaagagaggaaagtccatacatgcgccatagccgttctcgatcacatggacgtgatgaccgatcaagatcatggtctagatcaagatctcctcgtgcgagaagtcatggtcggaaccaaagagatggcctgtatgatgataatcgatttgacagaagaagggaatatgattgggatgataggaggcatggtgattcagtggtattgacatactgcatacatacatacatttgtagcagtggctttggaatttacaaaccatgagtttgcattcatgtttgcaggccccatctgccactgttgttgtcaagggactgtctatgaagactaatgatgatgacctatatcagattctttctcagtggggccctctacgcagtgtacgtgtgatcaaggaacggaattctggcatgtctcgtggatttgcttttattgacttctccactgtgctgcctgtagaatgatggaagctactggaaagagtggtctccaaattgatggcaggaatgtgttctttcagtacagtgcaatgaacctcgtgctgaggatgctctaccagctgatgcgacaggttcctctccacactttgggagaaagggatctgaactaggtccaactcatgttttagttgttcgtggcttagatgaaaatgctgatgaggaaatgcttcggtacgaatttgctaagcacgcaccattaaaggacatccgccttgttcgggataagtttactcatgtgtctagaggttttgccttcgttcatttccattcggtggaagatgctacgaaagctctggaagctacaaatgggattacactcgagaaaaacggtcaggttttgcgtgtagcatatgctaaaagtacacatggacctgcatcagggggctcacagtcaaacagccttgctgcagctgccattgaggctgcatcatttgctcaacagtatgatgccataggttgggctccaaaagagtacaatcctgatgacaaacagaacagtaactttgaatctcaaaaagacgatggcagtggcacagcacagtcgggatttgtttgggatgaaaaatctggttactactatgattctgcatctggattctattatgacggaacaactggcctttactatgacagcaactctggagtttggtattcgtacgatcaacagactcaacagtatgtcccttgtactgaccagagcaatactaaggcagccggggagacgtccagtgaaaacatgatctcagatagtatttgtgggaaaaaggttgtgatctctgcgcctgctgccacaattaaacaaaacaagaaaacatcactccctgatgctgttcaagctgctgcaaatgcagccctggctgcagaaaagagagaaaaggagaaggcaaaagagattaagttggcctcaaaaagtagtctcatagctaataagaagaagatgaacaatgtcctagccatgtggaagcaaaggaatcaagaagggcaggccgcacggattgtcattgatgacaaagaaccaccaaattctgatgatagatttaatcattcacatagtggaactggtttctcttcgaaaagcaagccaaattttgaatttgaaaatgctatggataattctgttcgccaaggaattgcatcgacccaaatgttggattctgatgtaaagcctagacctgtcagtaacagcttaggtactacagttatgggtgtcataagaggttctactagaggagtgatcaagtcggatactacgtttcatgcattatctgatgccgggagcactgattcccgcaccactataatcacaagatcaaatgggttaatgacaagtcctgtggaacttgtaactcctgcaccctacaaaactgatgtgtctgccttagtctctaatacttcatcgggagtttctgggagtggtaaacgtcggttttctgaggcaccagggcaatcccagtacagggatcgagctgcagaaagacggaatctgtatggatcatctcttcgcactgatgctgttggattggattcaactggtcactatccgtcccgaaagggtccaagtgagatagggtcgatgccatttcctcctggcgtgggtgaacgttctaatggtgaaattggcaacaacgaaaactatgaagttattaccgctgatagcgcaatcgacgaaagcaatgtgggtaaccgtattctacgcaacatgggttggcaagagggactgggtctcggaaaggatggcagcggtatcaaggaaccagtccaggcaaaatccgtggacgtcagggctggactaggaagtcagcagcggaaggctgatccaatcctggaggccaaagccggagacagctacaaaaccatcatccagaagaaggccatggcaagattcaaggagatgtcctagctagaccttttttttttgtatattcggttgtcgtattttgtcgtccgtatacttttttttttacaatctgtgcactgttttgcttgtgttttttttcttcacaaacctagccactgaattgtgatttattatcctcaaaggggcaccgtgtttatcttattattactatgtagttcgagacctggatgctttttttttcatgtgtgttggggttttcatttgcacgacgaatgtgcccgatcagttgctttgccacacatgatgtggcggtactgcctctacatcttatcgtggcacaggttgttttttaaacggt

SEQ ID NO: 211827 - DNA, 3866 bp, Zea Mays
gtcgcgactcgcgactccgcccgcctgcccagcgatagcgccatagcggcgaccggcgagctccaatatcacgcggatcggcggcggcgcccttgccccggagccccgcggcggcgcggccctgtccccgttccccgccccggcggtaggcagccccgtctcctgtcgagcgctcccaccaccccagccccggcgcccccgctcccagcccgaccgctgtatccgcggcgaccggcgtcccgaacggacgcggcccgagcgcctggctcacagaaaatctgcacacaaaactacaaaagtttaaggtcaccaagaaccttgcaggataacacaagtgctggattttggaaatggaccatgggctttatgctccacaacatggatgggagaacaacagtgcatcaaatgggtatggtgcaatcaatgagccagattttaggtctggtggatcctacaatggtaggagatctgtggatgaaggttttcctagagattcatatgggaggggtgcatactgtcaggatacacatgatagaaatatgtatgcaccaccgccatctgttggtggaatatggtctcagcctcgaaggaatcatgatgaggaatatgcaactgcaagagatcacagaaggcacaatactgattatcacaatgatggaaaacatcatgagtttgattcatacagagttgatagactccatgataattatcatgctactgacagctattatgaatctggcagtcgccctgattttggtgttgataggagcaaaaggattggaagcagagaaagtgcggagtttcatggtgagtttgaagaccggtaccacagttctaaccaaagcagagatgacagctatgagagagatcatgaatatggtcattatgattatgattcggaccatgagagaggcaggagagatagtagctggaaaagacgcgattcatgcgagagcaaacgtgaaagaagtggattaagtcgtgaaagagaggaaagtccatacatgcgccatagccgttctcgatcacatggacgtgatgaccgatcaagatcatggtctagatcaagatctcctcgtgcgagaagtcatggtcggaaccaaagagatggcctgtatgatgataatcgatttgacagaagaagggaatatgattgggatgataggaggcatggtgattcagtggtattgacatactgcatacatacatacatttgtagcagtggctttggaatttacaaaccatgagtttgcattcatgtttgcaggccccatctgccactgttgttgtcaagggactgtctatgaagactaatgatgatgacctatatcagattcttgtacaagttcttcataacttcttgcaccggttttaagtgtattgtctattgtctcgttcgttttaatcatttcgcctgttctcttgtagtctcagtggggccctctacgcagtgtacgtgtgatcaaggaacggaattctggcatgtctcgtggatttgcttttattgacttctccactgtggaagctgcctgtagaatgatggaagctactggaaagagtggtctccaaattgatggcaggaatgtgttctttcagtacagtagtaaaccaaccggtgtaatgggtgggtcttctcctggacaagaaaatcttacaaggcctacttatgggccccgcactgttgctgcactctgtgactggatttgttctatatgcggatgtatgaatttcgcccgcaggacctcctgttttcagtgcaatgaacctcgtgctgaggatgctctaccagctgatgcgacaggttcctctccacactttgggagaaagggatctgaactaggtccaactcatgttttagttgttcgtggcttagatgaaaatgctgatgaggaaatgcttcggtacgaatttgctaagcacgcaccattaaaggacatccgccttgttcgggataagtttactcatgtgtctagaggttttgccttcgttcatttccattcggtggaagatgctacgaaagctctggaagctacaaatgggattacactcgagaaaaacggtcaggttttgcgtgtagcatatgctaaaagtacacatggacctgcatcagggggctcacagtcaaacagccttgctgcagctgccattgaggctgcatcatttgctcaacagtatgatgccataggttgggctccaaaagagtacaatcctgatgacaaacagaacagtaactttgaatctcaaaaagacgatggcagtggcacagcacagtcgggatttgtttgggatgaaaaatctggttactactatgattctgcatctggattctattatgacggaacaactgagcaatactaaggcagccggggagacgtccagtgaaaacatgatctcagatagtatttgtgggaaaaaggttgtgatctctgcgcctgctgccacaattaaacaaaacaagaaaacatcactccctgatgctgttcaagctgctgcaaatgcagccctggctgcagaaaagagagaaaaggagaaggcaaaagagattaagttggcctcaaaaagtagtctcatagctaataagaagaagatgaacaatgtcctagccatgtggaagcaaaggaatcaagaagggcaggccgcacggattgtcattgatgacaaagaaccaccaaattctgatgatagatttaatcattcacatagtggaactggtttctcttcgaaaagcaagccaaattttgaatttgaaaatgctatggataattctgttcgccaaggaattgcatcgacccaaatgttggattctgatgtaaagcctagacctgtcagtaacagcttaggtactacagttatgggtgtcataagaggttctactagaggagtgatcaagtcggatactacgtttcatgcattatctgatgccgggagcactgattcccgcaccactataatcacaagatcaaatgggttaatgacaagtcctgtggaacttgtaactcctgcaccctacaaaactgatgtgtctgccttagtctctaatacttcatcgggagtttctgggagtggtaaacgtcggttttctgaggcaccagggcaatcccagtacagggatcgagctgcagaaagacggaatctgtatggatcatctcttcgcactgatgctgttggattggattcaactggtcactatccgtcccgaaagggtccaagtgagatagggtcgatgccatttcctcctggcgtgggtgaacgttctaatggtgaaattggcaacaacgaaaactatgaagttattaccgctgatagcgcaatcgacgaaagcaatgtgggtaaccgtattctacgcaacatgggttggcaagagggactgggtctcggaaaggatggcagcggtatcaaggaaccagtccaggcaaaatccgtggacgtcagggctggactaggaagtcagcagcggaaggctgatccaatcctggaggccaaagccggagacagctacaaaaccatcatccagaagaaggccatggcaagattcaaggagatgtcctagctagaccttttttttttgtatattcggttgtcgtattttgtcgtccgtatacttttttttttacaatctgtgcactgttttgcttgtgttttttttcttcacaaacctagccactgaattgtgatttattatcctcaaaggggcaccgtgtttatcttattattactatgtagttcgagacctggatgctttttttttcatgtgtgttggggttttcatttgcacgacgaatgtgcccgatcagttgctttgccacacatgatgtggcggtactgcctctacatcttatcgtggcacaggttgttttttaaacggt

SEQ ID NO: 211828 - DNA, 3989 bp, Zea Mays
gtttcacttacggtcgcgactcgcgactccgcccgcctgcccagcgatagcgccatagcggcgaccggcgagctccaatatcacgcggatcggcggcggcgcccttgccccggagccccgcggcggcgcggccctgtccccgttccccgccccggcggtaggcagccccgtctcctgtcgagcgctcccaccaccccagccccggcgcccccgctcccagcccgaccgctgtatccgcggcgaccggcgtcccgaacggacgcggcccgagcgcctggctcacagaaaatctgcacacaaaactacaaaagtttaaggtcaccaagaaccttgcaggataacacaagtgctggattttggaaatggaccatgggctttatgctccacaacatggatgggagaacaacagtgcatcaaatgggtatggtgcaatcaatgagccagattttaggtctggtggatcctacaatggtaggagatctgtggatgaaggttttcctagagattcatatgggaggggtgcatactgtcaggatacacatgatagaaatatgtatgcaccaccgccatctgttggtggaatatggtctcagcctcgaaggaatcatgatgaggaatatgcaactgcaagagatcacagaagtcgccctgattttggtgttgataggagcaaaaggattggaagcagagaaagtgcggagtttcatggtgagtttgaagaccggtaccacagttctaaccaaagcagagatgacagctatgagagagatcatgaatatggtcattatgattatgattcggaccatgagagaggcaggagagatagtagctggaaaagacgcgattcatgcgagagcaaacgtgaaagaagtggattaagtcgtgaaagagaggaaagtccatacatgcgccatagccgttctcgatcacatggacgtgatgaccgatcaagatcatggtctagatcaagatctcctcgtgcgagaagtcatggtcggaaccaaagagatggcctgtatgatgataatcgatttgacagaagaagggaatatgattgggatgataggaggcatggtgattcagtggccccatctgccactgttgttgtcaagggactgtctatgaagactaatgatgatgacctatatcagattctttctcagtggggccctctacgcagtgtacgtgtgatcaaggaacggaattctggcatgtctcgtggatttgcttttattgacttctccactgtggaagctgcctgtagaatgatggaagctactggaaagagtggtctccaaattgatggcaggaatgtgttctttcagtacagtagtaaaccaaccggtgtaatgggtgggtcttctcctggacaagaaaatcttacaaggcctacttatgggccccgcactgttgctgcactctgtgactggatttgttctatatgcggatgtatgaatttcgcccgcaggacctcctgttttcagtgcaatgaacctcgtgctgaggatgctctaccagctgatgcgacaggttcctctccacactttgggagaaagggatctgaactaggtccaactcatgttttagttgttcgtggcttagatgaaaatgctgatgaggaaatgcttcggtacgaatttgctaagcacgcaccattaaaggacatccgccttgttcgggataagtttactcatgtgtctagaggttttgccttcgttcatttccattcggtggaagatgctacgaaagctctggaagctacaaatgggattacactcgagaaaaacggtcaggttttgcgtgtagcatatgctaaaagtacacatggacctgcatcagggggctcacagtcaaacagccttgctgcagctgccattgaggctgcatcatttgctcaacagtatgatgccataggttgggctccaaaagagtacaatcctgatgacaaacagaacagtaactttgaatctcaaaaagacgatggcagtggcacagcacagtcgggatttgtttgggatgaaaaatctggttactactatgattctgcatctggattctattatgacggaacaactggcctttactatgacagcaactctggagtttggtattcgtacgatcaacagactcaacagtatgtcccttgtactgaccagagcaatactaaggcagccggggagacgtccagtgaaaacatgatctcagatagtatttgtgggaaaaaggttgtgatctctgcgcctgctgccacaattaaacaaaacaagaaaacatcactccctgatgctgttcaagctgctgcaaatgcagccctggctgcagaaaagagagaaaaggagaaggcaaaagagattaagttggcctcaaaaagtagtctcatagctaataagaagaagatgaacaatgtcctagccatgtggaagcaaaggaatcaagaagggcaggccgcacggattgtcattgatgacaaagaaccaccaaattctgatgatagatttaatcattcacatagtggaactggtttctcttcgaaaagcaagccaaattttgaatttgaaaatgctatggataattctgttcgccaaggaattgcatcgacccaaatgttggattctgatgtaaagcctagacctgtcagtaacagcttaggtactacagttatgggtgtcataagaggttctactagaggagtgatcaagtcggatactacgtttcatgcattatctgatgccgggagcactgattcccgcaccactataatcacaagatcaaatgggttaatgacaagtcctgtggaacttgtaactcctgcaccctacaaaactgatgtgtctgccttagtctctaatacttcatcgggagtttctgggagtggtaaacgtcggttttctgaggcaccagggcaatcccagtacagggatcgagctgcagaaagacggaatctgtatggatcatctcttcgcactgatgctgttggattggattcaagtaagaatacactttcttaagtttttctttatcgcgtacaattgttgtcattttcccattgtcattccttcagcacgatgtgttagtaacagcaacatactgtccgttcagattttttttgttattctcatcattatcattttgctgaagcatcattgtcagtattagtgttggtataaggctgacttggtatttctgggagtctttttgttaccataggaatatgtccttgaccaacatacagttcaggaatcttattttttgttttgtttgtaagctttttattgattttctggaaattacctgttgtcaagctggtcactatccgtcccgaaagggtccaagtgagatagggtcgatgccatttcctcctggcgtgggtgaacgttctaatggtgaaattggcaacaacgaaaactatgaagttattaccgctgatagcgcaatcgacgaaagcaatgtgggtaaccgtattctacgcaacatgggttggcaagagggactgggtctcggaaaggatggcagcggtatcaaggaaccagtccaggcaaaatccgtggacgtcagggctggactaggaagtcagcagcggaaggctgatccaatcctggaggccaaagccggagacagctacaaaaccatcatccagaagaaggccatggcaagattcaaggagatgtcctagctagaccttttttttttgtatattcggttgtcgtattttgtcgtccgtatacttttttttttacaatctgtgcactgttttgcttgtgttttttttcttcacaaacctagccactgaattgtgatttattatcctcaaaggggcaccgtgtttatcttattattactatgtagttcgagacctggatgctttttttttcatgtgtgttggggttttcatttgcacgacgaatgtgcccgatcagttgctttgccacacatgatgtggcggtactgcctctacatcttatcgtggcacaggttgttttttaaacggt

SEQ ID NO: 211829 - DNA, 5671 bp, Zea Mays
actcgcgactccgcccgcctgcccagcgatagcgccatagcggcgaccggcgagctccaatatcacgcggatcggcggcggcgcccttgccccggagccccgcggcggcgcggccctgtccccgttccccgccccggcggtaggcagccccgtctcctgtcgagcgctcccaccaccccagccccggcgcccccgctcccagcccgaccgctgtatccgcggcgaccggcgtcccgaacggacgcggcccgagcgcctggctcacagaaaatctgcacacaaaactacaaaagtttaaggtcaccaagaaccttgcaggataacacaagtgctggattttggaaatggaccatgggctttatgctccacaacatggatgggagaacaacagtgcatcaaatgggtatggtgcaatcaatgagccagattttaggtaaggcaactggtcatttagtgttctgttaactgggatattcatgtcctttattcctgtaaaaacgtcatttttttttctctagcaagctgatatatgtttttatttggtactgggttaactcttcaacaagttctcttcttttgtgatttgtgtcatgcatttaatatttatatagtgttctgtcatattaccatatcttcccctattaacttaatttgcaggtctggtggatcctacaatggtaggagatctgtggatgaaggttttcctagagattcatatgggaggggtgcatactgtcaggatacacatgatagaaatatgtatgcaccaccgccatctgttggtggaatatggtctcagcctcgaaggaatcatgatgaggaatatgcaactgcaagagatcacagaaggcacaatactgattatcacaatgatggaaaacatcatgagtttgattcatacagagttgatagactccatgataattatcatgctactgacagctattatgaatctggcagtcgccctgattttggtgttgataggagcaaaaggattggaagcagagaaagtgcggagtttcatggtgagtttgaagaccggtaccacagttctaaccaaagcagagatgacagctatgagagagatcatgaatatggtcattatgattatgattcggaccatgagagaggcaggagagatagtagctggaaaagacgcgattcatgcgagagcaaacgtgaaagaagtggattaagtcgtgaaagagaggaaagtccatacatgcgccatagccgttctcgatcacatggacgtgatgaccgatcaagatcatggtctagatcaagatctcctcgtgcgagaagtcatggtcggaaccaaagagatggcctgtatgatgataatcgatttgacagaagaagggaatatgattgggatgataggaggcatggtgattcagtggccccatctgccactgttgttgtcaagggactgtctatgaagactaatgatgatgacctatatcagattctttctcagtggggccctctacgcagtgtacgtgtgatcaaggaacggaattctggcatgtctcgtggatttgcttttattgacttctccactgtggaagctgcctgtagaatgatggaagctactggaaagagtggtctccaaattgatggcaggaatgtgttctttcagtacagtagtaaaccaaccggtgtaatgggtgggtcttctcctggacaagaaaatcttacaaggcctacttatgggccccgcactgttgctgcactctgtgactggatttgttctatatgcggatgtatgaatttcgcccgcaggacctcctgttttcagtgcaatgaacctcgtgctgaggatgctctaccagctgatgcgacaggttcctctccacactttgggagaaagggatctgaactaggtccaactcatgttttagttgttcgtggcttagatgaaaatgctgatgaggaaatgcttcggtacgaatttgctaagcacgcaccattaaaggacatccgccttgttcgggataagtttactcatgtgtctagaggttttgccttcgttcatttccattcggtggaagatgctacgaaagctctggaagctacaaatgggattacactcgagaaaaacggtcaggttttgcgtgtagcatatgctaaaagtacacatggacctgcatcagggggctcacagtcaaacagccttgctgcagctgccattgaggctgcatcatttgctcaacagtatgatgccataggttgggctccaaaagagtacaatcctgatgacaaacagaacagtaactttgaatctcaaaaagacgatggcagtggcacagcacagtcgggatttgtttgggatgaaaaatctggttactactatgattctgcatctggattctattatgacggaacaactggcctttactatgacagcaactctggagtttggtattcgtacgatcaacagactcaacagtatgtcccttgtactgaccagagcaatactaaggcagccggggagacgtccagtgaaaacatgatctcagatagtatttgtgggaaaaaggttgtgatctctgcgcctgctgccacaattaaacaaaacaagaaaacatcactccctgatgctgttcaagctgctgcaaatgcagccctggctgcagaaaagagagaaaaggagaaggcaaaagagattaagttggcctcaaaaagtagtctcatagctaataagaagaagatgaacaatgtcctagccatgtggaagcaaaggaatcaagaagggcaggccgcacggattgtcattgatgacaaagaaccaccaaattctgatgatagatttaatcattcacatagtggaactggtttctcttcgaaaagcaagccaaattttgaatttgaaaatgctatggataattctgttcgccaaggaattgcatcgacccaaatgttggattctgatgtaaagcctagacctgtcagtaacagcttaggtactacagttatgggtgtcataagaggttctactagaggagtgatcaagtcggatactacgtttcatgcattatctgatgccgggagcactgattcccgcaccactataatcacaagatcaaatgggttaatgacaagtcctgtggaacttgtaactcctgcaccctacaaaactgatgtgtctgccttagtctctaatacttcatcgggagtttctgggagtggtaaacgtcggttttctgaggcaccagggcaatcccagtacagggatcgagctgcagaaagacggaatctgtatggatcatctcttcgcactgatgctgttggattggattcaactggtcactatccgtcccgaaagggtccaagtgagatagggtcgatgccatttcctcctggcgtgggtgaacgttctaatggtgaaattggcaacaacgaaaactatgaagttattaccgctgatagcgcaatcgacgaaagcaatgtgggtaaccgtattctacgcaacatgggttggcaagagggactggtaagttcatgtcccacatatttctcagtttgagatgctctcaggcttgatagcattttccatgagtgtttatgcctcttctttatttctcttgctaatgcaattgcatctgactttgcaatctaatttatgtaagttttttatgagaaaaaggtaaatatgcctatttgtaataaggcagttgtatcaaatttattttaatgcagctctctggttttaaccggagtactttggagcttggtacgctattagtatgttagcaaatcttaagcttgtcttgttgatctctttacagaaataattaatgaagtatacctctgtgtcttgacttgattctgagtccatgtgcttcctttgtgtctagactctacaatgtaggaatcagaagtcactgacatacttagtctgagtgagaagatgcctagtttttagcctaagtgagaagatgtctagtttttaggtgcgtgcctgtagggaaacatcgctttgagaacaaagtggtggaaactgaaaggaaagacgacagaagccttcaaggaaagggtcatcaaagagggcactcggaagaagacaaacaataattgggagaagatggcaacctgcattcggaaggtggctttaaaggtgcgtggagcaagtgagcaaccaaagggagtggaggcgaagctaaagttttttggtggtggaatgaggaagtctaaagggacctattaaggagaagaaagcatgctatagacgtttgtaccatgacaggagtggacaacatagagaagtataaggtagtaaaaaagactcgtggcaaagggtagggcgtacgaggatttttatcaaacgtgaaggaaggagggtgaaaggagaggacatatattgggattgttagggttcatgagaggaagacaagggacttcaaccaagttgagtgtattaaggacaaaacagagtaccttttcatggagtatgaggtcatatgtagatggtgagggtattttaacaaagtatttaatggggacaatggggatgtaacctttactactctttcgatgacaccaataagcactttgtgcgtagtatccaagaatccaagggtagagaggcattgaaatggatgaagggggtaagatgatggaccctaatgatatctgagacatggatatgccttggggacatagctatactatagttaaccaagttgtttaaccatatcttttggtcaaacaagatgtctgacaagtggagaaatatttaagggagatattcaaagttgtattaggtatcgggaattaagtttatgagccatactacgaagctatgagagagttatcgagcatcatctcaagggaataacaacaatctctgtgaaaccaatttggtttcgtgtctaaaaagtcaaccatggaagccattttctcaataagacaagttatggagtgatgtagggagcacaacctacccatggttttaatttacttggagaaggcctacgataaaataccaaggaatgttatgtggtgggtttggtcagacataatgttttagggtgtgcttggttctgcttttaacacctgtttctgcttaaaaaagtagaaagttggaccataggtctcccacccagcccttgcttttcccaccgcagttgcttttccgtagttgaactcatgaaggagacagattcttgcttttccaacggtggcaacaaagtcaagttcgaagaatttacccacctgacatcggttaaggggcactagactgttatttctctttctttcaccttttctctttcatcgttttcttcacactgttcaatccaaaagcttaagctattatagaagaaggtagtcaattcacttatacatttcaacatcttcacgcacgtgcagccagagaggcgcatacgtggaaataaaggggcggaggcacaaacttctgtaggttttgaacttgaaacctctgattccgatactatgttagagtggatgcagtaaccagttcaactcaaaagtttaatctattaggagaaggtagtcaatcaacttatacactttaatttttcaacacacatcgagtagggaccaaacaaaacccagagaaaagctagggttcggccgcatgccctcccaccatcccagtaccatatcactgtcctctacagtagccttggcggcttccgtatgcgcg

SEQ ID NO: 211830 - DNA, 990 bp, Zea Mays
tggagtttgaatatggatatggggatggaatacgatgaagaaaatccccgctctgtaactaagtgtgagcaccatttccatctttgctgcattcttgaatggatggagcgaaaagatacttgcccagtttgtgaccagacaattttggtggatgagatgtccgaatagacttggtaatcctggtggatcatcacttgaagctgtttgttactgaggaagtgcaggcaacaactactacactcttgatattcgtccattctgggtggctctcagagtaatgaattgatggggcaaaaattgaaaggatgaacgacatgaaatgtatttacgccccctcctttaccctgcattctgtgtcatgcttttgctgttcatagcaacaggtggactaggaaactgcttggttgaattatatatagagagagatatgtcggcttgcaggttgattcagttaaaagtgcaaaactatgccatttcgcttttctgaattcagagtttcagacatctgctggttcttccaggaatccagtcagctttttacatggtatattaggtggttgcaggtaaaaatggtctagatggaggtgggggtttctttgtataatccacatgctattcaagcttcctgtatataatatttcctgttttcttcgatttgtctagtcaggcaagtttcagggatatagttttctgttatgctgaatatttgcagatcctcgctgttctgataaaaaacttactgatcatcccaaatctgggccagacaaaacgtctcagggatataatataatacatctgacagctcttgttaaaacatcttcggggcctgctaaaatgttcacattatgttccggctatgaaaacttgcagttctctgcgatgctagagttgcagacattttctttttttatcagtgttgtaaagtactagctcagataagatggcgtgtcaattcagtttaccagtcaggcttggctagttcgcctgaag

SEQ ID NO: 211831 - DNA, 1004 bp, Zea Mays
atgaattgggcaaaagaatccaaaagttcaccttcttgcactaattgtgactcgttcatctttgagacgcagcgccacaatggcataagggagctttgccctgcgaatggagagcacaagctaatccgtgcccgtgctctcatccccctgcatgaacccaattctgttgcgatcaaccatcaagggttgtcctattgtattattcagttcattgaaaaggactacaaattagcagatactatgatttggggtctactcaagcattggccagtcagaaactgccaagaggtaattggttttgaccaaattatcaactagatggctctatataaaatggcacacggaattggctgtgagcctgtctgtcaatgtccgaaacgacggcaggcgtgaagcggtggtcgggaaggaattaatgagtagcagcaatgcgtcagacagctacgtatcttcttccgcaatcccattctgacttaattaataaaacaacctttataatagtattatactgactcgatcgtctccaaagtctgaagcaaataaagggtgggtgcgtctccacctatacatatagtataatagtgaggtacccgtagagaccatataaatcagagggttttatatttcaccatttgataagaaaatactcgtattaggaagcttcaaaaaggagaggatattggatcttctatatatcttactttgtcctttatcattttcaaatgccaatcagtgaacaccaaatttcaggtttgttaaatgcctgttaccagtcaggaatgatatattatcttcggataataaataaaataactgggaactaggaattgtaccactatgctgtgtacttagttcctatgtaattctaattccttggtttattcttcaataactaggactggacaagagcttttggacatggttgacagtttgcccattgttgcgataaagagcctaaaagtatctgacttccaagctctctgcccagccaccagttttgagtt

SEQ ID NO: 211832 - DNA, 2379 bp, Zea Mays
agtcaagttattttaggcatgtccgctgcttggacccatacgtcagatgtaacaaaatccagacccgagcgatcgtgccccggcccccgatcctgattcccacaaatttccgccatggcgatccgcccggactgatgcccgattctccatctgacgatcctcgattggggggaattctggtggggttcgtgtgggcgcgtagggcccctgacgacctggcctgacgcatcagcggcgagccatggctccggcttccgttccagctctacctacagccatggatactaaggacgagggcgacggtggctccaagaaccaaaacagcgtggtggtggtgaaatccgaggtgaggcagacaatggtgaaccagaagtgaattctagcctgtctgctcatgccaatggtgttggcccctcaaaaccccctagaaggaaaaaggtgatggctgagtggagcaattctgttcgtccaattcagtggagatgccactggttagagttgcgtatgagggagctttcatctcaaatatcgaagtatgacaaggagcttgctctaatcaagaaacagaatgaattacaacaggcagcaagcaaagcaaatggtactatgtcagaatcgatgcagattcataaaggccatggaaacagtatcatgaagaggagaaagaggaagaggcatgaggacagtgtggatgcgtccttgtacatcaacaagcaccagatattgtcatactaccatgataaacaaaataagggagttcaaaccggtgatctcttagttgatgacgattgtggcacagttgatggtagtatcagtggtggacttgatactactacattgcttgattccgaggattatgatatgatttgtgagcaacacgctttacaggatattctcctgacaattgatgggcttcagtctcgagtccatctgctgcaagatcgtctcagcaaagctcattctgaaggagaaaatttggcattttctggggccgatactgatgtcagagtggctgggaagagacagcgtactcaaaagcactcattctctaatacaaagtctcgacatactaaaccacagaaaaggaagaatctaaatatcttgctgaaggatgatgatgatggacaagctcttgcaggcggacctgctttggctgatggggaaactgatgtgcatatgataggtgctagtaggagtactgaagaaagaagtggagagtgcaatcactcgagggacaaagccatcacagtggacctactgttgggtactggcaattccataacaaatagtgatattggggatttatacaatgtaaacactgatgatgtcctcatagccaatcaagcagccgttgaagcttgtcagcagtttcatgaggcaaagcatctgccttctggaagtccttccaaagacaagatcatttctgctccagcagaaatgaagaataattctccaccagtggaggtgaagaacacttgcggtccagtaaaaattgagagcttgtgttctccagttgaaggagaaaacacttctgatccagcattggagcaagaatcgttccttgaaaagtcaccctcgaggcagcctgtatccccggggaacaagcaggagctgaaacctaagaaaagacggaagaagaaaggctctttatttactaagaagcagcggaaggtggactccagaacacctgatgcaaaggaaaaaactgagggcacgccctctgatgtagcagaggaaactgagagcccactctctggtgcaacaggaccaggaaccatgaggtcttgctgtgctggaaagaagcgcaaatctggaaatgaacctgcagatgcaaataaaactgggaagccatcctcagcagtgaagaagcagaaaactgaaaacccgactgcagctgcaaatgcgacaaagaagcgggccacggagaagaagctagagagcgcgagtgcctcccagaagctgcaggttgagaaagctgtgcttgtcgctgtaaatagcaggaggagccaaagggtccgtaagcccaaagtttttgctgactgaagaagcaggtagaaagtcttaggctctctattgtgtatgtatcttgtagccccgtcatcaaaatcggtggccatagcaacataggaagtgcctggatcgcctcataagttagtgtacatatatcagctatgtctcacccaaattgtagatttgttagtttgttgttcttaacccttctcttctgggctgccagattaacaatgtcatgctgtgttagcgttatatcaaaaagaagaaaaaaaaaggagaaaaatatgccatgcaactgcaacttggcccgtcgcatctttgtgcccttaattaactggatggtcgccattgcagctaaacagcctg

SEQ ID NO: 211833 - DNA, 2427 bp, Zea Mays
ggcaacgaggagacccattttgacaaattctctcctcgccctcgcctccacttttgagccacagacccgagcgatcgtgccccggcccccgatcctgattcccacaaatttccgccatggcgatccgcccggactgatgcccgattctccatctgacgatcctcgcggcgagccatggctccggcttccgttccagctctacctacagccatggatactaaggacgagggcgacggtggctccaagaaccaaaacagcgtggtggtggtgaaatccgaggttgtctgcacgaatggtggccctctggtggtcgggactgaacttgtgaaatacgagggaggtgataccactgaatgctcgagctcgtttggtgacacctgctctggatttgaaggtgaggcagacaatggtgaaccagaagtgaattctagcctgtctgctcatgccaatggtgttggcccctcaaaaccccctagaaggaaaaaggtgatggctgagtggagcaattctgttcgtccaattcagtggagatgccactggttagagttgcgtatgagggagctttcatctcaaatatcgaagtatgacaaggagcttgctctaatcaagaaacagaatgaattacaacaggcagcaagcaaagcaaatggtactatgtcagaatcgatgcagattcataaaggccatggaaacagtatcatgaagaggagaaagaggaagaggcatgaggacagtgtggatgcgtccttgtacatcaacaagcaccagatattgtcatactaccatgataaacaaaataagggagttcaaaccggtgatctcttagttgatgacgattgtggcacagttgatggtagtatcagtggtggacttgatactactacattgcttgattccgaggattatgatatgatttgtgagcaacacgctttacaggatattctcctgacaattgatgggcttcagtctcgagtccatctgctgcaagatcgtctcagcaaagctcattctgaaggagaaaatttggcattttctggggccgatactgatgtcagagtggctgggaagagacagcgtactcaaaagcactcattctctaatacaaagtctcgacatactaaaccacagaaaaggaagaatctaaatatcttgctgaaggatgatgatgatggacaagctcttgcaggcggacctgctttggctgatggggaaactgatgtgcatatgataggtgctagtaggagtactgaagaaagaagtggagagtgcaatcactcgagggacaaagccatcacagtggacctactgttgggtactggcaattccataacaaatagtgatattggggatttatacaatgtaaacactgatgatgtcctcatagccaatcaagcagccgttgaagcttgtcagcagtttcatgaggcaaagcatctgccttctggaagtccttccaaagacaagatcatttctgctccagcagaaatgaagaataattctccaccagtggaggtgaagaacacttgcggtccagtaaaaattgagagcttgtgttctccagttgaaggagaaaacacttctgatccagcattggagcaagaatcgttccttgaaaagtcaccctcgaggcagcctgtatccccggggaacaagcaggagctgaaacctaagaaaagacggaagaagaaaggctctttatttactaagaagcagcggaaggtggactccagaacacctgatgcaaaggaaaaaactgagggcacgccctctgatgtagcagaggaaactgagagcccactctctggtgcaacaggaccaggaaccatgaggtcttgctgtgctggaaagaagcgcaaatctggaaatgaacctgcagatgcaaataaaactgggaagccatcctcagcagtgaagaagcagaaaactgaaaacccgactgcagctgcaaatgcgacaaagaagcgggccacggagaagaagctagagagcgcgagtgcctcccagaagctgcaggttgagaaagctgtgcttgtcgctgtaaatagcaggaggagccaaagggtccgtaagcccaaagtttttgctgactgaagaagcaggtagaaagtcttaggctctctattgtgtatgtatcttgtagccccgtcatcaaaatcggtggccatagcaacataggaagtgcctggatcgcctcataagttagtgtacatatatcagctatgtctcacccaaattgtagatttgttagtttgttgttcttaacccttctcttctgggctgccagattaacaatgtcatgctgtgttagcgttatatcaaaaagaagaaaaaaaaaggagaaaaatatgccatgcaactgcaacttggcccgtcgcatctttgtgcccttaattaactggatggtcgccattgcagctaaacagcctg

SEQ ID NO: 211834 - DNA, 2116 bp, Zea Mays
ggcaacgaggagacccattttgacaaattctctcctcgccctcgcctccacttttgagccacagacccgagcgatcgtgccccggcccccgatcctgattcccacaaatttccgccatggcgatccgcccggactgatgcccgattctccatctgacgatcctcgaaggaaaaaggtgatggctgagtggagcaattctgttcgtccaattcagtggagatgccactggttagagttgcgtatgagggagctttcatctcaaatatcgaagtatgacaaggagcttgctctaatcaagaaacagaatgaattacaacaggcagcaagcaaagcaaatggtactatgtcagaatcgatgcagattcataaaggccatggaaacagtatcatgaagaggagaaagaggaagaggcatgaggacagtgtggatgcgtccttgtacatcaacaagcaccagatattgtcatactaccatgataaacaaaataagggagttcaaaccggtgatctcttagttgatgacgattgtggcacagttgatggtagtatcagtggtggacttgatactactacattgcttgattccgaggattatgatatgatttgtgagcaacacgctttacaggatattctcctgacaattgatgggcttcagtctcgagtccatctgctgcaagatcgtctcagcaaagctcattctgaaggagaaaatttggcattttctggggccgatactgatgtcagagtggctgggaagagacagcgtactcaaaagcactcattctctaatacaaagtctcgacatactaaaccacagaaaaggaagaatctaaatatcttgctgaaggatgatgatgatggacaagctcttgcaggcggacctgctttggctgatggggaaactgatgtgcatatgataggtgctagtaggagtactgaagaaagaagtggagagtgcaatcactcgagggacaaagccatcacagtggacctactgttgggtactggcaattccataacaaatagtgatattggggatttatacaatgtaaacactgatgatgtcctcatagccaatcaagcagccgttgaagcttgtcagcagtttcatgaggcaaagcatctgccttctggaagtccttccaaagacaagatcatttctgctccagcagaaatgaagaataattctccaccagtggaggtgaagaacacttgcggtccagtaaaaattgagagcttgtgttctccagttgaaggagaaaacacttctgatccagcattggagcaagaatcgttccttgaaaagtcaccctcgaggcagcctgtatccccggggaacaagcaggagctgaaacctaagaaaagacggaagaagaaaggctctttatttactaagaagcagcggaaggtggactccagaacacctgatgcaaaggaaaaaactgagggcacgccctctgatgtagcagaggaaactgagagcccactctctggtgcaacaggaccaggaaccatgaggtcttgctgtgctggaaagaagcgcaaatctggaaatgaacctgcagatgcaaataaaactgggaagccatcctcagcagtgaagaagcagaaaactgaaaacccgactgcagctgcaaatgcgacaaagaagcgggccacggagaagaagctagagagcgcgagtgcctcccagaagctgcaggttgagaaagctgtgcttgtcgctgtaaatagcaggaggagccaaagggtccgtaagcccaaagtttttgctgactgaagaagcaggtagaaagtcttaggctctctattgtgtatgtatcttgtagccccgtcatcaaaatcggtggccatagcaacataggaagtgcctggatcgcctcataagttagtgtacatatatcagctatgtctcacccaaattgtagatttgttagtttgttgttcttaacccttctcttctgggctgccagattaacaatgtcatgctgtgttagcgttatatcaaaaagaagaaaaaaaaaggagaaaaatatgccatgcaactgcaacttggcccgtcgcatctttgtgcccttaattaactggatggtcgccattgcagctaaacagcctg

SEQ ID NO: 211835 - DNA, 1985 bp, Zea Mays
cttatgctaagtatgcttatcacgataagaaaagaaggaaaaaggtgatggctgagtggagcaattctgttcgtccaattcagtggagatgccactggttagagttgcgtatgagggagctttcatctcaaatatcgaagtatgacaaggagcttgctctaatcaagaaacagaatgaattacaacaggcagcaagcaaagcaaatggtactatgtcagaatcgatgcagattcataaaggccatggaaacagtatcatgaagaggagaaagaggaagaggcatgaggacagtgtggatgcgtccttgtacatcaacaagcaccagatattgtcatactaccatgataaacaaaataagggagttcaaaccggtgatctcttagttgatgacgattgtggcacagttgatggtagtatcagtggtggacttgatactactacattgcttgattccgaggattatgatatgatttgtgagcaacacgctttacaggatattctcctgacaattgatgggcttcagtctcgagtccatctgctgcaagatcgtctcagcaaagctcattctgaaggagaaaatttggcattttctggggccgatactgatgtcagagtggctgggaagagacagcgtactcaaaagcactcattctctaatacaaagtctcgacatactaaaccacagaaaaggaagaatctaaatatcttgctgaaggatgatgatgatggacaagctcttgcaggcggacctgctttggctgatggggaaactgatgtgcatatgataggtgctagtaggagtactgaagaaagaagtggagagtgcaatcactcgagggacaaagccatcacagtggacctactgttgggtactggcaattccataacaaatagtgatattggggatttatacaatgtaaacactgatgatgtcctcatagccaatcaagcagccgttgaagcttgtcagcagtttcatgaggcaaagcatctgccttctggaagtccttccaaagacaagatcatttctgctccagcagaaatgaagaataattctccaccagtggaggtgaagaacacttgcggtccagtaaaaattgagagcttgtgttctccagttgaaggagaaaacacttctgatccagcattggagcaagaatcgttccttgaaaagtcaccctcgaggcagcctgtatccccggggaacaagcaggagctgaaacctaagaaaagacggaagaagaaaggctctttatttactaagaagcagcggaaggtggactccagaacacctgatgcaaaggaaaaaactgagggcacgccctctgatgtagcagaggaaactgagagcccactctctggtgcaacaggaccaggaaccatgaggtcttgctgtgctggaaagaagcgcaaatctggaaatgaacctgcagatgcaaataaaactgggaagccatcctcagcagtgaagaagcagaaaactgaaaacccgactgcagctgcaaatgcgacaaagaagcgggccacggagaagaagctagagagcgcgagtgcctcccagaagctgcaggttgagaaagctgtgcttgtcgctgtaaatagcaggaggagccaaagggtccgtaagcccaaagtttttgctgactgaagaagcaggtagaaagtcttaggctctctattgtgtatgtatcttgtagccccgtcatcaaaatcggtggccatagcaacataggaagtgcctggatcgcctcataagttagtgtacatatatcagctatgtctcacccaaattgtagatttgttagtttgttgttcttaacccttctcttctgggctgccagattaacaatgtcatgctgtgttagcgttatatcaaaaagaagaaaaaaaaaggagaaaaatatgccatgcaactgcaacttggcccgtcgcatctttgtgcccttaattaactggatggtcgccattgcagctaaacagcctg

SEQ ID NO: 211836 - DNA, 1647 bp, Zea Mays
ctggagcacgcgcgaatacatccagcccaccccctgccgcctcctcctctataagacgagacctgcgcaccggcaccgccatctccgtctccctgtctcaccggtgccgcttcccctcacccgctcgatttactgcccaatccggcccgcttcgccccgccacgaattttaatcaaccgtttggagcttgaatttgaattccagctcgaatcacccacccggccagctgggagcgagagcgttccagctcgaatcacccagcccgccagccgggagcgagagcgagctgggtgagctcgattcgatgcgttgctgagcgtggctcaaccgattcaggtcgggcggtggcgcagtcagagggatctgaaccctagcgccgtccggatctgtgacccgcgctgctcggcgcgtcggcggcatgagtgcctggaaaacgtggcgaggaggagaagcggcggggatatgagcggagccagcggcagcggggacgacttcgggcgggcggtggcgcgtgccgcagtggcgcaggcgctggaggccgcggggttcgactgcgcgcaccgctccgcggtggacgcggtcgtcgacatcctcctgcgctacatcacgcacctgggtcggtccgccgccttccatgccaacctcgccggacgcgcgctcgccaacgagcttgacgtcatccaggcgctcgaggaggtcggcgccgacacggacggcttcgccggcgcggcggccacgggccactgcctcgtcagctccggcgtcgtcagggaccttatggcgttcgttgactccaaggacgaggtgccgttcgcgcgtccgctgcctaggttccccgtccagcgcgtgcagccgcagcccactgccagcttggcggtggcggggcgggagactgggatgaggcacgtgccggagtggttgcccgtgttcccggatccgcacacgtatgtgagtacggaggtgtgggttgagccaccggcgaccaaggacagggttgacaaggtggagcaggtgcggcaacggaggaaggctgagaagtccctgctcagcttgcagcaaaggctggctatggcaggtgcggatgggtttcgtccagtagctgctgtggcgcaggataacgcagagaaggggaaggagatacaggcagctgggacaaagagaaacccatttcttgagccagcattgccgcctggagagaagtatgtatctgaggttgatatgcctcctgaaaagaagaaaccctctgtccttgaggcatttgcgccagctatccaagctagaaccatcaaagagttcgatgctggggcagggttggatcaaaatcaaaggaacatcgttccaaaggagagggctcgggtgcatcttaagattggatttggaaagaagccatttgctgcagctctgaactcaagagccctggacctgagggaagatccttcattcctgaaagaggaagcaaaggatgacaagaagcggagagcaggcatgatattaagggcatcgatggagaacccacaagaacttcctcagctctaaagttatctatagaggaagtgcggtacccagagtggagttgcatcatggtgtaattgtggaacttcagcttcctgaatctagagagaggctagaggcttacaaaagcagagg

SEQ ID NO: 211837 - DNA, 1736 bp, Zea Mays
caaagttccaataaagtattgttgaaattcgatgagcaaaaccatggaccagcaccgccggtatcccgttcccaattccacagatttccgctccccactccgcactcccagtacttaaaccacctaaaaaccaagcaaaatcccacctcccgaaccctggactcatagacaaggaattgggagattcgatttctgctattcagcccacgcccactggttcaaccggtttcttcaaatctcaggcttcaaggccgcaacttttcccccgttggggttggacttggacagctgccgtgcttgggaggcattgccggcaacgggaggtccaatcatcgatccttcgattgtatataaggaccacggttcagattactgtcaagcatgtctctactttcaaagttgcgcttgatcaccgtggatgttactggtacactgattgcttacaaaggacaccttggggattactactgtatggcagcaaagtctgctgggatgccatgtcctgactataaccgcatgcatgagggcttcaagcttgcatacactgagatggcaagacagtacccttgctttggatttgcagctaagatgccgaacatcgaatggtggaggacatgtgttaagaattcattcgttaaggctggctatgattatgatgaagagacatttgagaaagtcttcaggcgcatttattctgcatttggctcctctgcgccatactcggcgtttcctgattcgcagcccttcctaaggtgggcacgcgaaaagggactcactgttggcatcgtcagcaatgcagaataccgctacaaagatgtaatcctgccagctttaggattgaatcagagctccgaatgggactttggggtgttctcaggtgtcgttggcgttgagaagccagacccaagaatttacaagatagcgctggagatggcaggaaacgtcgctccggaagaagcgctccacataggtgacagcatgcggaaggactacaccccagctaggagcatcgggatgcatgcgctgctcctggaccggttcaagactgccgacgctgagagctggaggcagtcaggcgccacggtgctcccggaccttgtcgccactcaagagtggctcaccaaggatcagaatgacgaacaggaggaaacagtggcagcacgagtgctgaagagaatgtccgaaaagctatagatgggggctttaaccatgcattaattctacgagtgttcctttatattatctagctatggactgaaggtccaaaagcaacttatgctgatgagaggttggtgacgattcttggctactggctactgtaattagcttgagctactattctggttgcagcatctgtggctgaacacgagtaccatatctgagtgtcataagtcatgttgcgaagaacatgagtagcatatttcaggtgccgtttggttcatatatttgtaatgtaatgggtaacggataacgttaaatcatgtttgttttagtccaaccgtaatcaaataccaccctaaaatttgataccagcctattcaaatttgttaccgccagtaatcgagtcgaaaccattaccatttgcgttacattttttgaaccaaacatcacctcagtgtcatgagtcatgttacgaagatctcgagttgtcttacattcacctgcgtggagcagtagaggagcaagtggaaatgaatctgaacatgagcacaataataaaggacgaagcagtgaat

SEQ ID NO: 211838 - DNA, 1744 bp, Zea Mays
caaagttccaataaagtattgttgaaattcgatgagcaaaaccatggaccagcaccgccggtatcccgttcccaattccacagatttccgctccccactccgcactcccagtacttaaaccacctaaaaaccaagcaaaatcccacctcccgaaccctggactcatagacaaggaattgggagattcgatttctgctattcagcccacgcccactggttcaaccggtttcttcaaatctcaggcttcaaggccgcaacttttcccccgttggggttggacttggacagctgccgtgcttgggaggcattgccggcaacgggaggtccaatcatcgatccttcggtagatagattgtatataaggaccacggttcagattactgtcaagcatgtctctactttcaaagttgcgcttgatcaccgtggatgttactggtacactgattgcttacaaaggacaccttggggattactactgtatggcagcaaagtctgctgggatgccatgtcctgactataaccgcatgcatgagggcttcaagcttgcatacactgagatggcaagacagtacccttgctttggatttgcagctaagatgccgaacatcgaatggtggaggacatgtgttaagaattcattcgttaaggctggctatgattatgatgaagagacatttgagaaagtcttcaggcgcatttattctgcatttggctcctctgcgccatactcggcgtttcctgattcgcagcccttcctaaggtgggcacgcgaaaagggactcactgttggcatcgtcagcaatgcagaataccgctacaaagatgtaatcctgccagctttaggattgaatcagagctccgaatgggactttggggtgttctcaggtgtcgttggcgttgagaagccagacccaagaatttacaagatagcgctggagatggcaggaaacgtcgctccggaagaagcgctccacataggtgacagcatgcggaaggactacaccccagctaggagcatcgggatgcatgcgctgctcctggaccggttcaagactgccgacgctgagagctggaggcagtcaggcgccacggtgctcccggaccttgtcgccactcaagagtggctcaccaaggatcagaatgacgaacaggaggaaacagtggcagcacgagtgctgaagagaatgtccgaaaagctatagatgggggctttaaccatgcattaattctacgagtgttcctttatattatctagctatggactgaaggtccaaaagcaacttatgctgatgagaggttggtgacgattcttggctactggctactgtaattagcttgagctactattctggttgcagcatctgtggctgaacacgagtaccatatctgagtgtcataagtcatgttgcgaagaacatgagtagcatatttcaggtgccgtttggttcatatatttgtaatgtaatgggtaacggataacgttaaatcatgtttgttttagtccaaccgtaatcaaataccaccctaaaatttgataccagcctattcaaatttgttaccgccagtaatcgagtcgaaaccattaccatttgcgttacattttttgaaccaaacatcacctcagtgtcatgagtcatgttacgaagatctcgagttgtcttacattcacctgcgtggagcagtagaggagcaagtggaaatgaatctgaacatgagcacaataataaaggacgaagcagtgaat

SEQ ID NO: 211839 - DNA, 890 bp, Zea Mays
ttagacttatatgtgaagatccctgtaatcttggtggctcatgatcttggtggtgcctgcgtatcctacgcaatggagatgttcccaaccaaagttgccaaggccgtttttctctgtgcagcgatgctgacgaacggaaacagtgcccttgacatgttccagcagcagatggacacaaacggcacgctccaaaaggcgcaggcattcgtctactccaacggcaaggaccggcccccgaccgccatcaacgtcgacagggcattgcttagagacttgttgttcaaccagagcccttccaaggacgtgtcgctggcctcggtgtccatgaggcccatccccttcgcccctgtgctggagaagctcgtgctcaccgccgagaactacggctcggtgcggcggttctacgtggagaccacggaggacaacgcgatccctctgcccctccagcagagcatgtgtggcgccaacccaccggagaaggtgctgcggctgaagggggccgaccacgcacccttcttctccaagccgcaggcgctgcacaagaccctcgtcgagatcgccgccatgccgccggtcggggcttcgtgagaacgtgtttgtttagcttccttcaggttttgctggacggtgagcttgcgtgcgtgactgttgtacaggctgaggatggtatggtctgtggcggtgtggcaacaagtaggggctctagaatctcagcgtcgtctccacgaaggcatccttattccttccattatacttaggctatccgcaaccgttacccctaaatttttccccctatatcactttttccccctattttctcccctattttttcatctcccgcagcagttccccctaaatattccccctataccccactaccactataaaat

SEQ ID NO: 211840 - DNA, 1486 bp, Zea Mays
ctgatacagagcgtgaaaagttcggcaacatgtatcataacgacaaaaaacgaccatcgtgtgcgaccttttcgtgtttccccagctaccaaatctcttcacatcgtcaatccctcttccacagtttctgaaatcagaagggaaacacaggaacgacaggcaattcgaggctggcaatctaatcgtctgccatcccgtctcatcgttctcccaaatctgagagcgttcccaggacctagggttcttgagatccagccccaggatggatccgaaccctagagctcccctcctcctcgccatcgtcgttctcgcgcttggcgtatccgtggccagcgccgaggacgacgcgtcgggggtctctctgggccgccgcgccggggggttcttgcacggcctgaagaaggatgcactggcggagggcgatcatggggtggcactagacgaggttggaccggggctgttcgacgcactctttgccagcctctccatgatactagtcagtgagattggagatgagacattcatcattgctgcgctgatggcgatgcggcaccccaagtcaattgtgttgtctggtgcactatctgcgctttatgtgatgacagtattgtcaactggacttggcagaatagtgcccaacttgatatcaaggaagcacactaatagtgctgctacagttttgtacttattctttggactacggctgctgtatattgcatggaaatctgacccaaagggatcccagaagaaggaaatggaagaagtagaagagaagcttgagtcgggtcaagggaaatcaaccatccgtaggttctttgcaagattctgtacaccaatctttttggaggctttcatcttaaccttcttagctgaatggggcgaccggagccaaatagcgacaatcgcgctggcaacacacaagaacgcaatcggagtcgcagtgggagcgtcactggggcacacggtgtgcacatctctcgccgtggtaggagggagcatgctggcgtccaagatctcgcagcgaactgtagcgacgatcggaggcgttctcttcctagggttttctgtttcgtcctacttctaccctccgttgtgatgaaaaggctgctgatcgaaacatagatggcgtaacaacccagatcgtaacagcacgcctcgagtcgcgggcttcgtgtaatgtacagacacattcgaacattcctgacaacaatgttctctgccatgctgccttcaagtccgtatgtagaagatgtctcattgagagcatggccgactttttattgcttgtatccgaagtattaacttatactatacgctgctccaatctcgttcaccaggaaatcatgttagtccctcgttctttcaaaagcgtgataaaatgtagaaaaggcatcaagaagcccatctctagttgtaaatccttctgctttttctaagtacagatttttattgcacatctagatactatgcacacattacagctatc

SEQ ID NO: 211841 - DNA, 693 bp, Zea Mays
gcgatgccttgggaggtgacaagagctgcggttgattttgaaaagaaggcacactctgataacctcgaacaaagtaaagcaatggagaaaaatatgattgctgtggctagtgagattgagaggcttcgaggagagcttgcaaatgctgaaaaaggggccactgctgtcaacccagcagcagctgttggtaactctgggtatgctgcgccttatggcaattctgcgtcaacatatactggaatgtatggcaatcctgatgcaacgtataccgcgcaggcttatcctgacgcttatagcactaatcagggtcacatgcacaccgtcgccaatccgcattacatgagtcaacctgttccctatggacaatacgagagccagcacaccaatgttcaaagatgactggctgcaagagatagctttgactcgcctgccatctcattaatcgatgggttgaattttggagcaaaaacctctcgcgcctctccatttactaccctgatgattcctcagttagtgatggtgttattcagggacgatgatgcctctagccttttacgaatgcgaccgtccatgctcgccgagatcaagcttagggcatatttgggagtaaagtatttttatagtttcttgataatgctatgtttttaataatattttagtattttatatcataagatgtttggttgtgtttct

SEQ ID NO: 211842 - DNA, 1897 bp, Zea Mays
ttttacgcaatccatgcccgtgtctttattcgcggccgccgacctccggagcatgagaaaaatagaaaatcccttcaaaccctaagcccctctctgctcacctctgcactccgaatctgctcccaagtctgctagggtttaacgcccgcgtcctcctcacgcattcggtctggtcgctgatcttcgcttgttcgattccgctcggctctaggacccaggctctcgaggcggctggagtggcggcgcgacgagagggtgaagcggatgcagacggaggcgagggtggggatggccgccgccacgatggacggcaccggcgccgcggcgtccgccgcccggaggtacacgacgcagcagcagcagcagcagcagctgcagcaccaccagccgcagctcgggaccgtgccccatctcctcgccggcggcgtcgctggcgcagtcagcaagacctgcaccgccccgctcgcacgcctcaccatcctctttcagatgtggctacaatgcgcaatactagcatatggcgtgaagcatcccgcattgtctatgaagaaggttttcgagctttctggaaagggaaccttgttaccattgctcaccggttgccttactcttcaattagtttctatgcctatgagagatacaagaatttgcttcagatgctaccgggtcttgagaagaatggtggatttggtgcagatgttggtgttagattgctaggtggtggtttatcaggaatcactgcagcttctgcgacgtatccactggacttggtgcggacacgtcttgctgcccagacaaatactgcctactacaggggcatatctcatgctctttatgcgatctgcagagatgagggtgtccgtggattgtacaagggtcttggtgccactttactgggagtgggccccagcattgcagtaagcttctctgtgtatgaaactttacgttcccattggcaaatagagaggccatgtgattcccctgttctgatcagtttggcttgtggaagtctttcaggaattgcatcgtctacttttacattcccattggatcttgtgagacgtcgcatgcaattggaaggagcagccgggagggctcgcgtctaccagacaggactttttggaaccttcggacatattgtccgtacggagggttttagaggcatgtatagaggaatcttgcctgagtactgcaaagtggttcctggtgtcggcatcgtatttatgacatatgagatgcttaaggccatcctcacaggactggaatctgatgattagatatctgcgaggtcatgctacgcaattttgatacatggtgtcagaacaacatttgaggctgattagactgggagaaatatgagcatgtagcatacgttagggtttaggatgtgctaaggtttgcagtttgtgttatatggttacagatgtttatgtagtgcaccgtgaacgatgccacaggtcttccaaaatgaatatttttttggcatcaccatcattttgtgtatcttcaataacattgtaatggtacatgaagctgttgtctttagcctgatgatctttataactgtgagatatggtctccaattttaccagtgttatagcaaggttgatcaatggtggcaagagaactgtgaatagccttgacttgatatatgtttatcctgatatgaccatgggtctgtttcttgcatatcagtttagcaacttctcgttgcaggtgttcgtttatctccattttgtgagcgagaacccaatggctagtaatggaccacttcattttgttctcttttttttcttgctttggaaaccaaattgtttattttgttgagttcagaattgatccaatgacccaagagaaggcagaactttcatttgttgttagaatgatattcatatgc

SEQ ID NO: 211843 - DNA, 2133 bp, Zea Mays
gctagcctacctacacacacagcgtgtgcctgacggctgacgatgccgggtgccggccgcgccatttgtctatatataagctaattataagctaagcaatcgttcacagctagcttccctcatcttgagaaagaactcctcgtcctcgctccctccccaaccatcaagagcgcgcacgcacacgcacacgcacacgccgcgcgcaagccggccgacgtacggcatggagaagagcgctacaactggcggcggttcaagcggcggcggcggagaggctgcggaggaggcgaaggtgcctctgctgcagccgagggctgcggcggcggcggcggcggccgaggaggaccatggaggaggaggaggatacgacggcaaggcggcggcggatgaggagggcagggacgcgtcgtggtcgtcgctgccgctgcggcggcgcgcgtgggaggagaacaagaagctgtgggtggtggccgggccgtccatcttcacgcgcttcgcgtcgttcggcgtcaccgtcatcagccaggccttcatcggccacatcggcgccaccgagctcgccgcctacgcgctcgtctccaccgtcctcatgaggttcagcaacggcatcctgcttggaattgtggtacaacaccatactggtgctcctcacaggatacatgaagaatgcggagatcgcacttgacgccctttcgatatgccttaacatcaatggttgggagatgatgatctccataggcttcctggctgcaacaggagtgcgagtggcgaacgagctgggagctgggagcgcgaggagggccaagttcgcgatctacaacgtggtcgtcacctccttcgccatcgggctcgtgctgttcgtgctcttcctcttcttccgcgggagcctcgcctacatattcaccgagagccaggcggtggccgcagccgtcgccgacctctcgcccctgctggccttctccatactgctcaacagcgtccagcccgtgctgtcaggtgtcgctgttggtgccggttggcaaggcgtagtcgcgtacgtcaacgtcacgtcgtactacctgatcggcattcctcttggcgcagtcctaggctacgtggtggggcttcatgtgaagggcatttggatcggaatgctgctcggaacgctggtccagactatcgtgcttctcttcataacagtaaagaccgactgggacaaacaggtggtggccgctcaagagaggctgaagaaatggtacatggaagagaacagaaggatgcaggcctcgagggggaatccttgagccggtccttcaaccaacttcaagcctggcctttgtgggttgctgattgacacaattttatgctaatatttctactattcatcacctcaacatcaaagtgagcccggcattccagatcgtgtgctcctcgagccaagcaatggaaaggcactgtcactgtcagcagcagtaggataaccaaaaaaaaacattgtgttatttgctaagtgcgagtttggctcaattttcgctaagtgagagagagcctatgttggctaagtgcgactttggctcaattttgggcgtatgctaatatgtttcacaacagggcagtgcttgagatttgggatatctgtagcgctataactgactcaattttgggcatatgctaatttgctaagtgcgaacaaattcatgcagttatggccatgcactactacacttcgacatgtgtgtgtatatactcaggttcatgaaaatagtgtggtagatcgatcgtgggactgaaccacatattgatcacatcaattagtaataagggacctagcgtcgtatcgtatcacattctgcaaccaaacatgaaaggaacacagagaacacaaccatattcacagagcactacgctaataactggaacaaattatttaggtgcaaaactgtattgtcaccttattcgaactggagtgtcgacgacgaacagggctactggatgacaggtagtgtagttaagaagctgcaatcatattttacaggaaaatattagtaagaaattaagaatgcaagatgaggaatgttcgaagtactgaatcgaacagatcacaccgatagcatttgatacatatacatcaaagaaacacgatttgaaggcaaa

SEQ ID NO: 211844 - DNA, 2498 bp, Zea Mays
gctagcctacctacacacacagcgtgtgcctgacggctgacgatgccgggtgccggccgcgccatttgtctatatataagctaattataagctaagcaatcgttcacagctagcttccctcatcttgagaaagaactcctcgtcctcgctccctccccaaccatcaagagcgcgcacgcacacgcacacgcacacgccgcgcgcaagccggccgacgtacggcatggagaagagcgctacaactggcggcggttcaagcggcggcggcggagaggctgcggaggaggcgaaggtgcctctgctgcagccgagggctgcggcggcggcggcggcggccgaggaggaccatggaggaggaggaggatacgacggcaaggcggcgcgcgtgggaggagaacaagaagctgtgggtggtggccgggccgtccatcttcacgcgcttcgcgtcgttcggcgtcaccgtcatcagccaggccttcatcggccacatcggcgccaccgagctcgccgcctacgcgctcgtctccaccgtcctcatgaggttcagcaacggcatcctgctgggcatggcgagcgcgctggagacgctgtgcgggcagtcgtacggggcgaagcagtaccacatgctgggcatctacctgcagcggtcgtggatcatcctgtcggcgtgcgccgtggtgcagctccccgtgtacctgttcacggagccgctgctggtggcgctggggcaggacccggacatctcggcggtggcggggaccgtggcgctctgctcgccttcgtcttcttcggcggatgccctctcacctggaccggattctcgtccgccgccttcgccgacctcggcgccatcgtcaggctctcgctctcttctggtgtcatgctctgcttggaattgtggtacaacaccatactggtgctcctcacaggatacatgaagaatgcggagatcgcacttgacgccctttcgatatgccttaacatcaatggttgggagatgatgatctccataggcttcctggctgcaacagggtacgtacgcaaccacatcagtttcttatctttttttaataaccatgcatgcaacctaacaaaacacaacgaaccacctatctttttcagagtgcgagtggcgaacgagctgggagctgggagcgcgaggagggccaagttcgcgatctacaacgtggtcgtcacctccttcgccatcgggctcgtgctgttcgtgctcttcctcttcttccgcgggagcctcgcctacatattcaccgagagccaggcggtggccgcagccgtcgccgacctctcgcccctgctggccttctccatactgctcaacagcgtccagcccgtgctgtcaggtgtcgctgttggtgccggttggcaaggcgtagtcgcgtacgtcaacgtcacgtcgtactacctgatcggcattcctcttggcgcagtcctaggctacgtggtggggcttcatgtgaagggcatttggatcggaatgctgctcggaacgctggtccagactatcgtgcttctcttcataacagtaaagaccgactgggacaaacaggtggtggccgctcaagagaggctgaagaaatggtacatggaagagaacagaaggatgcaggcctcgagggggaatccttgagccggtccttcaaccaacttcaagcctggcctttgtgggttgctgattgacacaattttatgctaatatttctactattcatcacctcaacatcaaagtgagcccggcattccagatcgtgtgctcctcgagccaagcaatggaaaggcactgtcactgtcagcagcagtaggataaccaaaaaaaaacattgtgttatttgctaagtgcgagtttggctcaattttcgctaagtgagagagagcctatgttggctaagtgcgactttggctcaattttgggcgtatgctaatatgtttcacaacagggcagtgcttgagatttgggatatctgtagcgctataactgactcaattttgggcatatgctaatttgctaagtgcgaacaaattcatgcagttatggccatgcactactacacttcgacatgtgtgtgtatatactcaggttcatgaaaatagtgtggtagatcgatcgtgggactgaaccacatattgatcacatcaattagtaataagggacctagcgtcgtatcgtatcacattctgcaaccaaacatgaaaggaacacagagaacacaaccatattcacagagcactacgctaataactggaacaaattatttaggtgcaaaactgtattgtcaccttattcgaactggagtgtcgacgacgaacagggctactggatgacaggtagtgtagttaagaagctgcaatcatattttacaggaaaatattagtaagaaattaagaatgcaagatgaggaatgttcgaagtactgaatcgaacagatcacaccgatagcatttgatacatatacatcaaagaaacacgatttgaaggcaaa

SEQ ID NO: 211845 - DNA, 1667 bp, Zea Mays
gtttgtcctctctcctaaaactctacctgcggggggtgcaagtgttgaacttcatttcagttcttcttgaacatgcgggggacaaggttattccatttgcatgtcagctatcacaattttttcagatgatatggaatgaatctgcgggtgaaagcttgctacagatacaattactaacagcacttagaacttttgtttcttcgcttggattccagtcacctctttcttaccacatgcttattcctatactgcaaagtggtatcaatattgacagccctgatgctcttaatcttcttgaggacagtgttttgttgtgggaagcaaccctttcaaatgccccttccattgtacctcaacttctggatttattcccttaccttgtgggcatcatgaatagaagctttgaccatctggaggtcacaatgaaaataattgaggattacattatttttggcggttcagaatttttgaaaagccatggtgcaagcctagctaacatcattgatactattgttggaaatgtcaatgataaaggacttctcactgcacttcctattgttgatcttcttattcagatatttcctctggaagctccaccattgatatccagtgctcttcagaaacttaccttcatttcgttgagtcaagatgatggccaaaacccgtctaggacaactgtccgagcatcctctggggcgattcttgctaggcttctggtgatgaatacaaacttttcggcacaactattatcagagcctgctcttttggcaagcatccaacaagcagggatttctgtgaacaataatctgcttttttctttggttgatatgtggatcgacaaggtagatgacgcaaatgctatacagcagaaggaatacgcaatggcactttctgtaatcctgacattacaggtacctcaggtcattgacaaacttgatgacatactgagtgtctgcactactgtcattataggaagccgtgaagtaaagactgatgacgatactagcggcgatatcacaagctcttcatggataggcaacgatggttcaggttattccaacacttcaagcaaagagctgagaaagcgccaggtaaaggattcagatcctatcaaacaaacatcgctagagatggtgttaagagagaacttaaaagcatgtgctgttttccatggggatgcagcattcaacgctgccatcggcaggatccatccatcttcgtttgctcagctgcaacaggccctgaatactgcataagagtgcatagctgcttactggattgtatggagcattacgtggagcaggcattgctttgtgctgacagacagttgaatcgcggtatgacacagcagtgcagtgcagagagagcatgtcctgatcttccgaaatataattggattggattggattaccgcggtcaatgtggatggccagagtttttatagctgtccttccaacatgactgactcgatcttctcccctcccccttctcaaatcatggccaggcatccatcctagttgatttttatcccttgtttagcgaggtgacgccgagattgttgtttgagaaggaaatctggaatgcaattttgttgtacgttttatgttcccattaggaataaaaatgttctttacattcacgtatatctagattctcaaatatttgtc

SEQ ID NO: 211846 - DNA, 1689 bp, Zea Mays
ctcaaattacagatacagacatatagggacccatgtgtaaaactcttgcagcgctaacgacaccgcatgctggttctatgattgaagggaatgatccagtcacgggtcatataatctcaacaaccattggagggaagaatggagagcctaaaaagactatcagctacatggcagagagagttgtgggaactggatcattcggaatcgtcttccaggcaaaatgtctggagactggtgagactgttgctatcaagaaggttttgcaggacaagcgctacaagaacagggagctgcaaatcatgcgatccatggatcactgcaatgctgtttccttgaagcattgtttcttctccaccacaagcagagatgaactttttcttaacttagtgatggagtttgttcctgagtcactacatcgtgtgctgaagcactacagcaatatgaaccagaggatgccgcttatttatgttaaattatatacctaccagatatttcgaggtttagcctatattcacacagtacctggtgtttgccacagggatgtgaaaccacagaatcttttggttgatccattgactcaccaagtgaagatatgtgattttgggagtgccaaaatgttggtcaaaggtgaagcaaacatttcatatatatgctcacgttattaccgtgctccagagctcatatttggggcaaccgagtacacaacatcaattgatatttggtcagctggatgtgttcttgctgagctgcttcttggccagcctctcttccctggcgaaagtgctgtggatcaacttgttgagataataaaggttcttggtactccaacacgtgaggaaatccgttgtatgaatccaaactacaccgagtttagatttcctcagatcaaagctcacccatggcacaagattttccacaagcggatgcctccagaagctatagatctcgcttcacgtttgctccagtactcaccaaatctaagatgcactgctcttgaagcgtgtgcacatccattctttgatgagttgcgagagccacatgcgaggttgccaaatggacggccatttcctccactgttcaactttaaacaggaactagcaaatgcctccccggagctcatcaacaggctgatcccagaccatgctaggcggcatcttgggctcactttattgcccaccgctggaccataggcgaaggctctatggtgtttaaaccttgctctttctgattcttcgttgtgccataggcaattcaaggtgtagaatctgaccattattggaaagccaaacacgagctggcgccaatgtgttgcataaggagaggcggtatgttcgtgcagccagccttttgccgcctgttttaatgcaaaatctgattttacttaagcagtgtgaggggaagtgggttggtgtattgttaagctattgaaggaattcaatccctggtattgtattactttctccaacgttaaatgttgtagttcgcctgtaagtgttccacatcgcctgttatcagtccgcaatccttcgtgtaaatgttattaatgaaaaaaatacatcttgctatgttaccgatcgactcattccaatcacattccgtcctgttgcaaacaaattcttgttttcattgtcagtcgtgctgatcgggaattgtttccagcatcttcctgcaaggaagtgttaattctga

SEQ ID NO: 211847 - DNA, 1718 bp, Zea Mays
cccccttttccgccgctggcgtgtggctccggcgtcccggagcggtcgcgcaggcctaccggatctctccgctccggccccggcgtcgtgcttgcatgctggttctatgattgaagggaatgatccagtcacgggtcatataatctcaacaaccattggagggaagaatggagagcctaaaaagactatcagctacatggcagagagagttgtgggaactggatcattcggaatcgtcttccaggcaaaatgtctggagactggtgagactgttgctatcaagaaggttttgcaggacaagcgctacaagaacagggagctgcaaatcatgcgatccatggatcactgcaatgctgtttccttgaagcattgtttcttctccaccacaagcagagatgaactttttcttaacttagtgatggagtttgttcctgagtcactacatcgtgtgctgaagcactacagcaatatgaaccagaggatgccgcttatttatgttaaattatatacctaccagatatttcgaggtttagcctatattcacacagtacctggtgtttgccacagggatgtgaaaccacagaatcttttggttgatccattgactcaccaagtgaagatatgtgattttgggagtgccaaaatgttggtcaaaggtgaagcaaacatttcatatatatgctcacgttattaccgtgctccagagctcatatttggggcaaccgagtacacaacatcaattgatatttggtcagctggatgtgttcttgctgagctgcttcttggccagcctctcttccctggcgaaagtgctgtggatcaacttgttgagataataaaggttcttggtactccaacacgtgaggaaatccgttgtatgaatccaaactacaccgagtttagatttcctcagatcaaagctcacccatggcacaagattttccacaagcggatgcctccagaagctatagatctcgcttcacgtttgctccagtactcaccaaatctaagatgcactgctcttgaagcgtgtgcacatccattctttgatgagttgcgagagccacatgcgaggttgccaaatggacggccatttcctccactgttcaactttaaacaggaactagcaaatgcctccccggagctcatcaacaggctgatcccagaccatgctaggcggcatcttgggctcactttattgcccaccgctggaccataggcgaaggctctatggtgtttaaaccttgctctttctgattcttcgttgtgccataggcaattcaaggtgtagaatctgaccattattggaaagccaaacacgagctggcgccaatgtgttgcataaggagaggcggtatgttcgtgcagccagccttttgccgcctgttttaatgcaaaatctgattttacttaagcagtgtgaggggaagtgggttggtgtattgttaagctattgaaggaattcaatccctggtattgtattactttctccaacgttaaatgttgtagttcgcctgtaagtgttccacatcgcctgttatcagtccgcaatccttcgtgtaaatgttattaatgaaaaaaatacatcttgctatgttaccgatcgactcattccaatcacattccgtcctgttgcaaacaaattcttgttttcattgtcagtcgtgctgatcgggaattgtttccagcatcttcctgcaaggaagtgttaattctga

SEQ ID NO: 211848 - DNA, 1605 bp, Zea Mays
ccggatctctccgctccggccccggcgtcgtgcttgcatgctggttctatgattgaagggaatgatccagtcacgggtcatataatctcaacaaccattggagggaagaatggagagcctaaaaagactatcagctacatggcagagagagttgtgggaactggatcattcggaatcgtcttccaggcaaaatgtctggagactggtgagactgttgctatcaagaaggttttgcaggacaagcgctacaagaacagggagctgcaaatcatgcgatccatggatcactgcaatgctgtttccttgaagcattgtttcttctccaccacaagcagagatgaactttttcttaacttagtgatggagtttgttcctgagtcactacatcgtgtgctgaagcactacagcaatatgaaccagaggatgccgcttatttatgttaaattatatacctaccagatatttcgaggtttagcctatattcacacagtacctggtgtttgccacagggatgtgaaaccacagaatcttttggttgatccattgactcaccaagtgaagatatgtgattttgggagtgccaaaatgttgagctcatatttggggcaaccgagtacacaacatcaattgatatttggtcagctggatgtgttcttgctgagctgcttcttggccagcctctcttccctggcgaaagtgctgtggatcaacttgttgagataataaaggttcttggtactccaacacgtgaggaaatccgttgtatgaatccaaactacaccgagtttagatttcctcagatcaaagctcacccatggcacaagattttccacaagcggatgcctccagaagctatagatctcgcttcacgtttgctccagtactcaccaaatctaagatgcactgctcttgaagcgtgtgcacatccattctttgatgagttgcgagagccacatgcgaggttgccaaatggacggccatttcctccactgttcaactttaaacaggaactagcaaatgcctccccggagctcatcaacaggctgatcccagaccatgctaggcggcatcttgggctcactttattgcccaccgctggaccataggcgaaggctctatggtgtttaaaccttgctctttctgattcttcgttgtgccataggcaattcaaggtgtagaatctgaccattattggaaagccaaacacgagctggcgccaatgtgttgcataaggagaggcggtatgttcgtgcagccagccttttgccgcctgttttaatgcaaaatctgattttacttaagcagtgtgaggggaagtgggttggtgtattgttaagctattgaaggaattcaatccctggtattgtattactttctccaacgttaaatgttgtagttcgcctgtaagtgttccacatcgcctgttatcagtccgcaatccttcgtgtaaatgttattaatgaaaaaaatacatcttgctatgttaccgatcgactcattccaatcacattccgtcctgttgcaaacaaattcttgttttcattgtcagtcgtgctgatcgggaattgtttccagcatcttcctgcaaggaagtgttaattctga

SEQ ID NO: 211849 - DNA, 1733 bp, Zea Mays
ccccatgcttcctccataccggttggctttagcatgccggcttgggtcgcctttgcatactggtgtactacgtgatcacaactgtgttccaaatggggaattaaactagcatgctggttctatgattgaagggaatgatccagtcacgggtcatataatctcaacaaccattggagggaagaatggagagcctaaaaagactatcagctacatggcagagagagttgtgggaactggatcattcggaatcgtcttccaggcaaaatgtctggagactggtgagactgttgctatcaagaaggttttgcaggacaagcgctacaagaacagggagctgcaaatcatgcgatccatggatcactgcaatgctgtttccttgaagcattgtttcttctccaccacaagcagagatgaactttttcttaacttagtgatggagtttgttcctgagtcactacatcgtgtgctgaagcactacagcaatatgaaccagaggatgccgcttatttatgttaaattatatacctaccagatatttcgaggtttagcctatattcacacagtacctggtgtttgccacagggatgtgaaaccacagaatcttttggttgatccattgactcaccaagtgaagatatgtgattttgggagtgccaaaatgttggtcaaaggtgaagcaaacatttcatatatatgctcacgttattaccgtgctccagagctcatatttggggcaaccgagtacacaacatcaattgatatttggtcagctggatgtgttcttgctgagctgcttcttggccagcctctcttccctggcgaaagtgctgtggatcaacttgttgagataataaaggttcttggtactccaacacgtgaggaaatccgttgtatgaatccaaactacaccgagtttagatttcctcagatcaaagctcacccatggcacaagattttccacaagcggatgcctccagaagctatagatctcgcttcacgtttgctccagtactcaccaaatctaagatgcactgctcttgaagcgtgtgcacatccattctttgatgagttgcgagagccacatgcgaggttgccaaatggacggccatttcctccactgttcaactttaaacaggaactagcaaatgcctccccggagctcatcaacaggctgatcccagaccatgctaggcggcatcttgggctcactttattgcccaccgctggaccataggcgaaggctctatggtgtttaaaccttgctctttctgattcttcgttgtgccataggcaattcaaggtgtagaatctgaccattattggaaagccaaacacgagctggcgccaatgtgttgcataaggagaggcggtatgttcgtgcagccagccttttgccgcctgttttaatgcaaaatctgattttacttaagcagtgtgaggggaagtgggttggtgtattgttaagctattgaaggaattcaatccctggtattgtattactttctccaacgttaaatgttgtagttcgcctgtaagtgttccacatcgcctgttatcagtccgcaatccttcgtgtaaatgttattaatgaaaaaaatacatcttgctatgttaccgatcgactcattccaatcacattccgtcctgttgcaaacaaattcttgttttcattgtcagtcgtgctgatcgggaattgtttccagcatcttcctgcaaggaagtgttaattctga

SEQ ID NO: 211850 - DNA, 2297 bp, Zea Mays
cttgggtcgcctttgcatactggtgtactacgtgatcacaactgtgttccaaatggggaattaaactagcatgctggttctatgattgaagggaatgatccagtcacgggtcatataatctcaacaaccattggagggaagaatggagagcctaaaaagactatcagctacatggcagagagagttgtgggaactggatcattcggaatcgtcttccaggcaaaatgtctggagactggtgagactgttgctatcaagaaggttttgcaggacaagcgctacaagaacagggagctgcaaatcatgcgatccatggatcactgcaatgctgtttccttgaagcattgtttcttctccaccacaagcagagatgaactttttcttaacttagtgatggagtttgttcctgagtcactacatcgtgtgctgaagcactacagcaatatgaaccagaggatgccgcttatttatgttaaattatatacctaccagatatttcgaggtttagcctatattcacacagtacctggtgtttgccacagggatgtgaaaccacagaatcttttggttgatccattgactcaccaagtgaagatatgtgattttgggagtgccaaaatgttggtcaaaggtgaagcaaacatttcatatatatgctcacgttattaccgtgctccagagctcatatttggggcaaccgagtacacaacatcaattgatatttggtcagctggatgtgttcttgctgagctgcttcttggccagcctctcttccctggcgaaagtgctgtggatcaacttgttgagataataaaggttcttggtactccaacacgtgaggaaatccgttgtatgaatccaaactacaccgagtttagatttcctcagatcaaagctcacccatggcacaagattttccacaagcggatgcctccagaagctatagatctcgcttcacgtttgctccagtactcaccaaatctaagatgcactgctgtgagtattttctgcctatttgactgattctagtcaactaaagaagcctattaatgattgcaaagcttagatatgacaataattgttttttcctagttggttggtcatgtcgacccgtcgcttcaattttagctgttaaatttatataactgccgatgattggatatgatggtgccatatcattttcctttctattctcataaatgatgtacaagcctttacctgatatcctccgtagcaagacaatgcttctctttatacccagccaaaatggacttctctgtaagccccaactgttaaaaagggaccatgaaggtcttatattgccttatctggactacctttgtcaagactcaagaagtcaggaggctgttagcattgacagagttggaagcgtatactgctcttagctggatttcaattcagcactgtaattccttgtgaaattctctccttggaaatgaaattactggacttgcataacaggacttagagtgtcttctttaagaggacaatgttgtaatgcatcaaccatcaagtctgagatgcctagcctaaccaactcctgctgtgattttattgctaattttggtagctcttgcagcttgaagcgtgtgcacatccattctttgatgagttgcgagagccacatgcgaggttgccaaatggacggccatttcctccactgttcaactttaaacaggaactagcaaatgcctccccggagctcatcaacaggctgatcccagaccatgctaggcggcatcttgggctcactttattgcccaccgctggaccataggcgaaggctctatggtgtttaaaccttgctctttctgattcttcgttgtgccataggcaattcaaggtgtagaatctgaccattattggaaagccaaacacgagctggcgccaatgtgttgcataaggagaggcggtatgttcgtgcagccagccttttgccgcctgttttaatgcaaaatctgattttacttaagcagtgtgaggggaagtgggttggtgtattgttaagctattgaaggaattcaatccctggtattgtattactttctccaacgttaaatgttgtagttcgcctgtaagtgttccacatcgcctgttatcagtccgcaatccttcgtgtaaatgttattaatgaaaaaaatacatcttgctatgttaccgatcgactcattccaatcacattccgtcctgttgcaaacaaattcttgttttcattgtcagtcgtgctgatcgggaattgtttccagcatcttcctgcaaggaagtgttaattctga

SEQ ID NO: 211851 - DNA, 1667 bp, Zea Mays
ctggtgtactacgtgatcacaactgtgttccaaatggggaattaaactagcatgctggttctatgattgaagggaatgatccagtcacgggtcatataatctcaacaaccattggagggaagaatggagagcctaaaaagactatcagctacatggcagagagagttgtgggaactggatcattcggaatcgtcttccaggcaaaatgtctggagactggtgagactgttgctatcaagaaggttttgcaggacaagcgctacaagaacagggagctgcaaatcatgcgatccatggatcactgcaatgctgtttccttgaagcattgtttcttctccaccacaagcagagatgaactttttcttaacttagtgatggagtttgttcctgagtcactacatcgtgtgctgaagcactacagcaatatgaaccagaggatgccgcttatttatgttaaattatatacctaccagatatttcgaggtttagcctatattcacacagtacctggtgtttgccacagggatgtgaaaccacagaatcttttggttgatccattgactcaccaagtgaagatatgtgattttgggagtgccaaaatgttggtcaaaggtgaagcaaacatttcatatatatgctcacgttattaccgtgctccagagctcatatttggggcaaccgagtacacaacatcaattgatatttggtcagctggatgtgttcttgctgagctgcttcttggccagcctctcttccctggcgaaagtgctgtggatcaacttgttgagataataaaggttcttggtactccaacacgtgaggaaatccgttgtatgaatccaaactacaccgagtttagatttcctcagatcaaagctcacccatggcacaagattttccacaagcggatgcctccagaagctatagatctcgcttcacgtttgctccagtactcaccaaatctaagatgcactgctcgtgtgcacatccattctttgatgagttgcgagagccacatgcgaggttgccaaatggacggccatttcctccactgttcaactttaaacaggaactagcaaatgcctccccggagctcatcaacaggctgatcccagaccatgctaggcggcatcttgggctcactttattgcccaccgctggaccataggcgaaggctctatggtgtttaaaccttgctctttctgattcttcgttgtgccataggcaattcaaggtgtagaatctgaccattattggaaagccaaacacgagctggcgccaatgtgttgcataaggagaggcggtatgttcgtgcagccagccttttgccgcctgttttaatgcaaaatctgattttacttaagcagtgtgaggggaagtgggttggtgtattgttaagctattgaaggaattcaatccctggtattgtattactttctccaacgttaaatgttgtagttcgcctgtaagtgttccacatcgcctgttatcagtccgcaatccttcgtgtaaatgttattaatgaaaaaaatacatcttgctatgttaccgatcgactcattccaatcacattccgtcctgttgcaaacaaattcttgttttcattgtcagtcgtgctgatcgggaattgtttccagcatcttcctgcaaggaagtgttaattctga

SEQ ID NO: 211852 - DNA, 1754 bp, Zea Mays
ttcggccgagcagacccgtggcctcactcccccgcgcgttagggttccgctctcatccttcgtgcctgctcaccgccgccacttccagctaggccgtcgtcgccgcgccccaccaggttctcgcgttttccccctctccaagcttccatccttccctcttaccttactggcgggtgttgtttctgtacccggtggttcatctcgccgcggccgattagctgttattcacggaatcgtcttctggtactattcgttcccccttctgacttgcttcttaactacactacctgtcatccagtagccctgttcgtcgtcgacactccagttcgaataaggctctgagagcacctcaccttcacatgaagccccaccacgtagcctaggactgcgccaagaggaatgccgatcaggtagtacgacgtgacgttgacgtacgcgactacgccttgccaaccggcaccaacagcgacacctgacagcacgggctggacgctgttgagcagtatggagaaggccagcaggggcgagaggtcggcgacggctgcggccaccgcctggctctcggtgaatatgtaggcgaggctcccgcggaagaagaggaagagcacgaacagcacgagcccgatggcgaaggaggtgacgaccacgttgtagatcgcgaacttggccctcctcgcgctcccagctcccagctcgttcgccactcgcactctgaaaaagataggtgccaggaagcctatggagatcatcatctcccaaccattgatgttaaggctgcacatttagtaaagcagctagcaagtgatgaaagtgtagagtgatctgtggacattatcattagggttcctttaatattaccatatcgaaagggcgtcaagtgcgatctccgcattcttcatgtatcctgtgaggagcaccagtatggtgttgtaccacaattccaagctgaaagaaaaaaagactacgatgcggatggataccatccacacccacagaccacagtggcttgctttgcttaccagagcatgacaccagaagagagcgagagcctgacgatggcgccgaggtcggcgaaggcggcggacgagaatccggtccaggtgagagggcatccgccgaagaagacgaaggcgagctggccgaacacggggatccacatggcgacgaccatggagcccatgacgccggcgaggccgaggcggaggtggacggcggcgagccaggacagggcgaggtggaggccgaggttgagcatggcgaggtacgtgatgatcatgttcttgatctgcgcctgcaggtacatctgcagcgggaaggcccagacgaaggagaagagcacggggatgtaccagagcgccacggtccccgccaccgccgagatgtccgggtcctgccccagcgccaccagcagcggctccgtgaacaggtacacggggagctgcaccacggcgcacgccgacaggatgatccacgaccgctgcaggtagatgcccagcatgtggtactgcttcgccccgtacgactgcccgcacagcgtctccagcgcgctcgccatgcccagctgcatgcagatgcatatgtatgtaatcctcctatatatatggattgattccagatgctaattactccctccgttcttttttatttgtcgcctatattagttgaaatctagcaatatagtagtaattaacagagggacaagcacgtgtttgtgccgcggccaagagttgaaatgtactagcaattaacctcga

SEQ ID NO: 211853 - DNA, 4423 bp, Zea Mays
agctaaaatatggattgagataactgctcacaacggcagggtcaaccgggatccccttttcatttcacacgaacccaatgcgcgtcgcaggccagaccgccagagagagagggaaggtgaccgggatagagaaagaaaagtagaaacccaaacccccggcgaggacgccaccgtggcgacggcggatgcggcggggctggtccccgcggacctggagagtcgggtgatggaggcggtgaaggcgtcggaggcgcgccgcgacccgccgctgctgcgggcggtggagctgtcccgcgtcgtcgccgaagagggcgcgggcgccgagctggccgggatcctcgtctccaacctctgtttcgcgcacaactcgccctcgctctggaagctcctgggccaagccgtcgcgtcccgcctcctctgcccgctccacgtcctcgcgctcctcacccctagggtgttgccgcagcggcgagcgcagcctgaggcgtatcggctgtatctggagctcctcaagtgtcacgccacgtcgtcgttgctggcgatggaggctgggcctaaccgtgacaacatactcgaggattgtggctttccatctgtgatggcagaggggcaagagagtgtatatgccattgaggggccacagcctatggacttagacattaaaaggggatctactgagaaccaaaatgagcatcgcgaacagttacgccggaagaacactttcatggctttggacgtgttgcatatgatggctgctgatagaaagattcaatcatttctgagcttgatattcctgaacatgcctgaaaagttcagttctctacgccagaggttgagttctattgaagcacacaaggtgaccttggagactctactgccttctggacacaaaattaatgacttgttaataaacatctggagagtttgcaaagcaggctatcaaccaaataacaaacacattctgggtgttcttggtaatatgggatccggtggctcccttctgggccagcttactggagctgggaggcctgcctgctggataatatttgatatatatgtggagaatgcaattgatgggaagcatctaagtgttacatcagctatcgggattataaaagaaatgaccaagacaatgcaagtgcttaatgaagcaagctggcaggaaacatttaaagctctttggatttccacccttcgtcttgtacaacgggctagagaacctcttgaaggaccgattcctcatctagatgcaaggttatgcatgttgttagctcttataccattatcaattgccgcgattcttcaagaggaaagtgatatgtttggagttgaagggaacaaaattcttccacaaagacaagggcttatatcatctctccaggatctgatccagtattcaggacttcttgtaccaccttcatcagtggtgaatgcagctaatgctgcagcctcaaaagcagcaatatttaaggccaactataaggctggggctggcaacactagcatgatggaccagactgactcttcaatgaaagctgctgggaacatgctccatctcattatcgaagcctgtatctcgagaaagttgattgatacatctgcttacttatggcatggttatgttgtaccatctaggactttaaaagatacagctttgccccaagaatccccctggctgaactttatgaaagggtctcaactttcagaaccccttattgatgctctggtcgcaactcctgcttcaagtgttgcggaattggacaagttatacagtgtagcaacaaatggttcagaagaagaaaaaacagctgctgcaaagattctttgtggcgcatcacttgttcgtggctggaacattcaggaacatgtggtcagtatggtggtcaagctattatcagcttctttaccctcagattcctcaacttcaactcctgggagcatgagccactaccttgctcatatgtctacgttgaacgaaatcttactcggtgtgtcttatggtgatgtcatccacattctttcgttgtatggaatggttccagatgttgccgtggctttaatgccactatgtgaggcttttgggtcaatagcaccgccacctaatcacaagtctaccattcttggtgaaacatctgtttatttggtcttctcctgtgcatttctttgtcttcttcgcttgtggaagttttatagaccccctcaagagtattgtcttactggtcgtggaggctcagtaaagctggaactgactctggactatctgttgttgatgcacaataatcgcattttctcaaattcgtctgcccctaatagggattcttacaacagtatgggctcagtcaatgaggtctctgctcagccgatttatattgattctttccccaagctaagtgcttggtatttccagaatcaagcttgcatcgcctctacactttctggtctttgcaacaaaaaccctgtccatcaagttgcgaacaaaattttgaatatgatttgccgaaaaatgaataaaggtggagtatcatctagtaatctttcatctacttctagtagtagcgttagtggttcttctgtaagtgcatcggatgattcttaccaaaggcctgctgttcctgcttgggaatttttagaagctgttccttttgtacttgaagctgttctgacagcatgtgctcatgggcggctttccagccgagacttgactacaagcttaagggatcttgtggactttttgcctgcttctcttgctgcaattgtaagctacttctcagcagaaattacacggggaatctggaaacctgttccaatgaatggaactgaatggcccagtcctggtgcttctcttcattccattgaagctgaagtaaaggaaattcttgcatctgctggtgttcagattaacagctgctatccacgtggtgtgccgccaatgcttcctttgcctatggctgcacttgtcagcttgacaattacatttaagctagataggagtttggagtacattcaaggggtcattggacatgcactagagaactgcgcagggggaagttcctggccaagcatgcccattatcggggcattgtggacacagaaagtgcgaagatggcatgacttcattgtcctctcttgtatgcgttctccatttggcagagacaaagatgcagttgcgcagctcatccgaagctgcttttcgtcctttctgcagtcatcatccagtggttctgacataatcgcaaaccgtggagttggggctttattaggggactcaatcacggatcaaggtcttaggctcccaatggcacctggtttcgtctacctgagaacatgtcgaactttccatgacacatacttcgttagtgaagtgatcctcaagcaagtgattgaatgggctcacaaacttgcaaatggatggtctttcaatgggcctccgcagttgaaatcaggccggacaccactatcttgtgcagcatctatggcgcatcaggtcgcgatgcttggtggtggtctcctatgcatagcaggtggaccacttgtggtccaggtgttgtatgaagacacactaccgacactgctgctgtcagccagagaacagagtttgaaagaccctgggccagtttctagcacactccaaggttacgccatggccaacatgctcttttactgtggtagcctactttggggagcggacaggagttctcctgtcatgaaattgtctttcctctcgaggcggccacgggtggtgagaaaccacatggatttcatagctggtgtactggacggacacattcttctgggctgtgacccgggtacctggaaagcgtatgtttctcagtttatgttcctggtggtgaagtttgttccatcatggttgccggacataaagctggacacgctaaagaagatagcagctggacttcggagttggcatgaacatgaccttgctctatcccttcttgagcgaggaggaccacaagcaatctctgttgtagtcgagacctttctgtgatcctgccatttggacattttgccccccacctgacatcgcagccgctgttagggtttgaagtcggtggtctgaggtctagctgaagtaatcaggatgacccttccagaattccacttgagcaaccaggataactgatgtttttctcatgtatggcgaacccattttgtttttgtgaattcaatacggaagaacattcaacctactagagtctagagtgtattgacatcagccctaacatgtaacctatgggaatttcattaactttattgcactgacttcagccctaacttgtaacatacgggaatactctatcgtgttttatatcggcgttttagttgggataaccgaactttactctccatggttcgcatcactcttaggttgggcctcttttgcaacaatgtttttcaaagtcac

SEQ ID NO: 211854 - DNA, 4020 bp, Zea Mays
agctaaaatatggattgagataactgctcacaacggcagggtcaaccgggatccccttttcatttcacacgaacccaatgcgcgtcgcaggccagaccgccagagagagagggaaggtgaccgggatagagaaagaaaagtagaaacccaaacccccggcgaggacgccaccgtggcgacggcggatgcggcggggctggtccccgcggacctggagagtcgggtgatggaggcggtgaaggcgtcggaggcgcgccgcgacccgccgctgctgcgggcggtggagctgtcccgcgtcgtcgccgaagagggcgcgggcgccgagctggccgggatcctcgtctccaacctctgtttcgcgcacaactcgccctcgctctggaagctcctgggccaagccgtcgcgtcccgcctcctctgcccgctccacgtcctcgcgctcctcacccctagggtgttgccgcagcggcgagcgcagcctgaggcgtatcggctgtatctggagctcctcaagtgtcacgccacgtcgtcgttgctggcgatggaggctgggcctaaccgtgacaagttaggcctgaaaagttcagttctctacgccagaggttgagttctattgaagcacacaaggtgaccttggagactctactgccttctggacacaaaattaatgacttgttaataaacatctggagagtttgcaaagcaggctatcaaccaaataacaaacacattctgggtgttcttggtaatatgggatccggtggctcccttctgggccagcttactggagctgggaggcctgcctgctggataatatttgatatatatgtggagaatgcaattgatgggaagcatctaagtgttacatcagctatcgggattataaaagaaatgaccaagacaatgcaagtgcttaatgaagcaagctggcaggaaacatttaaagctctttggatttccacccttcgtcttgtacaacgggctagagaacctcttgaaggaccgattcctcatctagatgcaaggttatgcatgttgttagctcttataccattatcaattgccgcgattcttcaagaggaaagtgatatgtttggagttgaagggaacaaaattcttccacaaagacaagggcttatatcatctctccaggatctgatccagtattcaggacttcttgtaccaccttcatcagtggtgaatgcagctaatgctgcagcctcaaaagcagcaatatttaaggccaactataaggctggggctggcaacactagcatgatggaccagactgactcttcaatgaaagctgctgggaacatgctccatctcattatcgaagcctgtatctcgagaaagttgattgatacatctgcttacttatggcatggttatgttgtaccatctaggactttaaaagatacagctttgccccaagaatccccctggctgaactttatgaaagggtctcaactttcagaaccccttattgatgctctggtcgcaactcctgcttcaagtgttgcggaattggacaagttatacagtgtagcaacaaatggttcagaagaagaaaaaacagctgctgcaaagattctttgtggcgcatcacttgttcgtggctggaacattcaggttccagatgttgccgtggctttaatgccactatgtgaggcttttgggtcaatagcaccgccacctaatcacaagtctaccattcttggtgaaacatctgtttatttggtcttctcctgtgcatttctttgtcttcttcgcttgtggaagttttatagaccccctcaagagtattgtcttactggtcgtggaggctcagtaaagctggaactgactctggactatctgttgttgatgcacaataatcgcattttctcaaattcgtctgcccctaatagggattcttacaacagtatgggctcagtcaatgaggtctctgctcagccgatttatattgattctttccccaagctaagtgcttggtatttccagaatcaagcttgcatcgcctctacactttctggtctttgcaacaaaaaccctgtccatcaagttgcgaacaaaattttgaatatgatttgccgaaaaatgaataaaggtggagtatcatctagtaatctttcatctacttctagtagtagcgttagtggttcttctgtaagtgcatcggatgattcttaccaaaggcctgctgttcctgcttgggaatttttagaagctgttccttttgtacttgaagctgttctgacagcatgtgctcatgggcggctttccagccgagacttgactacaagcttaagggatcttgtggactttttgcctgcttctcttgctgcaattgtaagctacttctcagcagaaattacacggggaatctggaaacctgttccaatgaatggaactgaatggcccagtcctggtgcttctcttcattccattgaagctgaagtaaaggaaattcttgcatctgctggtgttcagattaacagctgctatccacgtggtgtgccgccaatgcttcctttgcctatggctgcacttgtcagcttgacaattacatttaagctagataggagtttggagtacattcaaggggtcattggacatgcactagagaactgcgcagggggaagttcctggccaagcatgcccattatcggggcattgtggacacagaaagtgcgaagatggcatgacttcattgtcctctcttgtatgcgttctccatttggcagagacaaagatgcagttgcgcagctcatccgaagctgcttttcgtcctttctgcagtcatcatccagtggttctgacataatcgcaaaccgtggagttggggctttattaggggactcaatcacggatcaaggtcttaggctcccaatggcacctggtttcgtctacctgagaacatgtcgaactttccatgacacatacttcgttagtgaagtgatcctcaagcaagtgattgaatgggctcacaaacttgcaaatggatggtctttcaatgggcctccgcagttgaaatcaggccggacaccactatcttgtgcagcatctatggcgcatcaggtcgcgatgcttggtggtggtctcctatgcatagcaggtggaccacttgtggtccaggtgttgtatgaagacacactaccgacactgctgctgtcagccagagaacagagtttgaaagaccctgggccagtttctagcacactccaaggttacgccatggccaacatgctcttttactgtggtagcctactttggggagcggacaggagttctcctgtcatgaaattgtctttcctctcgaggcggccacgggtggtgagaaaccacatggatttcatagctggtgtactggacggacacattcttctgggctgtgacccgggtacctggaaagcgtatgtttctcagtttatgttcctggtggtgaagtttgttccatcatggttgccggacataaagctggacacgctaaagaagatagcagctggacttcggagttggcatgaacatgaccttgctctatcccttcttgagcgaggaggaccacaagcaatctctgttgtagtcgagacctttctgtgatcctgccatttggacattttgccccccacctgacatcgcagccgctgttagggtttgaagtcggtggtctgaggtctagctgaagtaatcaggatgacccttccagaattccacttgagcaaccaggataactgatgtttttctcatgtatggcgaacccattttgtttttgtgaattcaatacggaagaacattcaacctactagagtctagagtgtattgacatcagccctaacatgtaacctatgggaatttcattaactttattgcactgacttcagccctaacttgtaacatacgggaatactctatcgtgttttatatcggcgttttagttgggataaccgaactttactctccatggttcgcatcactcttaggttgggcctcttttgcaacaatgtttttcaaagtcac

SEQ ID NO: 211855 - DNA, 4189 bp, Zea Mays
agctaaaatatggattgagataactgctcacaacggcagggtcaaccgggatccccttttcatttcacacgaacccaatgcgcgtcgcaggccagaccgccagagagagagggaaggtgaccgggatagagaaagaaaagtagaaacccaaacccccggcgaggacgccaccgtggcgacggcggatgcggcggggctggtccccgcggacctggagagtcgggtgatggaggcggtgaaggcgtcggaggcgcgccgcgacccgccgctgctgcgggcggtggagctgtcccgcgtcgtcgccgaagagggcgcgggcgccgagctggccgggatcctcgtctccaacctctgtttcgcgcacaactcgccctcgctctggaagctcctgggccaagccgtcgcgtcccgcctcctctgcccgctccacgtcctcgcgctcctcacccctagggtgttgccgcagcggcgagcgcagcctgaggcgtatcggctgtatctggagctcctcaagtgtcacgccacgtcgtcgttgctggcgatggaggctgggcctaaccgtgacaagcctgaaaagttcagttctctacgccagaggttgagttctattgaagcacacaaggtgaccttggagactctactgccttctggacacaaaattaatgacttgttaataaacatctggagagtttgcaaagcaggctatcaaccaaataacaaacacattctgggtgttcttggtaatatgggatccggtggctcccttctgggccagcttactggagctgggaggcctgcctgctggataatatttgatatatatgtggagaatgcaattgatgggaagcatctaagtgttacatcagctatcgggattataaaagaaatgaccaagacaatgcaagtgcttaatgaagcaagctggcaggaaacatttaaagctctttggatttccacccttcgtcttgtacaacgggctagagaacctcttgaaggaccgattcctcatctagatgcaaggttatgcatgttgttagctcttataccattatcaattgccgcgattcttcaagaggaaagtgatatgtttggagttgaagggaacaaaattcttccacaaagacaagggcttatatcatctctccaggatctgatccagtattcaggacttcttgtaccaccttcatcagtggtgaatgcagctaatgctgcagcctcaaaagcagcaatatttaaggccaactataaggctggggctggcaacactagcatgatggaccagactgactcttcaatgaaagctgctgggaacatgctccatctcattatcgaagcctgtatctcgagaaagttgattgatacatctgcttacttatggcatggttatgttgtaccatctaggactttaaaagatacagctttgccccaagaatccccctggctgaactttatgaaagggtctcaactttcagaaccccttattgatgctctggtcgcaactcctgcttcaagtgttgcggaattggacaagttatacagtgtagcaacaaatggttcagaagaagaaaaaacagctgctgcaaagattctttgtggcgcatcacttgttcgtggctggaacattcaggaacatgtggtcagtatggtggtcaagctattatcagcttctttaccctcagattcctcaacttcaactcctgggagcatgagccactaccttgctcatatgtctacgttgaacgaaatcttactcggtgtgtcttatggtgatgtcatccacattctttcgttgtatggaatggttccagatgttgccgtggctttaatgccactatgtgaggcttttgggtcaatagcaccgccacctaatcacaagtctaccattcttggtgaaacatctgtttatttggtcttctcctgtgcatttctttgtcttcttcgcttgtggaagttttatagaccccctcaagagtattgtcttactggtcgtggaggctcagtaaagctggaactgactctggactatctgttgttgatgcacaataatcgcattttctcaaattcgtctgcccctaatagggattcttacaacagtatgggctcagtcaatgaggtctctgctcagccgatttatattgattctttccccaagctaagtgcttggtatttccagaatcaagcttgcatcgcctctacactttctggtctttgcaacaaaaaccctgtccatcaagttgcgaacaaaattttgaatatgatttgccgaaaaatgaataaaggtggagtatcatctagtaatctttcatctacttctagtagtagcgttagtggttcttctgtaagtgcatcggatgattcttaccaaaggcctgctgttcctgcttgggaatttttagaagctgttccttttgtacttgaagctgttctgacagcatgtgctcatgggcggctttccagccgagacttgactacaagcttaagggatcttgtggactttttgcctgcttctcttgctgcaattgtaagctacttctcagcagaaattacacggggaatctggaaacctgttccaatgaatggaactgaatggcccagtcctggtgcttctcttcattccattgaagctgaagtaaaggaaattcttgcatctgctggtgttcagattaacagctgctatccacgtggtgtgccgccaatgcttcctttgcctatggctgcacttgtcagcttgacaattacatttaagctagataggagtttggagtacattcaaggggtcattggacatgcactagagaactgcgcagggggaagttcctggccaagcatgcccattatcggggcattgtggacacagaaagtgcgaagatggcatgacttcattgtcctctcttgtatgcgttctccatttggcagagacaaagatgcagttgcgcagctcatccgaagctgcttttcgtcctttctgcagtcatcatccagtggttctgacataatcgcaaaccgtggagttggggctttattaggggactcaatcacggatcaaggtcttaggctcccaatggcacctggtttcgtctacctgagaacatgtcgaactttccatgacacatacttcgttagtgaagtgatcctcaagcaagtgattgaatgggctcacaaacttgcaaatggatggtctttcaatgggcctccgcagttgaaatcaggccggacaccactatcttgtgcagcatctatggcgcatcaggtcgcgatgcttggtggtggtctcctatgcatagcaggtggaccacttgtggtccaggtgttgtatgaagacacactaccgacactgctgctgtcagccagagaacagagtttgaaagaccctgggccagtttctagcacactccaaggttacgccatggccaacatgctcttttactgtggtagcctactttggggagcggacaggagttctcctgtcatgaaattgtctttcctctcgaggcggccacgggtggtgagaaaccacatggatttcatagctggtgtactggacggacacattcttctgggctgtgacccgggtacctggaaagcgtatgtttctcagtttatgttcctggtggtgaagtttgttccatcatggttgccggacataaagctggacacgctaaagaagatagcagctggacttcggagttggcatgaacatgaccttgctctatcccttcttgagcgaggaggaccacaagcaatctctgttgtagtcgagacctttctgtgatcctgccatttggacattttgccccccacctgacatcgcagccgctgttagggtttgaagtcggtggtctgaggtctagctgaagtaatcaggatgacccttccagaattccacttgagcaaccaggataactgatgtttttctcatgtatggcgaacccattttgtttttgtgaattcaatacggaagaacattcaacctactagagtctagagtgtattgacatcagccctaacatgtaacctatgggaatttcattaactttattgcactgacttcagccctaacttgtaacatacgggaatactctatcgtgttttatatcggcgttttagttgggataaccgaactttactctccatggttcgcatcactcttaggttgggcctcttttgcaacaatgtttttcaaagtcac

SEQ ID NO: 211856 - DNA, 4444 bp, Zea Mays
agctaaaatatggattgagataactgctcacaacggcagggtcaaccgggatccccttttcatttcacacgaacccaatgcgcgtcgcaggccagaccgccagagagagagggaaggtgaccgggatagagaaagaaaagtagaaacccaaacccccggcgaggacgccaccgtggcgacggcggatgcggcggggctggtccccgcggacctggagagtcgggtgatggaggcggtgaaggcgtcggaggcgcgccgcgacccgccgctgctgcgggcggtggagctgtcccgcgtcgtcgccgaagagggcgcgggcgccgagctggccgggatcctcgtctccaacctctgtttcgcgcacaactcgccctcgctctggaagctcctgggccaagccgtcgcgtcccgcctcctctgcccgctccacgtcctcgcgctcctcacccctagggtgttgccgcagcggcgagcgcagcctgaggcgtatcggctgtatctggagctcctcaagtgtcacgccacgtcgtcgttgctggcgatggaggctgggcctaaccgtgacaagatagggaagtccattgctgaagctttgcaactatccaaggtttatggattttctggaacagagtttggacatgttgtcattctgtttgtgttggctgttgtcaataaactgattgatagcatactcgaggattgtggctttccatctgtgatggcagaggggcaagagagtgtatatgccattgaggggccacagcctatggacttagacattaaaaggggatctactgagaaccaaaatgagcatcgcgaacagcctgaaaagttcagttctctacgccagaggttgagttctattgaagcacacaaggtgaccttggagactctactgccttctggacacaaaattaatgacttgttaataaacatctggagagtttgcaaagcaggctatcaaccaaataacaaacacattctgggtgttcttggtaatatgggatccggtggctcccttctgggccagcttactggagctgggaggcctgcctgctggataatatttgatatatatgtggagaatgcaattgatgggaagcatctaagtgttacatcagctatcgggattataaaagaaatgaccaagacaatgcaagtgcttaatgaagcaagctggcaggaaacatttaaagctctttggatttccacccttcgtcttgtacaacgggctagagaacctcttgaaggaccgattcctcatctagatgcaaggttatgcatgttgttagctcttataccattatcaattgccgcgattcttcaagaggaaagtgatatgtttggagttgaagggaacaaaattcttccacaaagacaagggcttatatcatctctccaggatctgatccagtattcaggacttcttgtaccaccttcatcagtggtgaatgcagctaatgctgcagcctcaaaagcagcaatatttaaggccaactataaggctggggctggcaacactagcatgatggaccagactgactcttcaatgaaagctgctgggaacatgctccatctcattatcgaagcctgtatctcgagaaagttgattgatacatctgcttacttatggcatggttatgttgtaccatctaggactttaaaagatacagctttgccccaagaatccccctggctgaactttatgaaagggtctcaactttcagaaccccttattgatgctctggtcgcaactcctgcttcaagtgttgcggaattggacaagttatacagtgtagcaacaaatggttcagaagaagaaaaaacagctgctgcaaagattctttgtggcgcatcacttgttcgtggctggaacattcaggaacatgtggtcagtatggtggtcaagctattatcagcttctttaccctcagattcctcaacttcaactcctgggagcatgagccactaccttgctcatatgtctacgttgaacgaaatcttactcggtgtgtcttatggtgatgtcatccacattctttcgttgtatggaatggttccagatgttgccgtggctttaatgccactatgtgaggcttttgggtcaatagcaccgccacctaatcacaagtctaccattcttggtgaaacatctgtttatttggtcttctcctgtgcatttctttgtcttcttcgcttgtggaagttttatagaccccctcaagagtattgtcttactggtcgtggaggctcagtaaagctggaactgactctggactatctgttgttgatgcacaataatcgcattttctcaaattcgtctgcccctaatagggattcttacaacagtatgggctcagtcaatgaggtctctgctcagccgatttatattgattctttccccaagctaagtgcttggtatttccagaatcaagcttgcatcgcctctacactttctggtctttgcaacaaaaaccctgtccatcaagttgcgaacaaaattttgaatatgatttgccgaaaaatgaataaaggtggagtatcatctagtaatctttcatctacttctagtagtagcgttagtggttcttctgtaagtgcatcggatgattcttaccaaaggcctgctgttcctgcttgggaatttttagaagctgttccttttgtacttgaagctgttctgacagcatgtgctcatgggcggctttccagccgagacttgactacaagcttaagggatcttgtggactttttgcctgcttctcttgctgcaattgtaagctacttctcagcagaaattacacggggaatctggaaacctgttccaatgaatggaactgaatggcccagtcctggtgcttctcttcattccattgaagctgaagtaaaggaaattcttgcatctgctggtgttcagattaacagctgctatccacgtggtgtgccgccaatgcttcctttgcctatggctgcacttgtcagcttgacaattacatttaagctagataggagtttggagtacattcaaggggtcattggacatgcactagagaactgcgcagggggaagttcctggccaagcatgcccattatcggggcattgtggacacagaaagtgcgaagatggcatgacttcattgtcctctcttgtatgcgttctccatttggcagagacaaagatgcagttgcgcagctcatccgaagctgcttttcgtcctttctgcagtcatcatccagtggttctgacataatcgcaaaccgtggagttggggctttattaggggactcaatcacggatcaaggtcttaggctcccaatggcacctggtttcgtctacctgagaacatgtcgaactttccatgacacatacttcgttagtgaagtgatcctcaagcaagtgattgaatgggctcacaaacttgcaaatggatggtctttcaatgggcctccgcagttgaaatcaggccggacaccactatcttgtgcagcatctatggcgcatcaggtcgcgatgcttggtggtggtctcctatgcatagcaggtggaccacttgtggtccaggtgttgtatgaagacacactaccgacactgctgctgtcagccagagaacagagtttgaaagaccctgggccagtttctagcacactccaaggttacgccatggccaacatgctcttttactgtggtagcctactttggggagcggacaggagttctcctgtcatgaaattgtctttcctctcgaggcggccacgggtggtgagaaaccacatggatttcatagctggtgtactggacggacacattcttctgggctgtgacccgggtacctggaaagcgtatgtttctcagtttatgttcctggtggtgaagtttgttccatcatggttgccggacataaagctggacacgctaaagaagatagcagctggacttcggagttggcatgaacatgaccttgctctatcccttcttgagcgaggaggaccacaagcaatctctgttgtagtcgagacctttctgtgatcctgccatttggacattttgccccccacctgacatcgcagccgctgttagggtttgaagtcggtggtctgaggtctagctgaagtaatcaggatgacccttccagaattccacttgagcaaccaggataactgatgtttttctcatgtatggcgaacccattttgtttttgtgaattcaatacggaagaacattcaacctactagagtctagagtgtattgacatcagccctaacatgtaacctatgggaatttcattaactttattgcactgacttcagccctaacttgtaacatacgggaatactctatcgtgttttatatcggcgttttagttgggataaccgaactttactctccatggttcgcatcactcttaggttgggcctcttttgcaacaatgtttttcaaagtcac

SEQ ID NO: 211857 - DNA, 4548 bp, Zea Mays
agctaaaatatggattgagataactgctcacaacggcagggtcaaccgggatccccttttcatttcacacgaacccaatgcgcgtcgcaggccagaccgccagagagagagggaaggtgaccgggatagagaaagaaaagtagaaacccaaacccccggcgaggacgccaccgtggcgacggcggatgcggcggggctggtccccgcggacctggagagtcgggtgatggaggcggtgaaggcgtcggaggcgcgccgcgacccgccgctgctgcgggcggtggagctgtcccgcgtcgtcgccgaagagggcgcgggcgccgagctggccgggatcctcgtctccaacctctgtttcgcgcacaactcgccctcgctctggaagctcctgggccaagccgtcgcgtcccgcctcctctgcccgctccacgtcctcgcgctcctcacccctagggtgttgccgcagcggcgagcgcagcctgaggcgtatcggctgtatctggagctcctcaagtgtcacgccacgtcgtcgttgctggcgatggaggctgggcctaaccgtgacaagatagggaagtccattgctgaagctttgcaactatccaaggtttatggattttctggaacagagtttggacatgttgtcattctgtttgtgttggctgttgtcaataaactgattgatagcatactcgaggattgtggctttccatctgtgatggcagaggggcaagagagtgtatatgccattgaggggccacagcctatggacttagacattaaaaggggatctactgagaaccaaaatgagcatcgcgaacagttacgccggaagaacactttcatggctttggacgtgttgcatatgatggctgctgatagaaagattcaatcatttctgagcttgatattcctgaacatgttaggcctgaaaagttcagttctctacgccagaggttgagttctattgaagcacacaaggtgaccttggagactctactgccttctggacacaaaattaatgacttgttaataaacatctggagagtttgcaaagcaggctatcaaccaaataacaaacacattctgggtgttcttggtaatatgggatccggtggctcccttctgggccagcttactggagctgggaggcctgcctgctggataatatttgatatatatgtggagaatgcaattgatgggaagcatctaagtgttacatcagctatcgggattataaaagaaatgaccaagacaatgcaagtgcttaatgaagcaagctggcaggaaacatttaaagctctttggatttccacccttcgtcttgtacaacgggctagagaacctcttgaaggaccgattcctcatctagatgcaaggttatgcatgttgttagctcttataccattatcaattgccgcgattcttcaagaggaaagtgatatgtttggagttgaagggaacaaaattcttccacaaagacaagggcttatatcatctctccaggatctgatccagtattcaggacttcttgtaccaccttcatcagtggtgaatgcagctaatgctgcagcctcaaaagcagcaatatttaaggccaactataaggctggggctggcaacactagcatgatggaccagactgactcttcaatgaaagctgctgggaacatgctccatctcattatcgaagcctgtatctcgagaaagttgattgatacatctgcttacttatggcatggttatgttgtaccatctaggactttaaaagatacagctttgccccaagaatccccctggctgaactttatgaaagggtctcaactttcagaaccccttattgatgctctggtcgcaactcctgcttcaagtgttgcggaattggacaagttatacagtgtagcaacaaatggttcagaagaagaaaaaacagctgctgcaaagattctttgtggcgcatcacttgttcgtggctggaacattcaggaacatgtggtcagtatggtggtcaagctattatcagcttctttaccctcagattcctcaacttcaactcctgggagcatgagccactaccttgctcatatgtctacgttgaacgaaatcttactcggtgtgtcttatggtgatgtcatccacattctttcgttgtatggaatggttccagatgttgccgtggctttaatgccactatgtgaggcttttgggtcaatagcaccgccacctaatcacaagtctaccattcttggtgaaacatctgtttatttggtcttctcctgtgcatttctttgtcttcttcgcttgtggaagttttatagaccccctcaagagtattgtcttactggtcgtggaggctcagtaaagctggaactgactctggactatctgttgttgatgcacaataatcgcattttctcaaattcgtctgcccctaatagggattcttacaacagtatgggctcagtcaatgaggtctctgctcagccgatttatattgattctttccccaagctaagtgcttggtatttccagaatcaagcttgcatcgcctctacactttctggtctttgcaacaaaaaccctgtccatcaagttgcgaacaaaattttgaatatgatttgccgaaaaatgaataaaggtggagtatcatctagtaatctttcatctacttctagtagtagcgttagtggttcttctgtaagtgcatcggatgattcttaccaaaggcctgctgttcctgcttgggaatttttagaagctgttccttttgtacttgaagctgttctgacagcatgtgctcatgggcggctttccagccgagacttgactacaagcttaagggatcttgtggactttttgcctgcttctcttgctgcaattgtaagctacttctcagcagaaattacacggggaatctggaaacctgttccaatgaatggaactgaatggcccagtcctggtgcttctcttcattccattgaagctgaagtaaaggaaattcttgcatctgctggtgttcagattaacagctgctatccacgtggtgtgccgccaatgcttcctttgcctatggctgcacttgtcagcttgacaattacatttaagctagataggagtttggagtacattcaaggggtcattggacatgcactagagaactgcgcagggggaagttcctggccaagcatgcccattatcggggcattgtggacacagaaagtgcgaagatggcatgacttcattgtcctctcttgtatgcgttctccatttggcagagacaaagatgcagttgcgcagctcatccgaagctgcttttcgtcctttctgcagtcatcatccagtggttctgacataatcgcaaaccgtggagttggggctttattaggggactcaatcacggatcaaggtcttaggctcccaatggcacctggtttcgtctacctgagaacatgtcgaactttccatgacacatacttcgttagtgaagtgatcctcaagcaagtgattgaatgggctcacaaacttgcaaatggatggtctttcaatgggcctccgcagttgaaatcaggccggacaccactatcttgtgcagcatctatggcgcatcaggtcgcgatgcttggtggtggtctcctatgcatagcaggtggaccacttgtggtccaggtgttgtatgaagacacactaccgacactgctgctgtcagccagagaacagagtttgaaagaccctgggccagtttctagcacactccaaggttacgccatggccaacatgctcttttactgtggtagcctactttggggagcggacaggagttctcctgtcatgaaattgtctttcctctcgaggcggccacgggtggtgagaaaccacatggatttcatagctggtgtactggacggacacattcttctgggctgtgacccgggtacctggaaagcgtatgtttctcagtttatgttcctggtggtgaagtttgttccatcatggttgccggacataaagctggacacgctaaagaagatagcagctggacttcggagttggcatgaacatgaccttgctctatcccttcttgagcgaggaggaccacaagcaatctctgttgtagtcgagacctttctgtgatcctgccatttggacattttgccccccacctgacatcgcagccgctgttagggtttgaagtcggtggtctgaggtctagctgaagtaatcaggatgacccttccagaattccacttgagcaaccaggataactgatgtttttctcatgtatggcgaacccattttgtttttgtgaattcaatacggaagaacattcaacctactagagtctagagtgtattgacatcagccctaacatgtaacctatgggaatttcattaactttattgcactgacttcagccctaacttgtaacatacgggaatactctatcgtgttttatatcggcgttttagttgggataaccgaactttactctccatggttcgcatcactcttaggttgggcctcttttgcaacaatgtttttcaaagtcac

SEQ ID NO: 211858 - DNA, 4538 bp, Zea Mays
agctaaaatatggattgagataactgctcacaacggcagggtcaaccgggatccccttttcatttcacacgaacccaatgcgcgtcgcaggccagaccgccagagagagagggaaggtgaccgggatagagaaagaaaagtagaaacccaaacccccggcgaggacgccaccgtggcgacggcggatgcggcggggctggtccccgcggacctggagagtcgggtgatggaggcggtgaaggcgtcggaggcgcgccgcgacccgccgctgctgcgggcggtggagctgtcccgcgtcgtcgccgaagagggcgcgggcgccgagctggccgggatcctcgtctccaacctctgtttcgcgcacaactcgccctcgctctggaagctcctgggccaagccgtcgcgtcccgcctcctctgcccgctccacgtcctcgcgctcctcacccctagggtgttgccgcagcggcgagcgcagcctgaggcgtatcggctgtatctggagctcctcaagtgtcacgccacgtcgtcgttgctggcgatggaggctgggcctaaccgtgacaaggaagtccattgctgaagctttgcaactatccaaggtttatggattttctggaacagagtttggacatgttgtcattctgtttgtgttggctgttgtcaataaactgattgatagcatactcgaggattgtggctttccatctgtgatggcagaggggcaagagagtgtatatgccattgaggggccacagcctatggacttagacattaaaaggggatctactgagaaccaaaatgagcatcgcgaacagttacgccggaagaacactttcatggctttggacgtgttgcatatgatggctgctgatagaaagattcaatcatttctgagcttgatattcctgaacatgcctgaaaagttcagttctctacgccagaggttgagttctattgaagcacacaaggtgaccttggagactctactgccttctggacacaaaattaatgacttgttaataaacatctggagagtttgcaaagcaggctatcaaccaaataacaaacacattctgggtgttcttggtaatatgggatccggtggctcccttctgggccagcttactggagctgggaggcctgcctgctggataatatttgatatatatgtggagaatgcaattgatgggaagcatctaagtgttacatcagctatcgggattataaaagaaatgaccaagacaatgcaagtgcttaatgaagcaagctggcaggaaacatttaaagctctttggatttccacccttcgtcttgtacaacgggctagagaacctcttgaaggaccgattcctcatctagatgcaaggttatgcatgttgttagctcttataccattatcaattgccgcgattcttcaagaggaaagtgatatgtttggagttgaagggaacaaaattcttccacaaagacaagggcttatatcatctctccaggatctgatccagtattcaggacttcttgtaccaccttcatcagtggtgaatgcagctaatgctgcagcctcaaaagcagcaatatttaaggccaactataaggctggggctggcaacactagcatgatggaccagactgactcttcaatgaaagctgctgggaacatgctccatctcattatcgaagcctgtatctcgagaaagttgattgatacatctgcttacttatggcatggttatgttgtaccatctaggactttaaaagatacagctttgccccaagaatccccctggctgaactttatgaaagggtctcaactttcagaaccccttattgatgctctggtcgcaactcctgcttcaagtgttgcggaattggacaagttatacagtgtagcaacaaatggttcagaagaagaaaaaacagctgctgcaaagattctttgtggcgcatcacttgttcgtggctggaacattcaggaacatgtggtcagtatggtggtcaagctattatcagcttctttaccctcagattcctcaacttcaactcctgggagcatgagccactaccttgctcatatgtctacgttgaacgaaatcttactcggtgtgtcttatggtgatgtcatccacattctttcgttgtatggaatggttccagatgttgccgtggctttaatgccactatgtgaggcttttgggtcaatagcaccgccacctaatcacaagtctaccattcttggtgaaacatctgtttatttggtcttctcctgtgcatttctttgtcttcttcgcttgtggaagttttatagaccccctcaagagtattgtcttactggtcgtggaggctcagtaaagctggaactgactctggactatctgttgttgatgcacaataatcgcattttctcaaattcgtctgcccctaatagggattcttacaacagtatgggctcagtcaatgaggtctctgctcagccgatttatattgattctttccccaagctaagtgcttggtatttccagaatcaagcttgcatcgcctctacactttctggtctttgcaacaaaaaccctgtccatcaagttgcgaacaaaattttgaatatgatttgccgaaaaatgaataaaggtggagtatcatctagtaatctttcatctacttctagtagtagcgttagtggttcttctgtaagtgcatcggatgattcttaccaaaggcctgctgttcctgcttgggaatttttagaagctgttccttttgtacttgaagctgttctgacagcatgtgctcatgggcggctttccagccgagacttgactacaagcttaagggatcttgtggactttttgcctgcttctcttgctgcaattgtaagctacttctcagcagaaattacacggggaatctggaaacctgttccaatgaatggaactgaatggcccagtcctggtgcttctcttcattccattgaagctgaagtaaaggaaattcttgcatctgctggtgttcagattaacagctgctatccacgtggtgtgccgccaatgcttcctttgcctatggctgcacttgtcagcttgacaattacatttaagctagataggagtttggagtacattcaaggggtcattggacatgcactagagaactgcgcagggggaagttcctggccaagcatgcccattatcggggcattgtggacacagaaagtgcgaagatggcatgacttcattgtcctctcttgtatgcgttctccatttggcagagacaaagatgcagttgcgcagctcatccgaagctgcttttcgtcctttctgcagtcatcatccagtggttctgacataatcgcaaaccgtggagttggggctttattaggggactcaatcacggatcaaggtcttaggctcccaatggcacctggtttcgtctacctgagaacatgtcgaactttccatgacacatacttcgttagtgaagtgatcctcaagcaagtgattgaatgggctcacaaacttgcaaatggatggtctttcaatgggcctccgcagttgaaatcaggccggacaccactatcttgtgcagcatctatggcgcatcaggtcgcgatgcttggtggtggtctcctatgcatagcaggtggaccacttgtggtccaggtgttgtatgaagacacactaccgacactgctgctgtcagccagagaacagagtttgaaagaccctgggccagtttctagcacactccaaggttacgccatggccaacatgctcttttactgtggtagcctactttggggagcggacaggagttctcctgtcatgaaattgtctttcctctcgaggcggccacgggtggtgagaaaccacatggatttcatagctggtgtactggacggacacattcttctgggctgtgacccgggtacctggaaagcgtatgtttctcagtttatgttcctggtggtgaagtttgttccatcatggttgccggacataaagctggacacgctaaagaagatagcagctggacttcggagttggcatgaacatgaccttgctctatcccttcttgagcgaggaggaccacaagcaatctctgttgtagtcgagacctttctgtgatcctgccatttggacattttgccccccacctgacatcgcagccgctgttagggtttgaagtcggtggtctgaggtctagctgaagtaatcaggatgacccttccagaattccacttgagcaaccaggataactgatgtttttctcatgtatggcgaacccattttgtttttgtgaattcaatacggaagaacattcaacctactagagtctagagtgtattgacatcagccctaacatgtaacctatgggaatttcattaactttattgcactgacttcagccctaacttgtaacatacgggaatactctatcgtgttttatatcggcgttttagttgggataaccgaactttactctccatggttcgcatcactcttaggttgggcctcttttgcaacaatgtttttcaaagtcac

SEQ ID NO: 211859 - DNA, 3146 bp, Zea Mays
acggtttccctccacaaccacttgctcctcatctacttttctcctccgccttaaactcatccttgctcctgcctgccgtcgtgcatcatcatctccggccagggccagggcattcgtctccgcctccggtccggcctcctccactccgcgcccccccagacgcgtcgctgcgtagctgctggccgccatggccaccgtcatggccgcggccgcgtccgccgtcgaggcgcccgccacggccaaggccaagaaggagtccaagaagcaggaggagggcgtcgtcaccaacctatacaagcccaaggagccgtacgtcggcaggtgcctcctcaacaccaagatcaccggcgacgacgcgccgggggagacgtggcacatggtcttcagcaccgaaggcccttctttgcctgcgcgaggtctcagaatccggggggaaaaagaaaagaaaagaaaagatgatgactgtctctacctcttgctacatgtgccgcttcctcgtccgggctcctccgctcaagtccaggagtgcagtgcgctgtccaagcgccgccccaccaggtgctagcggtgccacctccacctccaaggtaaacccacacctactacctgtgtgcttcgtaaggcctatctacacctgcaggctgcagccaccagcacagggatatgtaccagcctgctcgtttcagctggaacagtattctccagttttggattggaacatgcagccacagccaaaagtagctgaagcgattggagttgtagcttttcggggataatcaaatgataggagagtggaggtggtggatcatgtgtaagctttagactactgactgattcacttgtctatccggcgctggttgctttccctgtgtgaagcttgtcctagaggtgaaagaacggctagcaagggagcacccaggcctccccacgggcaggtacgggagggacgatgacgacatggtcctctggttcctaaaggaccgcaagttctccgtcgatgaagccgtctccaagctcaccaaggcgattgtatcctctaattcactcgcttgtagcagtgaagctcacacctaatagcttctttactggctcactaaattcctgagttatcagaggaatcagtgaaaagcctgtaccaaactggcaaggcatatgtacatgattccttggacatttatggccgacctgtgctgattgtagtggcagccaaacattttccttcgacacaggatccagttgaaaaccagaagctatgtgcctatttggttgagaaggcagtcaacagacttccgccaggagcagagaatatacttgggatctttgatctgcgaggctttcgggttgaaaatggtgatctccagttcctaaagtttttgatggacgttttttactattactacccgaagcggcttggccaagttctttttgtcgatgctccatttgtttttcaaccaatgtggcaggttgttaaacctctattgaaatcatatgcctccctggtaagattttgtgatgccgagactgtgaggaaggaatacttcaaagaagaaacggtgcctcctgatttccgcgattaggtggtctcggaaacatgacctttaattgattcagaatcgattggcacccaggggggctggcgccttcctataccttttgattaacttctcaaaagttgctcagacggcagcaaacgattggagagtccagtaaaaaatgaccctgtacttgtataacttctgcgaagtagaatgctgagtttaggctggtgtctggagtgctcctgtaccatatttttctggttttggatgaagctatatggaccaaattcatctctgttgaacaattgccaattacataacttgtgtttgcccaattccatggtgtagtaccataacttctcagtgcagtgcagacaacacatggattccattttttgattaaagtatcatctgctacaaatatgaatcatggcttagtttgtagacttcataaagaaacacacagattaatcaaaccagtcttcgaagagtctctgtggataggaacgttccaaagcaaagtaagatgcaagttgtattgcataaaaaccaggtacacatcaatcagctgcattctggaagactaaactgcaacacaactacatctgcaatcacagagaaatcaggtcaacaacggagagggtcaagcgatccccacgtacagatgccagcatggtcttttacatggttccaagaggaggtaaatcgagtgtagccctaaaaagatctgccttgtgccacttcaacactttaacccagatgcaataaaaaaacactttaacccagatgctgcattgtggtgtggcaaaggcttgagaatatgacaataacagctgctcaaaaactgttggtaggaacatttatagcagcaaaagaacaaaatggaatgtgtggtttcttatctgccttagatgagataagatttcggacatgtgtattcatgttttcgagtgatttggcactatgaatgcgctagatggttggttgcttttttttgttaattgctcaggtgatatatgctgtatttctagtcactagtgttgtattgtttgtgcttgtgctaagatgatctcttttgcacttgtaacaggggctcattcaagtactctactgatcgaaaatggatggcgtctgtgatggttcattcttttgcacgtcttctacacgggtacattgacggttgatggagatggatggtggtgtagctgttttgtttagcaattagcactctaggtgttggaccactgttttgttaatggatgctatgtaacagtagtatgtaactaatgtgaacttgtttaggttgctgtgaaactgttatacaacacattgttatggggttgttacacagctgatatgttatgaacatgatatggagatatcttttcctttttggtttgggttttactgttgtgccattcgtctcataagttatgccattttattatttacttttggattgatatatattcgtctctgaagccttccttcactacaatatgtctctgtcatcaacgtatccactggctgagacacgaagccgtggatagcttcctttatggccgtgtccacgcttccgcatctcatattttttcttatcaaaagatg

SEQ ID NO: 211860 - DNA, 2810 bp, Zea Mays
acggtttccctccacaaccacttgctcctcatctacttttctcctccgccttaaactcatccttgctcctgcctgccgtcgtgcatcatcatctccggccagggccagggcattcgtctccgcctccggtccggcctcctccactccgcgcccccccagacgcgtcgctgcgtagctgctggccgccatggccaccgtcatggccgcggccgcgtccgccgtcgaggcgcccgccacggccaaggccaagaaggagtccaagaagcaggaggagggcgtcgtcaccaacctatacaagcccaaggagccgtacgtcggcaggtgcctcctcaacaccaagatcaccggcgacgacgcgccgggggagacgtggcacatggtcttcagcaccgaaggcccttctttgcctgcgcgaggtctcagaatccggggggaaaaagaaaagaaaagaaaagatgatgactgtctctacctcttgctacatgtgccgcttcctcgtccgggctcctccgctcaagtccaggagtgcagtgcgctgtccaagcgccgccccaccaggtgctagcggtgccacctccacctccaagcttgtcctagaggtgaaagaacggctagcaagggagcacccaggcctccccacgggcaggtacgggagggacgatgacgacatggtcctctggttcctaaaggaccgcaagttctccgtcgatgaagccgtctccaagctcaccaaggcgattaaatggcgtcaggactttggtgttgcagagttatcagaggaatcagtgaaaagcctgtaccaaactggcaaggcatatgtacatgattccttggacatttatggccgacctgtgctgattgtagtggcagccaaacattttccttcgacacaggatccagttgaaaaccagaagctatgtgcctatttggttgagaaggcagtcaacagacttccgccaggagcagagaatatacttgggatctttgatctgcgaggctttcgggttgaaaatggtgatctccagttcctaaagtttttgatggacgttttttactattactacccgaagcggcttggccaagttctttttgtcgatgctccatttgtttttcaaccaatgtggcaggttgttaaacctctattgaaatcatatgcctccctggtaagattttgtgatgccgagactgtgaggaaggaatacttcaaagaagaaacggtgcctcctgatttccgcgattaggtggtctcggaaacatgacctttaattgattcagaatcgattggcacccaggggggctggcgccttcctataccttttgattaacttctcaaaagttgctcagacggcagcaaacgattggagagtccagtaaaaaatgaccctgtacttgtataacttctgcgaagtagaatgctgagtttaggctggtgtctggagtgctcctgtaccatatttttctggttttggatgaagctatatggaccaaattcatctctgttgaacaattgccaattacataacttgtgtttgcccaattccatggtgtagtaccataacttctcagtgcagtgcagacaacacatggattccattttttgattaaagtatcatctgctacaaatatgaatcatggcttagtttgtagacttcataaagaaacacacagattaatcaaaccagtcttcgaagagtctctgtggataggaacgttccaaagcaaagtaagatgcaagttgtattgcataaaaaccaggtacacatcaatcagctgcattctggaagactaaactgcaacacaactacatctgcaatcacagagaaatcaggtcaacaacggagagggtcaagcgatccccacgtacagatgccagcatggtcttttacatggttccaagaggaggtaaatcgagtgtagccctaaaaagatctgccttgtgccacttcaacactttaacccagatgcaataaaaaaacactttaacccagatgctgcattgtggtgtggcaaaggcttgagaatatgacaataacagctgctcaaaaactgttggtaggaacatttatagcagcaaaagaacaaaatggaatgtgtggtttcttatctgccttagatgagataagatttcggacatgtgtattcatgttttcgagtgatttggcactatgaatgcgctagatggttggttgcttttttttgttaattgctcaggtgatatatgctgtatttctagtcactagtgttgtattgtttgtgcttgtgctaagatgatctcttttgcacttgtaacaggggctcattcaagtactctactgatcgaaaatggatggcgtctgtgatggttcattcttttgcacgtcttctacacgggtacattgacggttgatggagatggatggtggtgtagctgttttgtttagcaattagcactctaggtgttggaccactgttttgttaatggatgctatgtaacagtagtatgtaactaatgtgaacttgtttaggttgctgtgaaactgttatacaacacattgttatggggttgttacacagctgatatgttatgaacatgatatggagatatcttttcctttttggtttgggttttactgttgtgccattcgtctcataagttatgccattttattatttacttttggattgatatatattcgtctctgaagccttccttcactacaatatgtctctgtcatcaacgtatccactggctgagacacgaagccgtggatagcttcctttatggccgtgtccacgcttccgcatctcatattttttcttatcaaaagatg

SEQ ID NO: 211861 - DNA, 2554 bp, Zea Mays
acggtttccctccacaaccacttgctcctcatctacttttctcctccgccttaaactcatccttgctcctgcctgccgtcgtgcatcatcatctccggccagggccagggcattcgtctccgcctccggtccggcctcctccactccgcgcccccccagacgcgtcgctgcgtagctgctggccgccatggccaccgtcatggccgcggccgcgtccgccgtcgaggcgcccgccacggccaaggccaagaaggagtccaagaagcaggaggagggcgtcgtcaccaacctatacaagcccaaggagccgtacgtcggcaggtgcctcctcaacaccaagatcaccggcgacgacgcgccgggggagacgtggcacatggtcttcagcaccgaaggcccttctttgcctgcgcgaggtctcagaatccggggggaaaaagaaaagaaaagaaaagatgatgactgtctctacctcttgctacatgtgccgcttcctcgtccgggctcctccgctcaagtccaggagtgcagtgcgctgtccaagcgccgccccaccaggtgctagcggtgccacctccacctccaaggtaaacccacacctactacctgtgtgcttcgtaaggcctatctacacctgcaggctgcagccaccagcacagggatatgtaccagcctgctcgtttcagctggaacagtattctccagttttggattggaacatgcagccacagccaaaagtagctgaagcgattggagttgtagcttttcggggataatcaaatgataggagagtggaggtggtggatcatgtgtaagctttagactactgactgattcacttgtctatccggcgctggttgctttccctgtgtgaagcttgtcctagaggtgaaagaacggctagcaagggagcacccaggcctccccacgggcaggtacgggagggacgatgacgacatggtcctctggttcctaaaggaccgcaagttctccgtcgatgaagccgtctccaagctcaccaaggcgattgtatcctctaattcactcgcttgtagcagtgaagctcacacctaatagcttctttactggctcactaaattcctggtatggtaaccgagttcatatagcactgctatcttcagttttcctttcaactgcattagaaatggcgtcaggactttggtgttgcagagttatcagaggaatcagtgaaaagcctgtaccaaactggcaaggcatatgtacatgattccttggacatttatggccgacctgtgctgattgtagtggcagccaaacattttccttcgacacaggatccagttgaaaaccagaagctatgtgcctatttggttgagaaggcagtcaacagacttccgccaggagcagagaatatacttgggatctttgatctgcgaggctttcgggttgaaaatggtgatctccagttcctaaagtttttggttgttaaacctctattgaaatcatatgcctccctggtacacatcaatcagctgcattctggaagactaaactgcaacacaactacatctgcaatcacagagaaatcaggtcaacaacggagagggtcaagcgatccccacgtacagatgccagcatggtcttttacatggttccaagaggaggtaaatcgagtgtagccctaaaaagatctgccttgtgccacttcaacactttaacccagatgcaataaaaaaacactttaacccagatgctgcattgtggtgtggcaaaggcttgagaatatgacaataacagctgctcaaaaactgttggtaggaacatttatagcagcaaaagaacaaaatggaatgtgtggtttcttatctgccttagatgagataagatttcggacatgtgtattcatgttttcgagtgatttggcactatgaatgcgctagatggttggttgcttttttttgttaattgctcaggtgatatatgctgtatttctagtcactagtgttgtattgtttgtgcttgtgctaagatgatctcttttgcacttgtaacaggggctcattcaagtactctactgatcgaaaatggatggcgtctgtgatggttcattcttttgcacgtcttctacacgggtacattgacggttgatggagatggatggtggtgtagctgttttgtttagcaattagcactctaggtgttggaccactgttttgttaatggatgctatgtaacagtagtatgtaactaatgtgaacttgtttaggttgctgtgaaactgttatacaacacattgttatggggttgttacacagctgatatgttatgaacatgatatggagatatcttttcctttttggtttgggttttactgttgtgccattcgtctcataagttatgccattttattatttacttttggattgatatatattcgtctctgaagccttccttcactacaatatgtctctgtcatcaacgtatccactggctgagacacgaagccgtggatagcttcctttatggccgtgtccacgcttccgcatctcatattttttcttatcaaaagatg

SEQ ID NO: 211862 - DNA, 2572 bp, Zea Mays
acggtttccctccacaaccacttgctcctcatctacttttctcctccgccttaaactcatccttgctcctgcctgccgtcgtgcatcatcatctccggccagggccagggcattcgtctccgcctccggtccggcctcctccactccgcgcccccccagacgcgtcgctgcgtagctgctggccgccatggccaccgtcatggccgcggccgcgtccgccgtcgaggcgcccgccacggccaaggccaagaaggagtccaagaagcaggaggagggcgtcgtcaccaacctatacaagcccaaggagccgtacgtcggcaggtgcctcctcaacaccaagatcaccggcgacgacgcgccgggggagacgtggcacatggtcttcagcaccgaagagttatcagaggaatcagtgaaaagcctgtaccaaactggcaaggcatatgtacatgattccttggacatttatggccgacctgtgctgattgtagtggcagccaaacattttccttcgacacaggatccagttgaaaaccagaagctatgtgcctatttggttgagaaggcagtcaacagacttccgccaggagcagagaatatacttgggatctttgatctgcgaggctttcgggttgaaaatggtgatctccagttcctaaagtttttgatggacgttttttactattactacccgaagcggcttggccaagttctttttgtcgatgctccatttgtttttcaaccaatgtggcaggttgttaaacctctattgaaatcatatgcctccctggtaagattttgtgatgccgagactgtgaggaaggaatacttcaaagaagaaacggtgcctcctgatttccgcgattaggtgacatgattatttcttcagtaattgcaaggcagttctacctctgcctttgtgtaacgattgaaattctaaattgtgcagattatttttagttcttccaatccctcctaaaagctattttgcagaaatgtgcaggtggtctcggaaacatgacctttaattgattcagaatcgattggcacccaggggggctggcgccttcctataccttttgattaacttctcaaaagttgctcagacggcagcaaacgattggagagtccagtaaaaaatgaccctgtacttgtataacttctgcgaagtagaatgctgagtttaggctggtgtctggagtgctcctgtaccatatttttctggttttggatgaagctatatggaccaaattcatctctgttgaacaattgccaattacataacttgtgtttgcccaattccatggtgtagtaccataacttctcagtgcagtgcagacaacacatggattccattttttgattaaagtatcatctgctacaaatatgaatcatggcttagtttgtagacttcataaagaaacacacagattaatcaaaccagtcttcgaagagtctctgtggataggaacgttccaaagcaaagtaagatgcaagttgtattgcataaaaaccaggtacacatcaatcagctgcattctggaagactaaactgcaacacaactacatctgcaatcacagagaaatcaggtcaacaacggagagggtcaagcgatccccacgtacagatgccagcatggtcttttacatggttccaagaggaggtaaatcgagtgtagccctaaaaagatctgccttgtgccacttcaacactttaacccagatgcaataaaaaaacactttaacccagatgctgcattgtggtgtggcaaaggcttgagaatatgacaataacagctgctcaaaaactgttggtaggaacatttatagcagcaaaagaacaaaatggaatgtgtggtttcttatctgccttagatgagataagatttcggacatgtgtattcatgttttcgagtgatttggcactatgaatgcgctagatggttggttgcttttttttgttaattgctcaggtgatatatgctgtatttctagtcactagtgttgtattgtttgtgcttgtgctaagatgatctcttttgcacttgtaacaggggctcattcaagtactctactgatcgaaaatggatggcgtctgtgatggttcattcttttgcacgtcttctacacgggtacattgacggttgatggagatggatggtggtgtagctgttttgtttagcaattagcactctaggtgttggaccactgttttgttaatggatgctatgtaacagtagtatgtaactaatgtgaacttgtttaggttgctgtgaaactgttatacaacacattgttatggggttgttacacagctgatatgttatgaacatgatatggagatatcttttcctttttggtttgggttttactgttgtgccattcgtctcataagttatgccattttattatttacttttggattgatatatattcgtctctgaagccttccttcactacaatatgtctctgtcatcaacgtatccactggctgagacacgaagccgtggatagcttcctttatggccgtgtccacgcttccgcatctcatattttttcttatcaaaagatg

SEQ ID NO: 211863 - DNA, 2692 bp, Zea Mays
acggtttccctccacaaccacttgctcctcatctacttttctcctccgccttaaactcatccttgctcctgcctgccgtcgtgcatcatcatctccggccagggccagggcattcgtctccgcctccggtccggcctcctccactccgcgcccccccagacgcgtcgctgcgtagctgctggccgccatggccaccgtcatggccgcggccgcgtccgccgtcgaggcgcccgccacggccaaggccaagaaggagtccaagaagcaggaggagggcgtcgtcaccaacctatacaagcccaaggagccgtacgtcggcaggtgcctcctcaacaccaagatcaccggcgacgacgcgccgggggagacgtggcacatggtcttcagcaccgaaggcccttctttgcctgcgcgaggtctcagaatccggggggaaaaagaaaagaaaagaaaagatgatgactgtctctacctcttgctacatgtgccgcttcctcgtccgggctcctccgctcaagtccaggagtgcagtgcgctgtccaagcgccgccccaccaggtgctagcggtgccacctccacctccaaggtaaacccacacctactacctgtgtgcttcgtaaggcctatctacacctgcaggctgcagccaccagcacagggatatgtaccagcctgctcgtttcagctggaacagtattctccagttttggattggaacatgcagccacagccaaaagtagctgaagcgattggagttgtagcttttcggggataatcaaatgataggagagtggaggtggtggatcatgtgtaagctttagactactgactgattcacttgtctatccggcgctggttgctttccctgtgtgaagcttgtcctagaggtgaaagaacggctagcaagggagcacccaggcctccccacgggcaggtacgggagggacgatgacgacatggtcctctggttcctaaaggaccgcaagttctccgtcgatgaagccgtctccaagctcaccaaggcgattgtatcctctaattcactcgcttgtagcagtgaagctcacacctaatagcttctttactggctcactaaattcctggtatggtaaccgagttcatatagcactgctatcttcagttttcctttcaactgcattagaaatggcgtcaggactttggtgttgcagagttatcagaggaatcagtgaaaagcctgtaccaaactggcaaggcatatgtacatgattccttggacatttatggccgacctgtgctgattgtagtggcagccaaacattttccttcgacacaggatccagttgaaaaccagaagctatgtgcctatttggttgagaaggcagtcaacagacttccgccaggagcagagaatatacttgggatctttgatctgcgaggctttcgggttgaaaatggtgatctccagttcctaaagtttttggttgttaaacctctattgaaatcatatgcctccctggtaagattttgtgatgccgagactgtgaggaaggaatacttcaaagaagaaacggtgcctcctgatttccgcgattagaaatgtgcaggtggtctcggaaacatgacctttaattgattcagaatcgattggcacccaggggggctggcgccttcctataccttttgattaacttctcaaaagttgctcagacggcagcaaacgattggagagtccagtaaaaaatgaccctgtacttgtataacttctgcgaagtagaatgctgagtttaggctggtgtctggagtgctcctgtaccatatttttctggttttggatgaagctatatggaccaaattcatctctgttgaacaattgccaattacataacttgtgtttgcccaattccatggtgtagtaccataacttctcagtgcagtgcagacaacacatggattccattttttgattaaagtatcatctgctacaaatatgaatcatggcttagtttgtagacttcataaagaaacacacagattaatcaaaccagtcttcgaagagtctctgtggataggaacgttccaaagcaaagtaagatgcaagttgtattgcataaaaaccaggtacacatcaatcagctgcattctggaagactaaactgcaacacaactacatctgcaatcacagagaaatcaggggctcattcaagtactctactgatcgaaaatggatggcgtctgtgatggttcattcttttgcacgtcttctacacgggtacattgacggttgatggagatggatggtggtgtagctgttttgtttagcaattagcactctaggtgttggaccactgttttgttaatggatgctatgtaacagtagtatgtaactaatgtgaacttgtttaggttgctgtgaaactgttatacaacacattgttatggggttgttacacagctgatatgttatgaacatgatatggagatatcttttcctttttggtttgggttttactgttgtgccattcgtctcataagttatgccattttattatttacttttggattgatatatattcgtctctgaagccttccttcactacaatatgtctctgtcatcaacgtatccactggctgagacacgaagccgtggatagcttcctttatggccgtgtccacgcttccgcatctcatattttttcttatcaaaagatg

SEQ ID NO: 211864 - DNA, 2501 bp, Zea Mays
acggtttccctccacaaccacttgctcctcatctacttttctcctccgccttaaactcatccttgctcctgcctgccgtcgtgcatcatcatctccggccagggccagggcattcgtctccgcctccggtccggcctcctccactccgcgcccccccagacgcgtcgctgcgtagctgctggccgccatggccaccgtcatggccgcggccgcgtccgccgtcgaggcgcccgccacggccaaggccaagaaggagtccaagaagcaggaggagggcgtcgtcaccaacctatacaagcccaaggagccgtacgtcggcaggtgcctcctcaacaccaagatcaccggcgacgacgcgccgggggagacgtggcacatggtcttcagcaccgaaggcccttctttgcctgcgcgaggtctcagaatccggggggaaaaagaaaagaaaagaaaagatgatgactgtctctacctcttgctacatgtgccgcttcctcgtccgggctcctccgctcaagtccaggagtgcagtgcgctgtccaagcgccgccccaccaggtgctagcggtgccacctccacctccaagacacaggatccagttgaaaaccagaagctatgtgcctatttggttgagaaggcagtcaacagacttccgccaggagcagagaatatacttgggatctttgatctgcgaggctttcgggttgaaaatggtgatctccagttcctaaagtttttgatggacgttttttactattactacccgaagcggcttggccaagttctttttgtcgatgctccatttgtttttcaaccaatgtggcaggttgttaaacctctattgaaatcatatgcctccctggtaagattttgtgatgccgagactgtgaggaaggaatacttcaaagaagaaacggtgcctcctgatttccgcgattaggtgacatgattatttcttcagtaattgcaaggcagttctacctctgcctttgtgtaacgattgaaattctaaattgtgcagattatttttagttcttccaatccctcctaaaagctattttgcagaaatgtgcaggtggtctcggaaacatgacctttaatttattgagaatcgattggcacccagggggactggcgccttcccatacctttggattaacctctcaaaagttgctcagacggcagcaaatgattggagagtccagtaaaaaatgacccagtacttgtataactagtgcgaagtagaatgctgagtttaggctgctgtcttgagtgctcctataccatatttttctggttttggatgaagctatatggatcaaattcatctctgttgaacaattgccaattacataacttgtgtttgcccaattccatggtgtagtaccataacttctcagtgcagtgcagacaacacatggattccatttttttattaaagtaccatctgctacaaatatgaatcatggctttgtttgtagacttcataaagaaacacacagattaatcaaaccagtcttcgaagagtctgctatggataggaacgttccaaagcaaaataagatgcaagttgtattgcataaaaaccaggtacacatcaatcagctgcattctggaagactaaactgcaacacaactacatctgcaatcacagagaaatcaggtatacgaccaactgttatctgttgtaaatattttgtttttaggtcaacaacggagagggtcaagcgatccccacgtacagatgccagcatggtcttttacatggttccaagagttcgtaaattgagtgtagccttaaaaagatctgccttgtgccacttcaacactttaacccagatgtaataaaaaaacactttaacccagatgctgcattgtggcaaaggctcgagaatatgacaataacagttgttcaaaaactgttggtaggaacatttatagcagcaaaagaacaaaagggaatgcgtggtttcttatctgccttagatgagataagatttcggacatgtgtattcatgtttttgagtgatttggcactatgaatgcactagattgttggttgcttttttttgttaattgctcaggttgtatttctagtcactagtgttgtattgtttgtgcttgtgctaagatgatctcttttgcacttgtaataggtgctcattcaagtactctactgatcgaaaatggatggcgtctgtgatggttgattcttttgcacgtcttctacactggtacattgacggctgatggagatggatggtggtgtcgctgttttgtgttttgtttagcactctaggtgacacattgttatgggattgttacacagctgatatgttatgaacctgatatggagatctttttgcgtcctttgtttgggtgttactgttgtgccattcgtctcataagttatgccattttattacttgcttttggattgatatatattcgtctctgaagccttccttcaatacaaatacaagagttttttaaatttgtg

SEQ ID NO: 211865 - DNA, 1291 bp, Zea Mays
ctaccacaccacccccgaccctgatggacgttttttactattactacccgaagcggcttggccaagttctttttgtcgatgctccttttgtttttcaaccaatgtggcaggttgttaaacctctgttgaaatcatatgcctccctggtaagattttgtgatgccgagactgtgaggaaggaatacttcaaagaagaaatcgtgcctcctgatttccgcgattaggtgacatgattatttcttcagtaattgcaagtcagttttacctctgcctttgtgtaacgattgaaattctaaattgtgcagattacttttagtttttccaatctctcctaaaagctattttgcagaaatgtgcaggtggtctcggaaacatggcctttaatttattgagaatcgattggcacccagggggactggcgccttcccatacctttggattaacctctcaaaagttgctcagacggcagcaaatgattggagagtccagtaaaaaatgacccagtacttgtataactagtgcgaagtagaatgctgagtttaggctgctgtcttgagtgctcctataccatatttttctggttttggatgaagctatatggatcaaattcatctctgttgaacaattgccaattacataacttgtgtttgcccaattccatggtgtagtaccataacttctcagtgcagtgcagacaacacatggattccatttttttattaaagtaccatctgctacaaatatgaatcatggctttgtttgtagacttcataaagaaacacacagattaatcaaaccagtcttcgaagagtctgctatggataggaacgttccaaagcaaaataagatgcaagttgtattgcataaaaaccaggtacacatcaatcagctgcattctggaagactaaactgcaacacaactacatctgcaatcacagagaaatcaggtgctcattcaagtactctactgatcgaaaatggatggcgtctgtgatggttgattcttttgcacgtcttctacactggtacattgacggctgatggagatggatggtggtgtcgctgttttgtgttttgtttagcactctaggtgacacattgttatgggattgttacacagctgatatgttatgaacctgatatggagatctttttgcgtcctttgtttgggtgttactgttgtgccattcgtctcataagttatgccattttattacttgcttttggattgatatatattcgtctctgaagccttccttcaatacaaatacaagagttttttaaatttgtg

SEQ ID NO: 211866 - DNA, 2349 bp, Zea Mays
tctccctccacaaccacttgctcctcatctacttttctcctccgccttccactcatccttgctcctgcctgccgtcgtgcatcatcatctccggccagggccagggcattcgtctccgcctccggtccggcctcctccacaccgcgccccccccccccccccagacgcgtcgctgcgtagctgctggccgccatggccaccgtcatggccgcggccgtctagtccttcccgtcctcctcggccgtcgtcgccaaggcgtcgccggcgtccccctgtgccgccccgcacttccgcccgagggccgtgcgggccgctatccgggcgcaggcgtccgccgtcgaggcgcccgccacggccaaggccaagaaggagtccaagaagcaggaggagggcgtcgtcaccaacctatacaagcccaaggagccgtacgtcggcaggtgcctcctcaacaccaagatcaccggcgacgacgcgccgggggagacgtggcacatggtcttcagcaccgaaggcccttctttgcctgcgcgaggtctcagaatccggggggaaaagaaaagaaaagaaaagatgatgactgtctctacctcttgctacatgtgccgctccctcgtccgggctcctccgctcaagtccaggagtgcagtgcgctgtccaagcgccgccccgccaggtgctagcggtgccacctccacctccaagcttgtcctagaggtgaaagaacggctagcaagggagcacccaggcctccccacgggcaggaacgggagggacgatgacgacatggtcctctggttcctaaaggaccgcaagttctccgtcgatgaagccgtctccaagctcaccaaggcgattgtatcctctaattcactcgcttgtagcagtgaagctcacacctaatatatagcttctttactggctcactaaattcctgagttatcagaggaatcagtgaaaagcctgtaccaaactggcaaggcatatgtacatgattccttggacatttatggccgacctgtgctgattgtagtggcagccaaacattttccttcgacacaggatccagttggaaaccagaagttgtgtgcctatttggttgagaaggcagtcagcagacttccgccaggagtagagaatatacttgggatctttgatctgcgaggctttcgggttgaaaatggtgatctccagttcctaaagtttttgatggacgttttttactattactacccgaagcggcttggccaagttctttttgtcgatgctccttttgtttttcaaccaatgtggcaggttgttaaacctctgttgaaatcatatgcctccctggtaagattttgtgatgccgagactgtgaggaaggaatacttcaaagaagaaatcgtgcctcctgatttccgcgattagaaatgtgcaggtggtctcggaaacatggcctttaatttattgagaatcgattggcacccagggggactggcgccttcccatacctttggattaacctctcaaaagttgctcagacggcagcaaatgattggagagtccagtaaaaaatgacccagtacttgtataactagtgcgaagtagaatgctgagtttaggctgctgtcttgagtgctcctataccatatttttctggttttggatgaagctatatggatcaaattcatctctgttgaacaattgccaattacataacttgtgtttgcccaattccatggtgtagtaccataacttctcagtgcagtgcagacaacacatggattccatttttttattaaagtaccatctgctacaaatatgaatcatggctttgtttgtagacttcataaagaaacacacagattaatcaaaccagtcttcgaagagtctgctatggataggaacgttccaaagcaaaataagatgcaagttgtattgcataaaaaccaggtacacatcaatcagctgcattctggaagactaaactgcaacacaactacatctgcaatcacagagaaatcaggtgctcattcaagtactctactgatcgaaaatggatggcgtctgtgatggttgattcttttgcacgtcttctacactggtacattgacggctgatggagatggatggtggtgtcgctgttttgtgttttgtttagcactctaggtgacacattgttatgggattgttacacagctgatatgttatgaacctgatatggagatctttttgcgtcctttgtttgggtgttactgttgtgccattcgtctcataagttatgccattttattacttgcttttggattgatatatattcgtctctgaagccttccttcaatacaaatacaagagttttttaaatttgtg

SEQ ID NO: 211867 - DNA, 2323 bp, Zea Mays
tctccctccacaaccacttgctcctcatctacttttctcctccgccttccactcatccttgctcctgcctgccgtcgtgcatcatcatctccggccagggccagggcattcgtctccgcctccggtccggcctcctccacaccgcgccccccccccccccccagacgcgtcgctgcgtagctgctggccgccatggccaccgtcatggccgcggccgtctagtccttcccgtcctcctcggccgtcgtcgccaaggcgtcgccggcgtccccctgtgccgccccgcacttccgcccgagggccgtgcgggccgctatccgggcgcaggcgtccgccgtcgaggcgcccgccacggccaaggccaagaaggagtccaagaagcaggaggagggcgtcgtcaccaacctatacaagcccaaggagccgtacgtcggcaggtgcctcctcaacaccaagatcaccggcgacgacgcgccgggggagacgtggcacatggtcttcagcaccgaaggcccttctttgcctgcgcgaggtctcagaatccggggggaaaagaaaagaaaagaaaagatgatgactgtctctacctcttgctacatgtgccgctccctcgtccgggctcctccgctcaagtccaggagtgcagtgcgctgtccaagcgccgccccgccaggtgctagcggtgccacctccacctccaagcttgtcctagaggtgaaagaacggctagcaagggagcacccaggcctccccacgggcaggaacgggagggacgatgacgacatggtcctctggttcctaaaggaccgcaagttctccgtcgatgaagccgtctccaagctcaccaaggcgattaaatggcgtcaggactttggtgttgcagagttatcagaggaatcagtgaaaagcctgtaccaaactggcaaggcatatgtacatgattccttggacatttatggccgacctgtgctgattgtagtggcagccaaacattttccttcgacacaggatccagttggaaaccagaagttgtgtgcctatttggttgagaaggcagtcagcagacttccgccaggagtagagaatatacttgggatctttgatctgcgaggctttcgggttgaaaatggtgatctccagttcctaaagtttttgatggacgttttttactattactacccgaagcggcttggccaagttctttttgtcgatgctccttttgtttttcaaccaatgtggcaggttgttaaacctctgttgaaatcatatgcctccctgattttgtgatgccgagactgtgaggaaggaatacttcaaagaagaaatcgtgcctcctgatttccgcgattaggtgacatgattatttcttcagtaattgcaaaaatgtgcaggtggtctcggaaacatggcctttaatttattgagaatcgattggcacccagggggactggcgccttcccatacctttggattaacctctcaaaagttgctcagacggcagcaaatgattggagagtccagtaaaaaatgacccagtacttgtataactagtgcgaagtagaatgctgagtttaggctgctgtcttgagtgctcctataccatatttttctggttttggatgaagctatatggatcaaattcatctctgttgaacaattgccaattacataacttgtgtttgcccaattccatggtgtagtaccataacttctcagtgcagtgcagacaacacatggattccatttttttattaaagtaccatctgctacaaatatgaatcatggctttgtttgtagacttcataaagaaacacacagattaatcaaaccagtcttcgaagagtctgctatggataggaacgttccaaagcaaaataagatgcaagttgtattgcataaaaaccaggtacacatcaatcagctgcattctggaagactaaactgcaacacaactacatctgcaatcacagagaaatcaggtgctcattcaagtactctactgatcgaaaatggatggcgtctgtgatggttgattcttttgcacgtcttctacactggtacattgacggctgatggagatggatggtggtgtcgctgttttgtgttttgtttagcactctaggtgacacattgttatgggattgttacacagctgatatgttatgaacctgatatggagatctttttgcgtcctttgtttgggtgttactgttgtgccattcgtctcataagttatgccattttattacttgcttttggattgatatatattcgtctctgaagccttccttcaatacaaatacaagagttttttaaatttgtg

SEQ ID NO: 211868 - DNA, 1479 bp, Zea Mays
ctctaattcactcgcttgtagcagtgaagctcacacctaatatatagcttctttactggctcactaaattcctgagttatcagaggaatcagtgaaaagcctgtaccaaactggcaaggcatatgtacatgattccttggacatttatggccgacctgtgctgattgtagtggcagccaaacattttccttcgacacaggatccagttggaaaccagaagttgtgtgcctatttggttgagaaggcagtcagcagacttccgccaggagtagagaatatacttgggatctttgatctgcgaggctttcgggttgaaaatggtgatctccagttcctaaagtttttgatggacgttttttactattactacccgaagcggcttggccaagttctttttgtcgatgctccttttgtttttcaaccaatgtggcaggttgttaaacctctgttgaaatcatatgcctccctggtaagattttgtgatgccgagactgtgaggaaggaatacttcaaagaagaaatcgtgcctcctgatttccgcgattaggtggtctcggaaacatggcctttaatttattgagaatcgattggcacccagggggactggcgccttcccatacctttggattaacctctcaaaagttgctcagacggcagcaaatgattggagagtccagtaaaaaatgacccagtacttgtataactagtgcgaagtagaatgctgagtttaggctgctgtcttgagtgctcctataccatatttttctggttttggatgaagctatatggatcaaattcatctctgttgaacaattgccaattacataacttgtgtttgcccaattccatggtgtagtaccataacttctcagtgcagtgcagacaacacatggattccatttttttattaaagtaccatctgctacaaatatgaatcatggctttgtttgtagacttcataaagaaacacacagattaatcaaaccagtcttcgaagagtctgctatggataggaacgttccaaagcaaaataagatgcaagttgtattgcataaaaaccaggtacacatcaatcagctgcattctggaagactaaactgcaacacaactacatctgcaatcacagagaaatcaggtgctcattcaagtactctactgatcgaaaatggatggcgtctgtgatggttgattcttttgcacgtcttctacactggtacattgacggctgatggagatggatggtggtgtcgctgttttgtgttttgtttagcactctaggtgacacattgttatgggattgttacacagctgatatgttatgaacctgatatggagatctttttgcgtcctttgtttgggtgttactgttgtgccattcgtctcataagttatgccattttattacttgcttttggattgatatatattcgtctctgaagccttccttcaatacaaatacaagagttttttaaatttgtg

SEQ ID NO: 211869 - DNA, 1517 bp, Zea Mays
ctaattcactcgcttgtagcagtgaagctcacacctaatatatagcttctttactggctcactaaattcctgagttatcagaggaatcagtgaaaagcctgtaccaaactggcaaggcatatgtacatgattccttggacatttatggccgacctgtgctgattgtagtggcagccaaacattttccttcgacacaggatccagttggaaaccagaagttgtgtgcctatttggttgagaaggcagtcagcagacttccgccaggagtagagaatatacttgggatctttgatctgcgaggctttcgggttgaaaatggtgatctccagttcctaaagtttttgatggacgttttttactattactacccgaagcggcttggccaagttctttttgtcgatgctccttttgtttttcaaccaatgtggcaggttgttaaacctctgttgaaatcatatgcctccctggtaagattttgtgatgccgagactgtgaggaaggaatacttcaaagaagaaatcgtgcctcctgatttccgcgattaggtgacatgattatttcttcagtaattgcaaaaatgtgcaggtggtctcggaaacatggcctttaatttattgagaatcgattggcacccagggggactggcgccttcccatacctttggattaacctctcaaaagttgctcagacggcagcaaatgattggagagtccagtaaaaaatgacccagtacttgtataactagtgcgaagtagaatgctgagtttaggctgctgtcttgagtgctcctataccatatttttctggttttggatgaagctatatggatcaaattcatctctgttgaacaattgccaattacataacttgtgtttgcccaattccatggtgtagtaccataacttctcagtgcagtgcagacaacacatggattccatttttttattaaagtaccatctgctacaaatatgaatcatggctttgtttgtagacttcataaagaaacacacagattaatcaaaccagtcttcgaagagtctgctatggataggaacgttccaaagcaaaataagatgcaagttgtattgcataaaaaccaggtacacatcaatcagctgcattctggaagactaaactgcaacacaactacatctgcaatcacagagaaatcaggtgctcattcaagtactctactgatcgaaaatggatggcgtctgtgatggttgattcttttgcacgtcttctacactggtacattgacggctgatggagatggatggtggtgtcgctgttttgtgttttgtttagcactctaggtgacacattgttatgggattgttacacagctgatatgttatgaacctgatatggagatctttttgcgtcctttgtttgggtgttactgttgtgccattcgtctcataagttatgccattttattacttgcttttggattgatatatattcgtctctgaagccttccttcaatacaaatacaagagttttttaaatttgtg

SEQ ID NO: 211870 - DNA, 1090 bp, Zea Mays
agttctgctgctgtgtcccactctacaatttcagctccatatatacttacctgatggcttcacctaaaagttttgtagacagctttgttgataagacggagaagcgttataatcaaaacatgtctcctgccattccaaaggataaatggaggaaaggatctcagtgggtagtattaatcagaaaacatgctgaagttgttgttggtgacaaaaacgtattaaaagtattcagaagacattgcaagatggtagtaaccaagagcttgtttagacgaaggccaaatgctagacaactggggttcacctttcggagaaagcagatactgaaaggagtagctcaacaggagcatgattgtattccggatgaacattatgtgcagacattattttctatcaaaggacttgaagatgaactggagagaagaactttgacctatacctcgtggaaccaatcatcaaatccgaaagacaaaatgacttggcatcctatgaaatttgagtatgatacatctagccctgagcatatcaatgctatcaagagaattgatcatgtcaactatcaaatggagcacaggacagagtggtgccaatgcaatgcggtagctacagagacatggagtatcagagtattgacagcgaccagaatgcgcttagacagctaaggacttgaagagagttgatgcacaaactacagagcctcggttttgaagtttgtcagctctatcagtatgcgatttccaggggacagatggtagtgaaggacagagtacacacaacccttaccctaacaggacaggaaagttataacaatagcttgattttccttataaatattcttccccttgtatgattaaagaatagatagttttttttacttgcatacaggttatcagacatagcgaatagggaaacatgcaagaagatacatgtgtccataggacctactgtttagaacattggtcacattggcaagaagataagctgccttttcatgatctgcagctacaacatagcaatctgggctccaccaattttgaatcgacgtctatataaactgccttttcatgacctccagctaaaacaaaatgac

SEQ ID NO: 211871 - DNA, 1844 bp, Zea Mays
caacaaccacgggcgggcgggcacggcacattcgtctctcgatctccccgttggtccgttcccggctcggcgctcggcggctcccgtccggcgtccgcctccactcgcgcgcacacaactcaacccgtcaccgtctctcccacgcgccgcggccgcgccagtcgcaagcgcccgacccgaaacgccacgcaaacccccgcctcggccgccatctcctctttaacccagacgcggcgggctcggccgcggcgtgggctggtcctcagtcctcttccgttcttcctcctcgctcccgccccctcgcgcccctcgcctttcagttttggatgccacggaggcctgccagtggtgggccaccgccgtacgcgcgcgacgatgccggtgaagcgttcggcgtccgcgctggcgctcccgccggtcggccgccgcgcgcgggcccgcctctgcatccgcctcgccgcgccgctctccttcctgctcctcttcgtggcgctgttccacgcccagccgctcctgggcgttccgcccgctgcgcagccgccctccgcggggcccggtaaggtcgccttccttttcctcgtccgcgcgggggtgccgctcgacttcctctgggacgccttcttccgcaacggcgaggaggggaagttctcggtgtacgtgcactccgcgccggggttccagctcgaccgcaccaccacgggatccccatacttctatgggcggcaacttgcgaggagcgtcaaggtggtgtggggcgaggccaccatggtggaggcagagaggatgttgtttgccgccgcgcttcaggatcccgcgaaccagcgctttgttttgctctctgatagctgtgtcccactctacaatttcagctccatatatacttacctgatggcttcacctaaaagttttgtagacagctttgttgataagacggagaagcgttataatcaaaacatgtctcctgccattccaaaggataaatggaggaaaggatctcagatggtagtaaccaagagcttgtttagacgaaggccaaatgctagacaactggggttcacctttcggagaaagcagatactgaaaggagtagctcaacaggagcatgattgtattccggatgaacattatgtgcagacattattttctatcaaaggacttgaagatgaactggagagaagaactttgacctatacctcgtggaaccaatcatcaaatccgaaagacaaaatgacttggcatcctatgaaatttgagtatgatacatctagccctgagcatatcaatgctatcaagagaattgatcatgtcaactatcaaatggagcacaggacagagtggtgccaatgcaatgcggtagctacagagacatggagtatcagagtattgacagcgaccagaatgcgcttagacagctaaggacttgaagagagttgatgcacaaactacagagcctcggttttgaagtttgtcagctctatcagtatgcgatttccaggggacagatggtagtgaaggacagagtacacacaacccttaccctaacaggacaggaaagttataacaatagcttgattttccttataaatattcttccccttgtatgattaaagaatagatagttttttttacttgcatacaggttatcagacatagcgaatagggaaacatgcaagaagatacatgtgtccataggacctactgtttagaacattggtcacattggcaagaagataagctgccttttcatgatctgcagctacaacatagcaatctgggctccaccaattttgaatcgacgtctatataaactgccttttcatgacctccagctaaaacaaaatgac

SEQ ID NO: 211872 - DNA, 1302 bp, Zea Mays
tcttgatggatttaacagtaagctttaaaagatgtttggtaatggtaattgacctagtcatatgcaattggacgtcctcctgttctgctgctgtgtcccactctacaatttcagctccatatatacttacctgatggcttcacctaaaagttttgtagacagctttgttgataagacggagaagcgttataatcaaaacatgtctcctgccattccaaaggataaatggaggaaaggatctcagatggtagtaaccaagagcttgtttagacgaaggccaaatgctagacaactggggttcacctttcggagaaagcagatactgaaaggagtagctcaacaggagcatgattgtattccggatgaacattatgtgcagacattattttctatcaaaggacttgaagatgaactggagagaagaactttgacctatacctcgtggaaccaatcatcaaatccgaaagacaaaatgacttggcatcctatgaaatttgagtatgatacatctagccctgagcatatcaatgctatcaagagaattgatcatgtcaactatcaaatggagcacaggacagagtggtgccaatgcaatggtacctcggccccatgttttttatttgccaggaagttctcctatagtgcggccatgcatcttttggaacaaggagccattggcacaccgaaatctgctcagctgatgattaacttttaacaaaattgtttacacaagtctgcgctcacttttttgatgggtcattataccgttcacaatttcaccagcctcaatgggagctgtacattagcagcggtagctacagagacatggagtatcagagtattgacagcgaccagaatgcgcttagacagctaaggacttgaagagagttgatgcacaaactacagagcctcggttttgaagtttgtcagctctatcagtatgcgatttccaggggacagatggtagtgaaggacagagtacacacaacccttaccctaacaggacaggaaagttataacaatagcttgattttccttataaatattcttccccttgtatgattaaagaatagatagttttttttacttgcatacaggttatcagacatagcgaatagggaaacatgcaagaagatacatgtgtccataggacctactgtttagaacattggtcacattggcaagaagataagctgccttttcatgatctgcagctacaacatagcaatctgggctccaccaattttgaatcgacgtctatataaactgccttttcatgacctccagctaaaacaaaatgac

SEQ ID NO: 211873 - DNA, 1742 bp, Zea Mays
aacaatttgttgcggagagcccagtgctgtgctgtgcacgccaaccacaactgaaagggagagccgaagagggaagggggagaagcgaccgcgccgccaaaccctagccccgcgcaagcgaccgtgggggagctccactccgccgcgccgccccccgtccccgtttcgcgacatggccgattccccgcgcaggaggtactcaaggtccccttcatacagcagggggcacccaaaagggaggtcaagatcacaatctccagctcggtctcagtctaggtcacctgtccctgatcctagatctcaggcgaggtcaagatctagaagccaagagagggaggaggatgctgttaaccgtgggaatactctgtatgtgactgggctctcttcgagggttactgaaagggatgttaaggattatttttctaagcatggaagggtggttggttgccatgttgttcttgaaccccatacacgtgtttcccgtggatttgcctttgtcagcatggacactgttgaagaagcggagcgttgcataaagtatcttaatggttctgtaatggaaggtcgaaacatcacagttgaaaagaagatattgtgcaagctatgtccagcagtcaagatgctgagttcaccaattccagctttagctcatacggctcgatcagtggacagcccaaagggttaccatgcaccacaagattcacaacaacttaacatagcaaattttcaactaaacctgagcattcaccttcaacttccacatcaactaatcaacgagcattgccgacttgttagtcaagcatgtgtggtgccatgtgcggtagcaactttggatgcctgctagttgaagtttgggctcttcgttacttatttccttcattggtgtccgttattgcagggcgtgtattcattgattgtaagaggaactttcacgccgtggtcgcccaaggacaccaactcctggaagctatcttggccatcggtacgagcgtagggagcgtgggaggttccatagaggctatggtggtgggcgtgatgagtattacggcaatggcggcggcgggtatggctaccgcaggtctccgcctcccatgtactcttcctacagggagagtcgggattattatccctcctacaaggacagccgggactaccctccctacagggacggcagggactactctcctccccacagggaccctcgggactactacgaaagcaggggtggccggggctactcgccgcctccttatggtggtggtaggtcaaggagggaccgatcggtttcaccgtatcggatgccagaaaggggctacggtggaggccgccgggtgggtggcggcggatatgacaggtaatgtagaggttttctctccgccggtggctgctgctgcgatggctgcgtatggctctcgcagctctggtgatatggttagactgctgcctgtagctgtgtacttggtgtactgtcttcccgcgtatgtggatttggtgaaaacttctgtatgagcaccttttatttgtagcctgcaatgattccttcttaagacagactggggactttggctccattgtgtgggatcatcatggccgtacagtgtctacgctgctatcatttgaggctgccataattcgaatccttgaaaggcgagaaggcccggcccgggaatattcacaacaatgaattcaccttgacaggttggtagcaagtactactcctatataaaaaggaaaaaagaaaa

SEQ ID NO: 211874 - DNA, 1199 bp, Zea Mays
gccagaatttatcacagagcgctctatttttccctccgaggaattagcagactttctggatgcgaatcatcagcggcgagcgacaagaggcatcccgacctcggcgtcgggctaagcctgctgttcctgctggccaagacgtccgacgagttcaacaagatggccaaggtgcgcgcggagatggaggcgctcctgagagagttaaaagacggggttaggaccaagagcggcggcaccgagggccacggcgcgccgaaagaccgcaaccgcgagtccaccacgtcgagctgcgtcaccgacggcaacgaccagaccgcaagcgctcgcctggagtaccagctcgcctcgtcttgcgtggagccggcgggctacgagaggtcgtccgaggatgacggaggctgctgtgcgaggatggagttggacgtgcttgaggaggagttccacgccgagctggagctgcttcagggtaactatgagtcagggacaccatcgtttctgcctgaagaagaagaagaggaacactattccgagccctacgacgagatggccgactaccgggatggagttgatgaagattcaaggggaggtgttgaggatgaagacgacgacgacgaccatgacgctgagtacaacggagtttctgccgtacagttggagagaaggctccacgagcttctccacgaaagaaaccgggaccggattgaggagctggaagccgcgttgaggcgtgcggagaagaagcttgttgagaaagaaatggaggtgtccctgtggaaggacacggctaagtttgcgttgagacaggacaaggagttgcaatgagcatcgaatttctcctgttctctttcaatcgtacaactcttgcgcacgatttcatcggctgtccatgatcaccgaccgccgaaggaggattttggtcaaacaaggtttgccatggcgaactgcggtttgtggaagatatagtcaacctgttcataccaaagtttagtgctagcatattagatctccagtgaacgttttgggctccggtaaaaatcagtagaatgctgtgtaacagtgtaagttagcctactggtgtacggatcaatatgagatttgatacttcatgtttctgtatgcgcattacatggatggattatgtgtgaaatcagacttctcatgtgcgtcttttccctttaaaatttgtccacaagtgtgaa

SEQ ID NO: 211875 - DNA, 2830 bp, Zea Mays
ggctgccgttacctttgttggcgttggaagttggacacagcccgcggtaccgcaccaccggcccggttcgcggtgcaataaattcgacgcgccgctgcctgtgcggctgtgcctgccgcgccgctcgtctcgacagacacacgcccacggagactcggagagggaggagggagggaggaggggagaggccgagagcacagggaacagacagacatggtcacgggatccatgaagcacctcgtgcaggtggagccggcaagggaggcggcggcggagggcggggcgccatcggcggggcccacgtaccgatgcgcggccggtggcaacgccgcgtcgccgcccgccgtgccggggctcgagtgctgctgggacatattccgcttgtccgtggagaagtgccccgacaacaagatgctgggccgccgcgaaatcgtccacggaaaggctggcagctacacatggctgacttacaagcaggtatacgacaccgtgctcgatgttgggtctgccatccggagctgtggcgtcggcaagggcggccggtgtggcatctatggagccaattctcctgagtgggtcatcagtatgcaggcctgcaatgcccatggcatctactgtgtgccactatatgacacgcttggtgccggggcagtagaattcgtattgtgccatgcagaggtacaaattgcttttgttgaggaaaagaagatcggagagatgctcaagacatttcccaatgcgaccaaatatctgaaaacacttgtaagcttcggtaaggttgatcctgggcacaaggaaaaagttgaacagaatggcttgtccatctactcatgggaagagtttctgcaactgggaggtaaagagaagtttgaacttccacccaaggaaaaggatgacatatgtacaataatgtacaccagtggaacaactggtgatcctaagggagtactaatctcgaacaagagcattgttaccattgtttcagcagtagatgagttcctcaacaactcaaacgagcagcttaacatggatgacgtttacatttcctatcttccgcttgctcatatatttgaccgggtgattgaagaggtgttcattcgtcatggtgcttcaattggattttggcgtggggatgtcaaactcttggttgaagacattggagaactcaaaccaacagttttttgtgctgttccacgtgttctagacagaatttatggaggattgcaagataaaattacagctggtggtttcctaaagaaaaccttgttcaatgttgcttacaaatacaaacaaggcaatatgttgaagggaaacaagcatgaagaggctgctgccatgtttgatcgcctggtcttcaccaaggtgaaacggggactaggtggaagggttcgcctgattctatctggcgcagctcccctatctagacatgttgaggagtatctgcgtgtggtaacatgctcccatgtccttcaaggatacgggctaacggaaacctgtgctgggtcctttgtttccctgccgaacaacatgtccatgctgggaactgtcggccctccagtcccgtatgtcgaagtacgcctggagtctgtccctgagatgggttatgatgcactgtcgagcgagacgcctcgtggggaaatttgcatcagaggggacaccttgttctcgggatactacaagcgagaggacctaaccaaagaagtcttggtcgatggctggttccacacaggtaccatcggtccctgttccagtattcctccagtgtctgatcggacgtgtccatgtcagcatcactgtgagtcaagaaaatgtcaagggaaagaaaatgtgaagggaactggtgctttcgtagccgtgctttgtcaacaatttgcattaactcccggaagatcattgataactgtcttgaaagagatcctgatttaacttgccatcagaaatgcctttgaaattttcccaagtctaacgtttgttcactgccaaatattaatatttactgcaggagacattggtgagtggcagtctgacggaagcatgaagatcattgaccgcaagaagaacatcttcaagctctcacagggagagtacgttgcggttgagaatctggagaacatctttggtcaaactcctgctgttgattcgatttgggtctacggcaacagcttcgagtcgagcctggtagcagttgtgaaccccaacacacaagcactggagcgctgggcagagtcgaacggggtaactggagaatttgccacgatatgcgaagaccctagagcgagagagttcatcttgggagagcttacaaagatgggtaaagaaaagaagctcaaaggctttgagctcatcagggctgttcatctggaccccgcaccgttcgacatggagcgcgaccttatcaccccgacgtacaagaagaagcggccacagctgctgaaacactatcagaccatcattgacggtatgtacaatagcatgaagtaggctctgcacggctccacctgttgcctcacggcatggagaatcaaaatgctttgctagccgtcacctcggcaagcagactccaatgtgaattgagattatttcattagattgtgtcattaaaaagttatgctacatgatgttagctaggttttttttatccctcctggctcctgaaattggcgtacaagctgcgtgaatgcacccgtgtcagtgttgccatctaaataccttagataagcgtatgccctgtgcctcgatttttttaattttaccttttaaaaaaacatatttacatcccctagtgatcaaaacttgacttcagactccaggggcgccgagataatatggc

SEQ ID NO: 211876 - DNA, 2431 bp, Zea Mays
gcgccgctcgtctcgacagacacacgcccacggagactcggagagggaggagggagggaggaggggagaggccgagagcacagggaacagacagacatggtcacgggatccatgaagcacctcgtgcaggtggagccggcaagggaggcggcggcggagggcggggcgccatcggcggggcccacgtaccgatgcgcggccggtggcaacgccgcgtcgccgcccgccgtgccggggctcgagtgctgctgggacatattccgcttgtccgtggagaagtgccccgacaacaagatgctgggccgccgcgaaatcgtccacggaaaggctggcagctacacatggctgacttacaagcaggtatacgacaccgtgctcgatgttgggtctgccatccggagctgtggcgtcggcaagggcggccggtgtggcatctatggagccaattctcctgagtgggtcatcagtatgcaggcctgcaatgcccatggcatctactgtgtgccactatatgacacgcttggtgccggggcagtagaattcgtattgtgccatgcagaggtacaaattgcttttgttgaggaaaagaagatcggagagatgctcaagacatttcccaatgcgaccaaatatctgaaaagcttcggtaaggttgatcctgggcacaaggaaaaagttgaacagaatggcttgtccatctactcatgggaagagtttctgcaactgggaggtaaagagaagtttgaacttccacccaaggaaaaggatgacatatgtacaataatgtacaccagtggaacaactggtgatcctaagggagtactaatctcgaacaagagcattgttaccattgtttcagcagtagatgagttcctcaacaactcaaacgagcagcttaacatggatgacgtttacatttcctatcttccgcttgctcatatatttgaccgggtgattgaagaggtgttcattcgtcatggtgcttcaattggattttggcgtggggatgtcaaactcttggttgaagacattggagaactcaaaccaacagttttttgtgctgttccacgtgttctagacagaatttatggaggattgcaagataaaattacagctggtggtttcctaaagaaaaccttgttcaatgttgcttacaaatacaaacaaggcaatatgttgaagggaaacaagcatgaagaggctgctgccatgtttgatcgcctggtcttcaccaaggtgaaacggggactaggtggaagggttcgcctgattctatctggcgcagctcccctatctagacatgttgaggagtatctgcgtgtggtaacatgctcccatgtccttcaaggatacgggctaacggaaacctgtgctgggtcctttgtttccctgccgaacaacatgtccatgctgggaactgtcggccctccagtcccgtatgtcgaagtacgcctggagtctgtccctgagatgggttatgatgcactgtcgagcgagacgcctcgtggggaaatttgcatcagaggggacaccttgttctcgggatactacaagcgagaggacctaaccaaagaagtcttggtcgatggctggttccacacaggagacattggtgagtggcagtctgacggaagcatgaagatcattgaccgcaagaagaacatcttcaagctctcacagggagagtacgttgcggttgagaatctggagaacatctttggtcaaactcctgctgttgattcgatttgggtctacggcaacagcttcgagtcgagcctggtagcagttgtgaaccccaacacacaagcactggagcgctgggcagagtcgaacggggtaactggagaatttgccacgatatgcgaagaccctagagcgagagagttcatcttgggagagcttacaaagatgggtaaagaaaagaagctcaaaggctttgagctcatcagggctgttcatctggaccccgcaccgttcgacatggagcgcgaccttatcaccccgacgtacaagaagaagcggccacagctgctgaaacactatcagaccatcattgacggtatgtacaatagcatgaagtaggctctgcacggctccacctgttgcctcacggcatggagaatcaaaatgctttgctagccgtcacctcggcaagcagactccaatgtgaattgagattatttcattagattgtgtcattaaaaagttatgctacatgatgttagctaggttttttttatccctcctggctcctgaaattggcgtacaagctgcgtgaatgcacccgtgtcagtgttgccatctaaataccttagataagcgtatgccctgtgcctcgatttttttaattttaccttttaaaaaaacatatttacatcccctagtgatcaaaacttgacttcagactccaggggcgccgagataatatggc

SEQ ID NO: 211877 - DNA, 1383 bp, Zea Mays
cacattccaattccgccaccgccacttctttcttccccgcggacgcgtcgaaaagcgagcctctggggagactcgaggccactctgccttcccctcctatcctcgttccattccattccatctccctcctcgcctacggcttcttccaccgcggcatcgtgcccggcctctgcttcggcgcgggcctggggattacgctgttcggcatggcctacatgttcgtccacgacggcctggtccaccgccgctttccggtcggccccatcgccgacgtgccctacttccgccgagtggctgcctcgcacaagatacaccacatggacaagttcggcggcgtcccgtatgggctcttcctgggaccaaaggagctggaggaggttggtggcctggacgagcttgttagcagtccggtgagtgaagctactgatactgaagacgcaggagaagaaaagacgcgtccagttgtatgcgttgtccgaacaagcgtgttcatgggccagagtgtgccaaatgagttctagctttaggcgagtgggccaaatgagtgtgggctgcgtcccagggtagtataagtactatgagtctgtaataatcaggacaagaagaatttagcttgggtgtggtggattaaatcactggccgtgaatggacccatcctgcaatattcaagtcgtgcttaagaaaaggatgtcatgcttctggttgatcttgaaaagaatatcattgcaggagcagacttgagtgatttagccgtggagcattctttttgtccatctaaagaaaatggtggtcaagacggtcatcttctcagattgggagacatagcttctaaaggtacccaaccaacaactcaaggctgctgagtttctcctgtaaggccagcatcagtactgcccttgtctctcactcacccaaactatggggtaatcagtgctaatccctgaaagctgaagtagagtcatcaatcattgtctacactatcagcggcttgggggcaagccgcatttcaagcggtggggaatgttagcagtccggtgagtgaagctactgatactgaagacgcaggagaagaaaagacgcgtccagttgtatgcgttgtccgaacaagcgtgttcatgggccagagtgtgccaaatgagttctagctttaggcgagtgggccaaatgagtgtgggctgcgtcccagggtagtataagtactatgagtctgtaataatcaggacaagaagaatttaggtaaagtaatacatctatcgccatcttcctttcattctctcctacacgctactctcttctctgatcttctctccctcgaatcccagtagcatccagtagctaacagagctggaaaaggagctcgcgcgaaccagaagggccatctga

SEQ ID NO: 211878 - DNA, 932 bp, Zea Mays
cacattccaattccgccaccgccacttctttcttccccgcggacgcgtcgaaaagcgagcctctggggagactcgaggccactctgccttcccctcctatcctgtgagctgtaacgcttggaggtatgtgaactatccatataagttcctgtgagctgtctcccgctcactcggtccctgtccatccgtagcgttccattccattccatctccctcctcgcctacggcttcttccaccgcggcatcgtgcccggcctctgcttcggcgcgggcctggggattacgctgttcggcatggcctacatgttcgtccacgacggcctggtccaccgccgctttccggtcggccccatcgccgacgtgccctacttccgccgagtggctgcctcgcacaagatacaccacatggacaagttcggcggcgtcccgtatgggctcttcctgggaccaaaggagctggaggaggttggtggcctggacgagcttgttagcagtccggtgagtgaagctactgatactgaagacgcaggagaagaaaagacgcgtccagttgtatgcgttgtccgaacaagcgtgttcatgggccagagtgtgccaaatgagttctagctttaggcgagtgggccaaatgagtgtgggctgcgtcccagggtagtataagtactatgagtctgtaataatcaggacaagaagaatttaggcgagtgggccaaatgagtgtgggctgcgtcccagggtagtataagtactatgagtctgtaataatcaggacaagaagaatttaggtaaagtaatacatctatcgccatcttcctttcattctctcctacacgctactctcttctctgatcttctctccctcgaatcccagtagcatccagtagctaacagagctggaaaaggagctcgcgcgaaccagaagggccatctga

SEQ ID NO: 211879 - DNA, 580 bp, Zea Mays
caggagctgagccctgagtgacaaaccgttgtgacactgacttgtgagcaaggggaagcacattccaattccgccaccgccacttctttcttccccgcggacgcgtcgaaaagcgagcctctggggagactcgaggccactctgccttcccctcctatcctgtgagctgtaacgcttggaggtatgtgaactatccatataagttcctgtgagctgtctcccgctcactcggtccctgtccatccgtagcgttccattccattccatctccctcctcgcctacggcttcttccaccgcggcatcgtgcccggcctctgcttcggcgcgggcctggggattacgctgttcggcatggcctacatgttcgtccacgacggcctggtccaccgccgctttccggtcggccccatcgccgacgtgccctacttccgccgagtggctgcctcgcacaagatacaccacatggacaagttcggcggcgtcccgtatgggctcttcctgggaccaaaggagctggaggaggttggtggcctggacgagcttgaaaaggagctcgcgcgaaccagaagggccatctga

SEQ ID NO: 211880 - DNA, 1127 bp, Zea Mays
cggcaggagctgagccctgagtgacaaaccgttgtgacactgacttgtgagcaaggggaagcacattccaattccgccaccgccacttctttcttccccgcggacgcgtcgaaaagcgagcctctggggagactcgaggccactctgccttcccctcctatcctcgttccattccattccatcccatccccggaaagtgcaaggacgggagggagagcggccggcgcgtcacaaataccaccagcccaggggccatggccgccgcgatgaccagcttcgtcgccaagaacccgctgctcgcggccgcggcgcggcgcagggcgcctcccctcgcggggcgcgccctgccgttctctccgctcgccagcaccagggccccgcgccgcaccgtcacgtgcttcgtgccgcaggacacggcggccccggccgctcccgtgccggcgctggacgaggaggccagggccgcggcggcgcggcgcgtcgcggagaaggaggcgcggaagcggtccgagcggcggacgtacctggtggccgccgtgatgtctagcctcggagtcacgtccatggccgtcgccgccgtgtactatcgcttcagctggcaaatggagggcggcgaggtgccggtgatcgagacgctgggcacgttcgcgctctccgtcggggcggcggtcgggatggagttctgggcgcggtgggcgcaccgggcgctgtggcacgcctccctgtggcacatgcacgagtcgcaccaccggccgcgcgagggccccttcgagctcaacgacgtgttcgccatcgtcaacgccgcgccggccatctccctcctcgcctacggcttcttccaccgcggcatcgtgcccggcctctgcttcggcgcgggcctggggattacgctgttcggcatggcctacatgttcgtccacgacggcctggtccaccgccgctttccggtcggccccatcgccgacgtgccctacttccgccgagtggctgcctcgcacaagatacaccacatggacaagttcggcggcgtcccgtatgggctcttcctgggaccaaaggagctggaggaggttggtggcctggacgagcttgaaaaggagctcgcgcgaaccagaagggccatctga

SEQ ID NO: 211881 - DNA, 1255 bp, Zea Mays
acccagaaaggcgtctttgttgctcgtagctctctaccctttttcttttgctgctgcttgtctctcgttccttcttctgggtgctaggagtcgtcgtcttcttcttccacgggcacggataaaggagggagagcacacacatccgccatcgtcgctgcttcacgtacgacgagtattctgtattcatggagcagagccagggacagggagggaggaggcggcagatcccggcgttcgggaggtggaaccagcacagcgtcggcgacgaggtgcccatcacgcagtacttcgagtcggcagtacaggccagcctcctcgccaggcccggccactgctaccacgacgccggcgccggcgaggtgctgctgttccggtcgtccgcctcgccgcctccgcacaagccgcccaagaaggtgcggagcacgacggagtgtcacggtcaccaccagcaggttcaggttgaggaggtggggagcaggaggaggcagcagcagcggcggcggcaggagccgttgccgccgttcgtgtccggcgacgtgtcccgcgcggcgaggccgagggtcgttagggcggcggtggacgaggacctgtacaaggtcccttccgatatgctacgcaagaagaaagggaggaagcatgtgaggagcgtgtggatgggctgcgtgggcctcacctgcgtcgcctgacatgaccagtagtagcctttcttccacctttatcggatcgcgtggatggcaagaaagagagtccaagaggacgacgacccgaacccgaccacaagcatccaaaagccgaccccgaatgctagccgtttcagtccattcaatggtgatcgtcagtcaccaactcaccacgttgagcacagggatgcaagcaactcggtatactactgcaccacctcgtgctccatgcaccgtcgtcagtccgtcgcggctgagcttttgttccgccggacacagagatgcaagcccgtactgcacatcgtcgtggacaacacaagagctagtacgtacgtgatgcctgccgtctatccgatctgtggatgggtagctgatgagttcttcatcgtgtcattgcgcgcgcgcgcgagttgtccatatctatgtatgcattcttttagaaatggatttggcttcaatctgtttgggaccaatatcatcactcttggttatctgttaaggaaccgaaatagttaaattgataaaaccttctccccatgtcctctctattagattctatggcgtctaggatttct

SEQ ID NO: 211882 - DNA, 1560 bp, Zea Mays
gtcccaacagccagaaggcgccgtcgcctgcggcgacacgcgcacgcaggcatccctctcgtgagcgcgcactgctaccgtgccgcagtgtggttacagctcgtcgctcgaggcgaactccggcgtgcggaaccctagcgcaggcgtggagctcaccggcctcggcgccggcgccggtactaggatggctccacccgttacgccatggtgagggccttgcggctcggtggccgcgcggccgccgcagcgaggtggtgcacctgccggcgcgccgccgtcgccctctgcgtggccaacctcgtcgccgcgctgctcgtggcccgcgcgctctacgctcccggctccttcgcatttgcacccaaacttcgtgcctgtggctttaggcggggagctgaagtattccagggagcagatgaggtgggtggaggagtcgatccggattcgccgcgcagctgagcccgtcgagctcattgaggcggtgaagaagctgcgcaaggcattcacgagggaagagaagacacgaaaagggctgccgctggagctgaagcagaaagtttcgcttgagattctgcagagactgcacgatttgggcgaaggttctaataccacggaacaacaagaagctgtagaagcatggcgtgttgggaagctcaaggacatgagaagtgcatcttctaagaatttatcaaattttggcctctccagtgaagattcaaggatgttaaagcgagccttggagtttaactggcaaaggatattggaggacattggtctttggatacctcccactatatatcatatcgaacatgatgacaaacctgagaatgaaccagaagatgaagagataatacccggtccacctttgccccctgaatgcaatactgaactgcatactgattatggtggcacggctgttagatggggcttaacacatcacaaagaaagtgccgcagattgctgtcaagcctgtatagatcaggctaagagggccagaccaggagccttaaagtgtaatatttgggtttactgtccgtctgagtatggatgctactcgccagacaaatatgaacacaaacatcaagaatgctggttgaagcaggctgaccaccctagattaaacttcaaagaccggtaccctgagccatacagagattctcatccgactgcccctgttgttgtgccatggatgtcgggtgtcattactgcatgagctgcttgcccacaggagcgcaatgccaatgtgcagcttccagactgaactctacatttttgttttgcaaactcagaaaaccatttttcattttcattctttagtacttaggctttaggttagtctacttggtagctgaagtttaggctgcgctggggcctttgtcaaactgtgccctagggcgtggcaaacaaactgatagggcatgttttggcagagatgtgctgtaatgtatgtacatcaaccaatcatgctcgcagctatatattgtacttcaaactgaaaactaactaacacagaagcaatcatgcccatggctatattctacctcaagctcgagagatacacat

SEQ ID NO: 211883 - DNA, 1545 bp, Zea Mays
cccacccctcgtcccaacagccagaaggcgccgtcgcctgcggcgacacgcgcacgcaggcatccctctcgtgagcgcgcactgctaccgtgccgcagtgtggttacagctcgtcgctcgaggcgaactccggcgtgcggaaccctagcgcaggcgtggagctcaccggcctcggcgccggcgccggtactaggatggctccacccgttacgccatggtgagggccttgcggctcggtggccgcgcggccgccgcagcgaggtggtgcacctgccggcgcgccgccgtcgccctctgcgtggccaacctcgtcgccgcgctgctcgtggcccgcgcgctctacgctcccggctccttcgcatttgcacccaaacgcggggagctgaagtattccagggagcagatgaggtgggtggaggagtcgatccggattcgccgcgcagctgagcccgtcgagctcattgaggcgaagctgcgcaaggcattcacgagggaagagaagacacgaaaagggctgccgctggagctgaagcagaaagtttcgcttgagattctgcagagactgcacgatttgggcgaaggttctaataccacggaacaacaagaagctgtagaagcatggcgtgttgggaagctcaaggacatgagaagtgcatcttctaagaatttatcaaattttggcctctccagtgaagattcaaggatgttaaagcgagccttggagtttaactggcaaaggatattggaggacattggtctttggatacctcccactatatatcatatcgaacatgatgacaaacctgagaatgaaccagaagatgaagagataatacccggtccacctttgccccctgaatgcaatactgaactgcatactgattatggtggcacggctgttagatggggcttaacacatcacaaagaaagtgccgcagattgctgtcaagcctgtatagatcaggctaagagggccagaccaggagccttaaagtgtaatatttgggtttactgtccgtctgagtatggatgctactcgccagacaaatatgaacacaaacatcaagaatgctggttgaagcaggctgaccaccctagattaaacttcaaagaccggtaccctgagccatacagagattctcatccgactgcccctgttgttgtgccatggatgtcgggtgtcattactgcatgagctgcttgcccacaggagcgcaatgccaatgtgcagcttccagactgaactctacatttttgttttgcaaactcagaaaaccatttttcattttcattctttagtacttaggctttaggttagtctacttggtagctgaagtttaggctgcgctggggcctttgtcaaactgtgccctagggcgtggcaaacaaactgatagggcatgttttggcagagatgtgctgtaatgtatgtacatcaaccaatcatgctcgcagctatatattgtacttcaaactgaaaactaactaacacagaagcaatcatgcccatggctatattctacctcaagctcgagagatacacat

SEQ ID NO: 211884 - DNA, 2322 bp, Zea Mays
gcttacattgggacaggcctaacaacagtagcccaacacggcctgccactaactccgcgcacggacggcgaggccgacgccgccggtactgtctctgccggagtgctggatatccgcccgctgctcctcagtcgaccctccgctcccgcccatgcctcgacccaagcccgccgctgccggtggcggctggctttcagggtgggggtgggacctcatgctcggatcgattgccgcgttctacgccgtcatggcgccctacaccaaggtggaggagagcttcaacgtgcaggccatacatgatattctttatcacacttatcacatcgagaagtatgatcatttggaatttcctggagttgttcctcgaacgtttataggagcatttgttatctctattctctcatcacccacagtctttgtattgcgtttacttcgtgttccaaagttctatagtcttcttacagttcgattaacattgagttgtgtcactttgatgagtttgagacttctcagagttcaggtaaaaaagaagtttggccatcaagcagaagcattctttgtggtactaactgctatccagtttcacttgctgttctactcaagccgtccgcttccaaatatctttgctttagctttagtcaacttggcatactctttctggttcaagggaagctacctatgtacattacgggctctggtatgccttatgcccttttctgatgccttacctaccgagggaagctcggttctcaccaaattcagacataatcattatttctagtacccaagatataattcttcgtttcagcaccaaggatctggatcaacaaaggattaaagctttcacacaattaaaatcataccgaactatgtgtattgtgcaattttcattttcttgcagattgttgcagcagttgtttttagatgtgatatgattctgcttcttggcccaatagggcttgcacttttgctcagcagatctgtttctctcttggaagcaataaaatgttgcataagcactacccttgtatgcataggatttaccgtgctaatcgactctataatgtggcgtcgaatcctgtggccagaatttcaagttctctggtttaattcagttctgaatcggagttcagaatggggtacccattcaattcattggtactttacatcggcgcttccccgttccatgatagtggcataccctctctgcatggttggtgctcttcttgatagaaggatagtaccatacatgtttccggtcttcttatttgttgtgctctattcaaaacttccacataaggaactccgtttcataattggctcaattcccatgtttaatgtgtctgcttcactaacagctagcagactatataataaccgaaagaaagctgggtggaatttgctttttattctcatgcttggtgcctttcttgtcaggatattctactgtgactttcatggcatcctacaacaattatcctggtggctatgctttaaaggctctacatgaagcagattcttcagtgaaggaaaagatggtacatattgatgccttcactgcaatgagcggggtttctcgtttctgtgaaaatgaatatccttggagatactccaaggaggaagaaattcccatcgaagaatttgagaaaaggaatttcacctatctactgaatgagcaccgctccatcggtggctaccagtgcctgttcgctgtggatggattctccagagtaaaacttacgccccaaatccccccgctctctctggtgaaagaacccaaggtgtttgcacatgggaatacgagagaccctgacattctttcactgagttggcccggttgtccttgagggcatggggacaccggacacccagattcctgtggcaggaccactaactgccagcagtgaagatgtgtttgagtcagtccgcgtgacacatatatggtatacatctctgggtcttgccatgaagctaccttacctgcaaatctagaatggggcccctcctcccctagatcccacggcttcgaaaccacagctttaaggaacactgccattttcaggtgcaaatttgtgtaacattttagagccggaagaaagacagaaagcacacggggggtggggggaatcatagcaattagcaaccttgtatttacaagttggtcgatatatttttttcccttttgaggcaactttcatactccatcttatataacaagagcttctagactttatttatcggcagcaggcatacagtcgtgctggagacgcatacttgctccattcaaagataatatatttgttttctatctgctgtggccct

SEQ ID NO: 211885 - DNA, 2596 bp, Zea Mays
gttactggtgggaagcgccgcagctccacctcgtccggtccggtgtggtgtggtggactgggtgggtgtctctggcggtggtcgccgatgctgaccccctcggccggcataccgccgccctccctctccgcagctagcagcccctccacgtcctactctctcctctaccttccccgacgatgccgacgccttcccgtcccccgagcctcctccagctttgcccccaagcgctcggcgccggtccccaccaccaccctcccgcccgaggccccctccacctccgccgctgtcgaggcgccggcgcccttctcggtcacggccccggggacctaccggggaggggaggacccgctcgtctccaagctccgcacccagctcggcgtcatccacccgctcccggcgccccccatcagccgctccgtcgtcggcctcttcgccctcttcttcttcgtcggcgccgccttcgacaagctctggacgctgcggaagcgccgtcgcgccgagcgcgagctcaaggtcaacggctcctggccgcaggtgcccaccccgagcttctccctcttcctcgagaaggacctgcagcgcaaggagtccgtcgagtgggtcaacatggtgctcggcaagctctggaaggtctaccgcaccggcatcgagaactggatcgtcggcctgctccagcccgtcatcgacaacctccacaagcccgattacgtcaacagggtcgaaatcaggcagttctacctcggcgaggagcccctctccgtcaggaacgtcgagcgccgcacctcaaggcgggccaacgacctgcagtaccagattggcatccgctatgccggtggagcacgcatggcattggcactctacttgaagttcaccaaagtaccggtcgtcgtgccggtctgggttcgagattttgatatcgatggggagttgtgggttaaactaaggctcataccaacagaaccgtgggtgggagccgtatcttgggcttttgtgtcccttcccaaggttaagtttgagctttcgctgttccggctattcaatcttatggcgattcctgttctgtctatgtttctcacagaacttctgacagaagatttgccacgtctctttgtgcggcccaaaaagattgtccttgattttcaaaaggggagagctatgggacctgtttcaggaagtgttgcaagtgatataattcaaaatgttgcaactgacctgatccaagaggggaataaggactttgttggagagctatcagtgacactagttgatgctagaaagcttagctttgtcttgtttgatccttatgttgtcatgattattgatgatcaagtaataaagagcaagaagaacagtcaaacaactgtgattggactaccgggagaaccaatttggaatcaagatttccatatgcttgtcgcaaatcctcgcaaacagaagttgaccattcaagtgaaggattcaattggtctaactgacatcactattggcaccggagaggtggagctagggtcacttaaagatacagtacctacggacaaaatcgtgactctatatggaggatggggtttgtttgggaagcgagaggctggggaagttctacttcggctgacatacaaggcatatgtcgaggatgaagaggaagaagacgaggcggtgagaagcgagattggtgcgggttacgcctcagacgaggatgtgctggactacgttagtggcatgagcaaggggactgatttcgtgggtaaagaaagggaaactttcatggatcttctcgccgcgctgctggtgagcgaggagttccaaggcatagtgtcatccgaaacaggaagctcgtcaagagaaggtgagcaggcaggcagtggaccagaaggcacagacagcgtcactgtccctactagcgctgcggcggctgatacggaggcatccaccgtgccaaacagctccacagatacggctctggtgtggctggcggccataacgagtgtgatggtgctggtgtcctccaacctcggtggctcaggctacttcaacccgtgaccgtgagtgaaggcaacactggctgtaacttgtaagggtgacaacaagagagttctcttcttgttcttttttttttcttttcttttggaaggctagtgaagagaggcaactgtgtatattcatttttgctgtcacctccttccgatttgctgaacatggaccaggatttctcctgctcgcgtcgcggcaggggtcattgccatcggttactgtttccaaggcaaatgcgattgtagttgtatcgttaaaaaatataccaagaaaatttaaggctgccttgttaggcatcagcttatgattatgacgagctgtttgaagtacttttttttttggctaaacaggcctttttgcgaatagctaatcattctctcacataggaataagaacgtgatgagatcaagtttaaaaaaacattttttgcagttttaactcacacttgtggatcctatataatatgttttaatgaactcatgagatttcgtgagaccataaattctacatgtagaactgttttgtcaaatactgtaacaaaagaggtttaatttcattggtaaag

SEQ ID NO: 211886 - DNA, 2594 bp, Zea Mays
gttactggtgggaagcgccgcagctccacctcgtccggtccggtgtggtgtggtggactgggtgggtgtctctggcggtggtcgccgatgctgaccccctcggccggcataccgccgccctccctctccgcagctagcagcccctccacgtcctactctctcctctaccttccccgacgatgccgacgccttcccgtcccccgagcctcctccagctttgcccccaagcgctcggcgccggtccccaccaccaccctcccgcccgaggccccctccacctccgccgctgtcgaggcgccggcgcccttctcggtcacggccccggggacctaccggggaggggaggacccgctcgtctccaagctccgcacccagctcggcgtcatccacccgctcccggcgccccccatcagccgctccgtcgtcggcctcttcgccctcttcttcttcgtcggcgccgccttcgacaagctctggacgctgcggaagcgccgtcgcgccgagcgcgagctcaaggtcaacggctcctggccgcaggtgcccaccccgagcttctccctcttcctcgagaaggacctgcagcgcaaggagtccgtcgagtgggtcaacatggtgctcggcaagctctggaaggtctaccgcaccggcatcgagaactggatcgtcggcctgctccagcccgtcatcgacaacctccacaagcccgattacgtcaacagggtcgaaatcaggcagttctacctcggcgaggagcccctctccgtcaggaacgtcgagcgccgcacctcaaggcgggccaacgacctgcagtaccagattggcatccgctatgccggtggagcacgcatggcattggcactctacttgaagttcaccaaagtaccggtcgtcgtgccggtctgggttcgagattttgatatcgatggggagttgtgggttaaactaaggctcataccaacagaaccgtgggtgggagccgtatcttgggcttttgtgtcccttcccaaggttaagtttgagctttcgctgttccggctattcaatcttatggcgattcctgttctgtctataacttctgacagaagatttgccacgtctctttgtgcggcccaaaaagattgtccttgattttcaaaaggggagagctatgggacctgtttcaggaagtgttgcaagtgatataattcaaaatgttgcaactgacctgatccaagaggggaataaggactttgttggagagctatcagtgacactagttgatgctagaaagcttagctttgtcttgtttggcaagacagatccttatgttgtcatgattattgatgatcaagtaataaagagcaagaagaacagtcaaacaactgtgattggactaccgggagaaccaatttggaatcaagatttccatatgcttgtcgcaaatcctcgcaaacagaagttgaccattcaagtgaaggattcaattggtctaactgacatcactattggcaccggagaggtggagctagggtcacttaaagatacagtacctacggacaaaatcgtgactctatatggaggatggggtttgtttgggaagcgagaggctggggaagttctacttcggctgacatacaaggcatatgtcgaggatgaagaggaagaagacgaggcggtgagaagcgagattggtgcgggttacgcctcagacgaggatgtgctggactacgttagtggcatgagcaaggggactgatttcgtgggtaaagaaagggaaactttcatggatcttctcgccgcgctgctggtgagcgaggagttccaaggcatagtgtcatccgaaacaggaagctcgtcaagagaaggtgagcaggcaggcagtggaccagaaggcacagacagcgtcactgtccctactagcgctgcggcggctgatacggaggcatccaccgtgccaaacagctccacagatacggctctggtgtggctggcggccataacgagtgtgatggtgctggtgtcctccaacctcggtggctcaggctacttcaacccgtgaccgtgagtgaaggcaacactggctgtaacttgtaagggtgacaacaagagagttctcttcttgttcttttttttttcttttcttttggaaggctagtgaagagaggcaactgtgtatattcatttttgctgtcacctccttccgatttgctgaacatggaccaggatttctcctgctcgcgtcgcggcaggggtcattgccatcggttactgtttccaaggcaaatgcgattgtagttgtatcgttaaaaaatataccaagaaaatttaaggctgccttgttaggcatcagcttatgattatgacgagctgtttgaagtacttttttttttggctaaacaggcctttttgcgaatagctaatcattctctcacataggaataagaacgtgatgagatcaagtttaaaaaaacattttttgcagttttaactcacacttgtggatcctatataatatgttttaatgaactcatgagatttcgtgagaccataaattctacatgtagaactgttttgtcaaatactgtaacaaaagaggtttaatttcattggtaaag

SEQ ID NO: 211887 - DNA, 4094 bp, Zea Mays
gttactggtgggaagcgccgcagctccacctcgtccggtccggtgtggtgtggtggactgggtgggtgtctctggcggtggtcgccgatgctgaccccctcggccggcataccgccgccctccctctccgcagctagcagcccctccacgtcctactctctcctctaccttccccgacgatgccgacgccttcccgtcccccgagcctcctccagctttgcccccaagcgctcggcgccggtccccaccaccaccctcccgcccgaggccccctccacctccgccgctgtcgaggcgccggcgcccttctcggtcacggccccggggacctaccggggaggggaggacccgctcgtctccaagctccgcacccagctcggcgtcatccacccgctcccggcgccccccatcagccgctccgtcgtcggcctcttcgccctcttcttcttcgtcggcgccgccttcgacaagctctggacgctgcggaagcgccgtcgcgccgagcgcgagctcaaggtcaacggctcctggccgcaggtgcccaccccgagcttctccctcttcctcgagaaggacctgcagcgcaaggagtccgtcgagtgggtcaacatggtgctcggcaagctctggaaggtctaccgcaccggcatcgagaactggatcgtcggcctgctccagcccgtcatcgacaacctccacaagcccgattacgtcaacagggtcgaaatcaggcagttctacctcggcgaggagcccctctccgtcaggaacgtcgagcgccgcacctcaaggcgggccaacgacctgcagtaccagattggcatccgctatgccggtggagcacgcatggcattggcactctacttgaagttcaccaaagtaccggtcgtcgtgccggtctgggttcgagattttgatatcgatggggagttgtgggttaaactaaggctcataccaacagaaccgtgggtgggagccgtatcttgggcttttgtgtcccttcccaaggttaagtttgagctttcgctgttccggctattcaatcttatggcgattcctgttctgtctatgtttctcacagaacttctgacagaagatttgccacgtctctttgtgcggcccaaaaagattgtccttgattttcaaaaggggagagctatgggacctgtttcaggaagtgttgcaagtgatataattcaaaatgttgcaactgacctgatccaagaggggaataaggactttgttggagagctatcagtgacactagttgatgctagaaagcttagctttgtcttgtttggcaagacagatccttatgttgtcatgattattgatgatcaagtaataaagagcaagaagaacagtcaaacaactgtgattggactaccgggagaaccaatttggaatcaagatttccatatgcttgtcgcaaatcctcgcaaacagaagttgaccattcaagtgaaggattcaattggtctaactgacatcactattggcaccggagaggtggagctagggtcacttaaagatacagtacctacggacaaaatcgtgactctatatggaggatggggtttgtttgggaagcgagaggctggggaagttctacttcggctgacatacaaggcatatgtcgaggatgaagaggaagaagacgaggcggtgagaagcgagattggtgcgggttacgcctcagacgaggatgtgctggactacgttagtggcatgagcaaggggactgatttcgtgggtaaagaaagggaaactttcatggatcttctcgccgcgctgctggtgagcgaggagttccaaggcatagtgtcatccgaaacaggaagctcgtcaagagaaggtgagcaggcaggcagtggaccagaaggcacagacagcgtcactgtccctactagcgctgcggcggctgatacggaggcatccaccgtgccaaacagctccacagatacggctctggtgtggctggcggccataacgagtgtgatggtgctggtgtcctccaacctcggtggctcaggctacttcaacccgtgaccgtgagtgaaggcaacactggctgtaacttatggattgcatgtacaggggccactggctatatataaacagagggtgctgctagcactcactccattaatttccagggatgcacgcaggcaagtttaatttggaggatcaatggtagctagctagagctactagagacatacatggcggatcctctggtgcgagcgcgacccaaaaggaagaaggtcttagcggactacttggtgcgactccgatggattcctgccctcttcgtggcccttccaatatctgcgctgatctacctgagcgtcttcctggtgaacacgtggtccgccatgaaatccgagaagcgtcgacagaaggaacaccaggagaacgtagagggtcgtgaagcgtctcaaggagagggatccgaagagggacggcctcgtctgcaccgcgaggaagccgtgggtggtcgtgggcatgcgcaacgtggactacaagcgcgccagacgcttcgaggtcgacctctccgcgttgaggaacatcctcgagatcgacgcggagaggatggtcgccagggtggagcctctcgtcagcatggcccagataaccaaggctacctgccccatgaacctctcgctcgccgtggctcctgagttggacgaccttaccgtcggtggtctgataaacggctacgggatttcggggagctctcacgtctacggcctcttctctgacacggttgtctccatggaggtcgttcttgcggatgggcaggtcgtgagagccaccatggacaacgagcactccgacctcttctatggcatgccatggtcgcaaggcacgatcgggctcctggtttcggctgagatcaggctcgttcgtgtgaaggagtacatgaggctcacgtacactcctgtcaggggcaccctcaaggagatcgcggaggcttatgctgattcgttgttcctgccggcaaaggtccctgactttgtggaagggatggtgtactcgtcctcggagggcgtgatgatgacgggcgtgtatgcctcggaacaggaggcgaggaggacgaagggcagcggcaggatcatcaaccgtgtgggctggtggttcaagccctggttctaccagcacgccgagacggctctcgagaggggcgagttcgtggagtacatccccacgagggagtactaccatcgccacaccaggtccctgtactgggaagggaagctgatcatcccgttcggcgaccagctctggttcaggctcctgctcggctggctcatgccgccaaagatctccttgctcaagatcacccaaggcgaagccatcaggaactactaccatgacaggcacgtcatccaggagacgtgctgctgccccttcacaggctcagcgacgcgctggagtttgctcaccctccccgtgaagacgatggtgcggccggagccaggattcgagcagcatcgcaggaagggtgacaccagctacgcgcagatgttcaccgacgttggcttctactacgcccccgcccctgttctgcggggcgaggacttcgacggcgcccaagccgtgcaccggctggagcagtgggtcatcagcaaccacggctaccaggcgcagtacgccgtgtctgagctcagcggcaaggacttctggaggatgttcgacgcctcccactaccaccactgccgccgcaagtacggcgccgtagggaccttcatgagcgcccactacaagtccaagaaaggcaagaagacacaggaggaggtgctccaggctgaagctgaagctgcggatgctgacgtggtcgatgcagtgaccagctgaaagaatctgttgtaactcagtgaaaacgagattcgagagaatggagaggaatagtgcaaaatgacagttgtgttggctttattgcagggaagacaggtttatatacatatgacatgggtcatccctaaggggtgtgtcccttggggatgtgtttgtcgagcccctttggtcacaaaatattgtaacactcccccttgatccaagtccatttgatcatctgtcagctgtcttccaag

SEQ ID NO: 211888 - DNA, 1465 bp, Zea Mays
ctttttcagctggctatatttgctaaggaattggttgaaaggttaatatctcgactgaaagaagcacatatctgagtggtactacccttaagtatggtagctcttagttcagccaaaattatgcgataaaaaatacctgtacaagctggataaagcagaagcaagacagatccttatgttgtcatgattattgatgatcaagtaataaagagcaagaagaacagtcaaacaactgtgattggactaccgggagaaccaatttggaatcaagatttccatatgcttgtcgcaaatcctcgcaaacagaagttgaccattcaagtgaaggattcaattggtctaactgacatcactattggcaccggagaggtggagctagggtcacttaaagatacagtacctacggacaaaatcgtgactctatatggaggatggggtttgtttgggaagcgagaggctggggaagttctacttcggctgacatacaaggcatatgtcgaggatgaagaggaagaagacgaggcggtgagaagcgagattggtgcgggttacgcctcagacgaggatgtgctggactacgttagtggcatgagcaaggggactgatttcgtgggtaaagaaagggaaactttcatggatcttctcgccgcgctgctggtgagcgaggagttccaaggcatagtgtcatccgaaacaggaagctcgtcaagagaaggtgagcaggcaggcagtggaccagaaggcacagacagcgtcactgtccctactagcgctgcggcggctgatacggaggcatccaccgtgccaaacagctccacagatacggctctggtgtggctggcggccataacgagtgtgatggtgctggtgtcctccaacctcggtggctcaggctacttcaacccgtgaccgtgagtgaaggcaacactggctgtaacttgtaagggtgacaacaagagagttctcttcttgttcttttttttttcttttcttttggaaggctagtgaagagaggcaactgtgtatattcatttttgctgtcacctccttccgatttgctgaacatggaccaggatttctcctgctcgcgtcgcggcaggggtcattgccatcggttactgtttccaaggcaaatgcgattgtagttgtatcgttaaaaaatataccaagaaaatttaaggctgccttgttaggcatcagcttatgattatgacgagctgtttgaagtacttttttttttggctaaacaggcctttttgcgaatagctaatcattctctcacataggaataagaacgtgatgagatcaagtttaaaaaaacattttttgcagttttaactcacacttgtggatcctatataatatgttttaatgaactcatgagatttcgtgagaccataaattctacatgtagaactgttttgtcaaatactgtaacaaaagaggtttaatttcattggtaaag

SEQ ID NO: 211889 - DNA, 795 bp, Zea Mays
gtccatttggcgttcccagttgccctccacgctcagacgctctacctcgctcgaatcctcgatcccaccggtggcggctgagcggctccaagctcctaagcacgacggcgccactgcggactgcgggcggcagggcgagcaccgaggtctttgtcgttcgtcaggcctttcgccggcgacatgcaccaacctgtgatggcccttggacgccggcgagaaggcgcttggacgtgagcgacaccaggcgataccgcgatacagtgtgtctaggtgccttaaggtgaaaagataggagccaagagctagactactagagttcaggcttcgccacgaaaccccaaacttccccggcgtcatcctcgttctgcgatccaagatgcataagctgaggagaggaaaccgcgacaagctgtagcagttcatgaccataagtggcgccagcagccatggacgggacgagccagtcgaggcggattggagtttgaatcacggccacacaatacactcatcagttacattattactagtgcaagcacctccactagtagattgggattcgatataaattcaagaagaaaatgaaatggaaggaataacagaactttgtagtgaagaacaagtttatgcacttttgggtctctatcctgaccttgagcagtttagatgaatagtgttatctggtaagcgtgcttatttggatgatagataatcctttgcgagttgcctgaacatttatacatcacattcatcctacacgtaattagtccgtattaaatcctgaaagtgaaatgcatg

SEQ ID NO: 211890 - DNA, 2812 bp, Zea Mays
caagaaaccaatgctccacagattttatgggcattctggtccactgttacccattcgtttgcctgatccataccaaatggtagtagcgttttgcaatcgattacccattcttttgcctgatgcatagtagccattccccattcccacataggagtattttccaatccataacccacgtcttgaaccatcaaaacgtttccctttcccgttccgactcccatccaaaatccattcaccgcctgccttttcttctcccgtccaccgtgtgcgggctgcggggagcgctctcctgccgctactaggcgaccgccgccgccgtcctacgtgctcgggtccttcctcggctatcaacacctaccagttatagggcgtacatgtgcacacgcatgtccttcaccgggtccgcccctgagtcttccgatcccaataagcaacctgcaaaaaagcagactcgacaatgggcagcgtggacacaccaagaggaggagaatttcttcaatgcactgcggcaagtagggaaaaacttcgacaagattacacaccgtgttcagagtaaaaacaaggatcaggtcaggcattactattatcgtcttgttcgacgcatgaagaagctattgggtcctaggttctcacttgatgcaaaaaactccaaggataccattgctgctatgcttcgctggtggtctctgcttgagaaatttagctgcagtgcatcaaagctgcacctgaagcctcggaggttcaaaacatttgtagaagcattgggaaaacaactgctgaaggacagaaataagtccaggaaaaagcattcacgagtggatatgtgcatatcttctccatctccagttatcagcaaggctcctggggatgagactcctcctgtaaagttcttgtcaatagattctcaaaatggtagcagagtagcatctcctaaagggacaattttcaagcggattgcagaaccaatttctaacaagtcaggaacaactaaaggggacctctctgccacaagaaccgtgaaacagaaaaggaaggcaggtggtgctgttgcatctgccgcatataaaaaatgggagagagcggccatggctggtgtttctttagttgctgatgcggctgaggagctcgagcgcaacacgattaacccaggcatgttatgtaatgttgatgcaagaacactgacttcatcatcagacagactttctactggtgatggcattagcacaaatcatatgaaggaaacagattcacaagcacctgtgaagctgaagctacagttatttccaataaacgaagctactcgaaaggcattggagaaggatgaccataatcctcatttagagctcacattaagctctaggaagaaaatatcatctgtgctagaacatctaaaccgaaaatggggtaactcaaacatcgcatctggagagcttattctttttccgtattgtgctaatcaagaggatttggctacatatcagagatggacaacaagagatactgttgcagtcgctgatgtgtttctttctgtgaatagcccttctgttttccgtttaaggtatggttggttttcccttgttgagcttggagcaggagtaagtgacatatctttaacacattttgaagattgcatgagaccggaagtcatccaagtcaaatcaccatcaggagataaggcttgtgtgcaaaaggatggcaagaactctgagcttccggatcagccggctaatgtgccccactctcggtttggcagccaaaagcaagtgcaggttcctgtaacccaagcttttgaggatgatcagggaatgaattgtgtggcaatatctgaagtagagtgggcagatacccttacagatatcagtgttgagcacttactgacagaagcatccaaagatttagattgcgtggggactagtgtaaaagatcctttgtttcttgagaatccatgcagctatgactcgtttgatgctgttgttgcccttcatgcttctcgttatcaagcatcagaacagccagcccatgctccccattcaaacatatggggagcagaagaaacatgtgatgagttcagttttaatttgtcagcctccaggaagcaagaagggtcaaacacttctagcagctctcctgatactgacaatgaagttcatccttcaaattcagaaggatttcgaggttttcttcaggacttgactggacgagagactgatgctgataatccttgtaatgatgacgccaaagacgaagaggagttttatgctaaatcaccacctcgaaatgacaaaactaatgagttgaaggatcaacctttagctgacatatattggcctgattcactcggaccactggacttggacataccggccgtgagatatcaaaccgatgacatactgataggggacagtcaaagtagttggaattggaaccgcctgatggcaaatagcctcgatgcatttcgaaacctgtcattcttctcggataagaatgactcgattccgtcgatcatgtagaactggggatgttacggtttctacgacttgctgtgttggttaggaaggaacctccaattctgcatttcgctgaagaatatccaacagatgcggatttgatgcatacgtgaggtgctcgtgctgttgtaagataacataacggatgtgctaaccactccatgtaattgtgttgtccttgtacataaagcacatacaagcacttggatacaagtaaagcttctggggttcgtgtataagatcagtttgcctaatgtccatcaaatgattgtgcacttcttttttccggtttacatctaaaatag

SEQ ID NO: 211891 - DNA, 2591 bp, Zea Mays
atgcatagtagccattccccattcccacataggagtattttccaatccataacccacgtcttgaaccatcaaaacgtttccctttcccgttccgactcccatccaaaatccattcaccgcctgccttttcttctcccgtccaccgtgtgcgggctgcggggagcgctctcctgccgctactaggcgaccgccgccgccgtcctacgtgctcgggtccttcctcggctatcaacacctaccagttatagggcgtacatgtgcacacgcatgtccttcaccgggtccgcccctgagtcttccgatcccaataagcaacctgcaaaaaagcagactcgacaatgggcagcgtggacacaccaagaggaggagaatttcttcaatgcactgcggcaagtagggaaaaacttcgacaagattacacaccgtgttcagagtaaaaacaaggatcaggtcaggcattactattatcgtcttgttcgacgcatgaagaagctattgggtcctaggttctcacttgatgcaaaaaactccaaggataccattgctgctatgcttcgctggtggtctctgcttgagaaatttagctgcagtgcatcaaagctgcacctgaagcctcggaggttcaaaacatttgtagaagcattgggaaaacaactgctgaaggacagaaataagtccaggaaaaagcattcacgagtggatatgtgcatatcttctccatctccagttatcagcaaggctcctggggatgagactcctcctgtaaagttcttgtcaatagattctcaaaatggtagcagagtagcatctcctaaagggacaattttcaagcggattgcagaaccaatttctaacaagtcaggaacaactaaaggggacctctctgccacaagaaccgtgaaacagaaaaggaaggcaggtggtgctgttgcatctgccgcatataaaaaatgggagagagcggccatggctggtgtttctttagttgctgatgcggctgaggagctcgagcgcaacacgattaacccaggcatgttatgtaatgttgatgcaagaacactgacttcatcatcagacagactttctactggtgatggcattagcacaaatcatatgaaggaaacagattcacaagcacctgtgaagctgaagctacagttatttccaataaacgaagctactcgaaaggcattggagaaggatgaccataatcctcatttagagctcacattaagctctaggaagaaaatatcatctgtgctagaacatctaaaccgaaaatgggagatggacaacaagagatactgttgcagtcgctgatgtgtttctttctgtgaatagcccttctgttttccgtttaagttcaatgttattgcatatgacaccatccagtacaggcaagaactctgagcttccggatcagccggctaatgtgccccactctcggtttggcagccaaaagcaagtgcaggttcctgtaacccaagcttttgaggatgatcagggaatgaattgtgtggcaatatctgaagtagagtgggcagatacccttacagatatcagtgttgagcacttactgacagaagcatccaaagatttagattgcgtggggactagtgtaaaagatcctttgtttcttgagaatccatgcagctatgactcgtttgatgctgttgttgcccttcatgcttctcgttatcaagcatcagaacagccagcccatgctccccattcaaacatatggggagcagaagaaacatgtgatgagttcagttttaatttgtcagcctccaggaagcaagaagggtcaaacacttctagcagctctcctgatactgacaatgaagttcatccttcaaattcagaaggatttcgaggttttcttcaggacttgactggacgagagactgatgctgataatccttgtaatgatgacgccaaagacgaagaggagttttatgctaaatcaccacctcgaaatgacaaaactaatgagttgaaggatcaacctttagctgacatatattgggtacttgatgaaattataatgttcttttgtactggcattatcttagctgagcttacatttttttcttttcttggcagcctgattcactcggaccactggacttggacataccggccgtgagatatcaaaccgatgacatactgataggggacagtcaaagtagttggaattggaaccgcctgatggcaaatagcctcgatgcatttcgaaacctgtcattcttctcggataagaatgactcgattccgtcgatcatgtagaactggggatgttacggtttctacgacttgctgtgttggttaggaaggaacctccaattctgcatttcgctgaagaatatccaacagatgcggatttgatgcatacgtgaggtgctcgtgctgttgtaagataacataacggatgtgctaaccactccatgtaattgtgttgtccttgtacataaagcacatacaagcacttggatacaagtaaagcttctggggttcgtgtataagatcagtttgcctaatgtccatcaaatgattgtgcacttcttttttccggtttacatctaaaatag

SEQ ID NO: 211892 - DNA, 1443 bp, Zea Mays
gaaaaaaatcaatccgccacctgttctaacacgcgaggagaagaacatggcgactgctgtttcgttaccgtccgcgtgctctgacccctagcgagcccacggcgtcgccctataattggggtcccaaccgaaacctctcctcgccgcaacgaattcccggtctccaaccagccgggcagccaccgcagacgatccctagttccgcgtccccgacccgaaccctcgagttcgcacgggctccggccagattcgcgcggtctaagcttcgaatcggcgcatggaggcagcagtagccgccgcactcaagtcgcccaccgccgcacgtccctcgtggcggcccgcggccccgggcgccacctcgctcccctttgaccggaggcgcagctttgccttcggctccatcaagggtctcgggcggcagcagctcacctctaggactaggaggcgaagcagtgtgctcttccgtggagaagagctacgagctccccgacggacaggtgatcaccatcggcgccgagcgcttccgctgccccgaggtcctcttccagccatccttcatcgggatggaagctgccggcatccacgagaccacctacaactccatcatgaagtgcgacgtggatattaggaaggatctgtacggcaacatcgtcctctccggtggcaccaccatgttccctgggatcgctgacaggatgagcaaggagatcactgccttggctcccagcagcatgaagatcaaggtggtcgctcctccagagaggaagtacagtgtctggatcggaggatccatcctggcatccctcagcaccttccagcagatgtggatcgccaaggccgagtacgacgagtccggcccatccatcgtccacaggaaatgcttctaattctttgggcccgagaaatgcaagccgtgggggagccgttaccgccgccagcctctcctgcccccgttttcgttgccgtttcttcattagcgcgaacaaagttttgtgccggtctatcggccgccgctttcctcccctattcatcaagactgcaataactgtcgctacctatgcttctcacttgtgattttttggacacaatatgttaaggtccattcaattctaatgagacgcctgatgaggctacttcggattgtcattggttattgatgtcttatgaatgaataatataatttttttttgtcactttgagctctctgtatctgcactgttgttacatttttcccttgagaattgaaattgagacgctgtaatttgcgcatcgttgcagcagctgcctttcgattccagtcccctgttccatcagattccctcctgccttttgtctttgaaagcaccttttgctcacgcctcacgagtcacgacacatccctcgggcctagtttgggtactctagtattgaagtggtttggagggattggagagtgtataaatc

SEQ ID NO: 211893 - DNA, 3005 bp, Zea Mays
ctcgctctttcacttgggccgcttctggatctgtacgcggacgcccacgcactgcttggccttcgtctccgcttctcttgcgctttcgactcctgctagctggcggggcggctcgcctctcgcgccacaatggaggtcgaggacgacgacaacacggcggcgccgagcgcgtggccgagttcatccaggcgtcgccacctcctccagttccttctccacgcctccatgaggctcgacctccggcccatcgtcaagtacgccgcgcttaccttcttcgctggacgcttcctcccggcactcccgaggaagatggggttctgcggcgcgcgaagcggccgaatagtcaggtcctggctcctcgagcccctgagggacagcaatctcgagctattcgcgctcgtcgcggtgtggattgccagcaagatccacgatcagaagccaatgtcagtgaagagcctcaaagccctgggtgatcgcatcatcgccgaccagcatttcatgtgccgtgattttgccagtgccgaattggtgttcttggaggtaaatcctggctatgattattactgaaaaataggttaagttgacagggtcaactatgttatattccttttgtttgttgtgggattttaggtagtggaacacaacattggattttcaagcatttgtttcatatacctggaggagcttctcatgcatttcaggttctttggatttcttacaacctttctctgacccataaacagttgttaaccctgttaaaggcaacctacaaaacttcacagtgcgaataatattggagcttatacaaaattctctctctctcttttttttttggggggggggggatgggggcgagtcaccatttatgtacaagacatgtcatcaacaaacatgtgtagcaagtagtaactgatcgcaactgaaattttaccacattctgttttcgctcttaggaagcagactgtgtagctcttcatagcagcttttaccacaaaatatctttatgagaaatattaaactgggggcacattagtgggaataatctcatatcatttctcctatctacaatacatcttatttaccttgttatcacaagtgaatctgacaatatgaaaaactaagaaaataaatgggatgttggataatcagaaaattctcatagctatctttcttgttacagagataatagctctcctgcatgttagataaaaaaaacccctagacctctattgaatgacttgtttgattccatggttttacagtttcaccaatacaacaacaccaaagctttttagtcccaagcaagttggggtagactaagttgaaacccaatagagcccacgagtcaagattcaagcatatcgatagttgtttttcatacggtcctattcaaggctaaatctttaggtatattttatattctcatgtcttcttttactgtctcttctcatgtcaacttcggccttctcctgcctctcttcctaatttcctattactatcacgccttaggacaagcttttcttcactaagtgctacctctatcctatcatgtatatcgttgttctggactcgatcccttcttatatgactacaaatccaatgcaatgtagcattttcgcaactcgtatctgttgaatatgacgtcttttgtaggtcaacattctgcaccatacaacacaagatgtctaatcgctattctataaaacttgttttttagcttctgtggtatcctcttgtcacatagaacgtcatatgtttggcaccacttctttcaccctgctttgattttatggctaacatcttcatcaatatcactctctttgtagcattgatcctaaataccgaaaggtatccttcataggtactacttgacctgccaaactaatatctccttcctcatgtatagtagtgctgaagccacatatcatgtattcggttttaactttatcgagtctgaaacctttggactctagagtctcttgccacaactatgactgtctttcattaactagcactatatcgtcctaaaaaagcatacaccaaggatatctcattgtatgtctcttctgacctcatctatcaccaatacaacagtcagtgctcaaagttggcccctgatatagtcctattttaatcgggaaatatcaaaaataggcgaacttttggatctggatgtgtgcatggaaattttggacattctgtatgaaacggaagatacctcgttactttttaattgtccctgctcacttgctgcttccactcttgttgctgcatatgctatatcagttcctaagcaaacatgggagtttccaatccttccttgggtcaggtttgctacatcatacgatgaagaggaaatcatgaagattgttctgacaattctcctacatgtgcttaaactggatggtatcgaagagaagggcaagggacgttttgatgccagatgtttgtcgtgagtatgtgatatgtagagcacgagattgtgccccaattttgccttttgagttctgaagtattaaccatctaactgaccgtgtgcagcagatacatgcttttagaagacactgtagctagtttttgacaggcggttttgagattgagatgcccataatagttatgtgaactaaaactatatgatcaagggagtgcgcgtaagcgccttgcaatggaattctgtattggatgtattttgaagaaagatgcctgctaagtaatgccttcaggttggaattcaagtttgacataattatcaatgtaatgacatttaagctccttgagatctcaaatggaaggatgttgcattgccgccgcattgcttggtgcactctgtcagcttcaaattcttgggtggttttcccttcctttttatttagggggagagatctaggctagctagacagaaccgctctacactgccgcacctgttcaaaagctcaggtctactggcttcgtaggcagcgcgtcgctacttgcctgaccgtgtctaccgcaggcgcacctcccct

SEQ ID NO: 211894 - DNA, 1054 bp, Zea Mays
tggcggtggaccggagatctccctccgctccagctccgattgatgatccccccacccaacttcttccgccaagtgttactcgggtgttccctcccctcccctgtggcctgagagctgtgctgcagagcccaagagaagtcgttggtgcagacagccttggattggatgtggaatgaggcgatggcatctgacggatcatcatcctctaccttccgggggttgtacggcaacgtccacggcccggcggtgctcactggcgcgccgttcgcgctcgtggcgctcctcatctcgctctggctcatcctgcagcacctcagatcctacagcgatccagctgaacagaagtggatcatagctgtgctgttcatggtgcctgtttatgcctgcgaatcgataatctcactgtggaactcgaagctctctctggcctgtgatatattacggaattgttacgaagcctttgctctgtacgccttcggacgatacttggtggcttgccttggtttttttggagtatttggaaactcggaaatgggctttgttttcagaaagtaggctggaaaagcatggagatgcttctacacgggattgctgggttaccacagaactgagcaattccgttcacaacagaatagaacgagtgatagaagagtacggtggatgagattaagccgtcaacaaagaactatcttattgctgcccaactagagcttggaggctttcaaaagcttcatcttggtgtggctggaagagatcaagcctgcagtggtatggtattgacaagaatgccgctgcgtggtcagattcgtcgtgctgttagtggaagtctgtgaacatctcgttggagtagttgtaaaaggattttttctgtttcgatgcaggctttgttgagttgggttctggtttgagacggattttatggcctctggggttagtgttggtgtaaggtttatgtgcccggttgttaggtttaaacttatatttaatctcacctatctaacaaaacactctagtctattttatattctatagttaagtataaatagaaaccgta

SEQ ID NO: 211895 - DNA, 2149 bp, Zea Mays
caaaatggagggaaacataaagggggtttcgttttcagaagtgtcgggaaacttctttccccactcctgtagcgccgccgccgcgtgcccgtgaacctcccgccttcgttctcccctcccgcttgccccggtagtgattttcttccttggttcacggcggatcccatgccgatcgacgggatggtgtccgtggtcgcgaccgtgagtgggtaccacggcgacgagcggcacaggctcgtgaacctcatcgcggagaccggcgccagctacgtaggatccatgagccggtccatcacccacctggtgtgctggaggctcgaggggaaaaagtacgacatcgcgaggaggctggggacgctcgtcgtgagccattggtggtttacggagtgccttagggaggggaggcgcctcccagtggactcttacttgatggtaagtggtgaagaagcagggccagtcccagagttgcctactcgttcccgtacacaaggcaaaaaaagtgccatcatggaggaccgagttttccaagagttacctgatgatttctgggacactcctctagccagaaccagctataaaaattctgttggtgatggagattctaagaaaaatcgttcatcagatgttaagaaaagaaagcgtatgaagcatgtcaatacatcaacggacagaaatgtcttaaactcgcaggacaatgtgtcaagtgtcatggaaagacattttcttcatttgtcaagtcatacaacgtccaagagcacatcaaagcagaaggaaaacttgtcacacttgcttcacaatgaagttcctatcaggatgggagaaaggaatgatcttactgaaaactttgaaaatgatagtttgtctgacagcttcagtgaacctcaaatttcagatactctgtgtgtagaagctcaaagaaaatttaccaaaacaagtgcaccatcatcatcacttcgacaaagtaccatggattctttatatgaatttggtgaaactagtaggcatgaaccagcaggaaaaaaagaacaagacaatgttgaattaaggaagacttcaagaagcttccttccatttgatatgtcaggacaggaaccacctttctgtactcaggagcaagtagataaatgtagctttggcactctagctgatgatgaaatgggatatgataacaaacccatggaaaagtcatctaatttagaaaggcaaacagaattatcatgcgtcatatgctggacagatttttcttctacaaggggcatcttaccatgtggacatcgattctgttattcatgcattcaaggatggtcggattgtctggcttctaggggtaaagtctcaacatgtcccctttgcaaagccagtttcacatggatcagtaaggtggacgaggcaggcaccttagatcagaaagtatactcgcagaccattccttgtgaagcttctaccgatgtttttgtgctgggcagtgaaggctacgatttctctggaccaacgtctgggcaaggagcatgctaccagtgccacttccgtgagcctgaggagcttcttctaagctgccacgtctgcagatcactgtgggtacactcgtactgccttgatcctccgctgactccttggacatgcatgcactgcagagatctgcgggtgctgtttcatcggtatcgttagccccacttactgtactagtcaaaccttaattgttgaaggaaattatcagaaggcttgaacaccgtagcggcttgtcttactgaaggactattaaggggtgtttgaatgcactagagataataattagtggctaaaattagttgaaacatctaaacaacctagctaatagttcagctattagctatttttggtaaattagttaatagttagataattatttgttagctagctaatttcactaataatttttagtcaactaactattagttctagtatattcaaacactccctaagtttgcaatgtaattttctagttccatttgatgctataccctagcattgtgttaacgacatatactagtggtactcgaggtggaagatatatgtagggtctccggatcctcatagcgtagatcttgtatatgtgccgttgggtcctcatatcgtagatcttaactcgagaactgaaaggaacctagat

SEQ ID NO: 211896 - DNA, 1540 bp, Zea Mays
tttgacgaaatgccaatggtaacgcacataatcaaacaaaaacataccacatgtttggttgtcttcgtcaggagaactatactccttccatgcattgactatgataatacacgtgtttagttcgttccacgtatacgcgaaacggaaaatggtcgtatcgggcggactaagctcacctcaggcctcatcctcttcgtctgatactagtaatctatagagagtgattctcagcatcatatcgtcagccatgggccgcgtgaagctgcagatcaagaggatcgagaacaacaccaaccggcaggtgaccttctccaagcgccgcaatggcctcatcaagaaggcctacgagctctccgtcctgtgcgacatcgacatcgcgctcatcatgttctcgccctccaatcgcctcagccacttctccggcaggcgcaggatcgaggacgtgatcactagatacatcaatctcccggagcacgagagaggaggaggaggaggaggagtcgttcggaatagagagtatctgatgaacatgcttacgcaactcaaacgcgagggtgacattgccgaacagctcacaccacccaagtccagcgaactccaacatagaggatcttcagcacgagattagaaattacagacatcaggtcgaagagttggagaagcaaattaggatgttcgagccagatccggcggtgttggtgttgacgaatgaagccgagacgtgcgagaaattcctcatggacacactcacccgtgtcgaggagcgtatgaaatatctgtcgtgcaaccagctgggcccgttcgaaccgtcacccaccgacatacacgacgtattcggtgtgtcgcagcagcagcagcagcagggggacctgagcgcattcggggccggcgacgtagtatcgtatttcgctggcggaatggcggcgtcggacatcttctccggtgttggcccgatgtcgtctttcagcgagcagacgattttcgactcgatgcggccggacccggccgtcatggctggactggacccgggaatagccacgatctgcaccgtcgaccagcagcctcccagtctcaactgggaggacgcgtacgcgtctgcggggctcctctccgcgctcattccgtccacgcccttccccctcgatgaagaccagcaggcgagttgagtaccatccaattcgacaactactgctttagtttcccccctgatttgctagctagatactacggtatggtctccagatacaggacgccatggcgccggtgctcacgtctccgatggtgccgccgccgccgcatcacgtgcacgaggaagtggaggcgccggaaagctgctccaacgtgtcgacggacggggaccgcgccgctacaaccgcccccgccgccgtcggtcaagagcacgggctgcccagtgcggtcgtcgactagctagctgcatctgcttgtccgcagactgttttgcagcatcacttctttacccagcatagcagttggaaagcctacagctagccaactagctagacagccaaggatggattat

SEQ ID NO: 211897 - DNA, 1205 bp, Zea Mays
agagaatatgccatcgccgctccatcccgacagatgggcccgacctactacaatcatgcatgatgggaagggtcggggagaagctcgatatcgactttgttatatccaccggggacaacttctacaagaacggcctcaagggcgtgcgcgaccaggcatttgaagaatcgttcgtggatatctacacagctcaaagcttacagaagccatggtactcagttctaggaaatcatgattacaggggcaatgcgctcgcacagcttagcccagtcttgaggaagatcgacgaccgattcatttgcatgagatcgttcatcgttaacgcagaacttgtggacttcttctttgtcgacaccactccgttccaactggagtattggactcaccctggcaagcatcgttatgactggagaggggtggcgcctcgaggcaattacttagccaatttgctgaaggatctggatgtggctatgaagaaatcaactgcaaggtggaagattgtggttgggcatcacaccatgaggagtgtgagtgagcacagggacaccgaggagcttctggaattactacttccagtcctcaaggacaatggcgtcgacttctacatcaatggacacgatcactgtctggagcacattagcagcagagacagtccactccagtatttcacgagcggaggcggttccaaggcatggagaggagtcttccatccaaacaaggacaagctccgattcttctacgacgggcaagggttcatgtccctccagctgaaccaagaccaggctcactttatcttttacgacgttttcgggaacatactgtaccgatggagctcgagacatccccagtcttccacgtatctcgatgaggaataaattggattgattttgcgccattgatatgtacaaaacaccacctgccaactgtcatgtatgtgaaatgatgagtgttagacgcaaagaaggttatacaccagttagggttaaatcatctggttcagtggttcatgatggatccaagaatgcgacgattatatcatagacacgtagtgaagaacggaaagacttatgaacaaacctcaaagtctaaccaattatgcttaggcgacaaaaaaatgtctagtttccacgtaaactagccaatcaaccgtcgaagttctcaatcaaagggactatgtgcaaagcgagcccctatgtataaagcga

SEQ ID NO: 211898 - DNA, 1873 bp, Zea Mays
cccatgcggaccggaacggtcaattatccctccactgcccgccacaccctatcccccacactcaccctccgcaccggatcccgtcatcacctccgagcggcgcgccgggccggcatccaactcgccgccgacgcgccgcgccccagaacgagccgccggaacgatctccctaacccccgatgcgccgtcctattgcccgcggcgagcccaaggggctgaggaagggatatacgcatgggttgcagcaaattatgctttggggactcttgggggtgatccaaacgacaccactgggattattgaacttggtgacacttgttactggtgaacctgtgccaccgaagttctctcatatgcttaagtttggtgatgtctcatataacctgtacagccacagttttttgcatcttggtctgaatgtagcatatgaatcactccatgacttgctcagctcacctggccttagatcaatggccacacatttgatttctcaagctaagtacaaagatccttgcactccaaggggatttacacgcatagcaggatcagctaaacttcctgttggtgttcttgagccgaaggttgaatacagaccttttgctcattctgcggggaacttctctgagtgtagatctgcagcactaacactactgcaaaaaggaaatgagggatgtacatatcatgaatgccgccttggagcagcatttgtaccagagttggaagggaaatttttggcgacagaaaacttttaccatacttcaaaggtccaattctttctctaccgttgggggctttcagaaaggggattaaatttgaacatactgcatgcataatgataggagtcttctcttcggatcaagattgtccattttcttttatgttcagtattctacaatctttagtacatgttcatttgatatttgattgcttaacagttctttggtctgagttcgaagcccttcctttctgatctgatggtggctggggagaaattttgccatggggattggtcgaagattaaaaataagtacagttcttttgatgacggacaactgcttcttttttgcttttcctcagcatatattattgctctactgcatgatacgcttaaaatgccactggatcataaaaggtgaagccttttctataagttctattctttgttgaaacctggatatttatgagttttttctcaggattgatgttgtaaaccaaatccatggcgtgcctgttgactgggcattgggtgctttcattgtgcagacgacgatgaacagaacagagtactcagattcatcagtttcatatctaaacagctatgactctcctggcttggttccgcttctgttcattattgtggttgtatttacagcattgtccattctaaggtggagaaaacctcgtctgaagacgatctacgatatggagaaaggcaggtacatcataacaagggtcagccaatgagtcgcgcacatcagcgttgggagtgggtggactttctgcagcggagcactattgaccatgtatgtagattttcctaaattgatttcttacttagtggccaactacctccagcatgttgccttgcggagtcaacttgttgagtttgagcagcaacccctgtatatgatagaaggatgcgggttgccgtggcatttgtgcatgttcagtgttgtatgtaatgttgctaaactgttgttgatgtaattagaattttgtgcatgggcatccatccgatgatgtaatcctgagataaccatgtgtctaatgatcgattgaagttctctgccatggatcatggatggcagggcagctgtatctttgtttcatgtcaaatcactgatgttatgtaatcctaagatattatttctaa

SEQ ID NO: 211899 - DNA, 2092 bp, Zea Mays
cccatgcggaccggaacggtcaattatccctccactgcccgccacaccctatcccccacactcaccctccgcaccggatcccgtcatcacctccgagcggcgcgccgggccggcatccaactcgccgccgacgcgccgcgccccagaacgagccgccggaacgatctccctaacccccgatgcgccgtcctattgcccgcggcgagcccaaggtacaaaccctagctctagctcctccctccgcagccgccccaaccaagatgggcgcccataggcgacaacccagctcccaccgccgcgttgccggcgccctcacgctcctcgccgcgtccgcgctcgcgcttcttctcctagcatcccgccgggttcccccgacctacggcgtcatcatcgacgccggcagcacggggagccgcgtccacgtcctcgcctaccgctccacggcgggactcccgcagctggactgggcacgcatggcctcgatgaaggctaccccagggctatcgtccttcgcggcggacccacgcggcgcggggctgtctctggcgccgctattggagtttgccaggcgccgtgtgccgcgggagagctggggggaaaccgaggtgcggctcatggccactgccgggctgcggctgctcgattccgcagtggccgagtccatcctgcagtcttgcagggaagtgcttcgggggtcggggttccaatttcaggacgaatgggccaccgtgatctcaggggctgaggaagggatatacgcatgggttgcagcaaattatgctttggggactcttgggggtgatccaaacgacaccactgggattattgaacttggtggggcttctattcaggtgacacttgttactggtgaacctgtgccaccgaagttctctcatatgcttaagtttggtgatgtctcatataacctgtacagccacagttttttgcatcttggtctgaatgtagcatatgaatcactccatgacttgctcagctcacctggccttagatcaatggccacacatttgatttctcaagctaagtacaaagatccttgcactccaaggggatttacacgcatagcaggatcagctaaacttcctgttggtgttcttgagccgaaggttgaatacagaccttttgctcattctgcggggaacttctctgagtgtagatctgcagcactaacactactgcaaaaaggaaatgagggatgtacatatcatgaatgccgccttggagcagcatttgtaccagagttggaagggaaatttttggcgacagaaaacttttaccatacttcaaagttctttggtctgagttcgaagcccttcctttctgatctgatggtggctggggagaaattttgccatggggattggtcgaagattaaaaataagtacagttcttttgatgacggacaactgcttcttttttgcttttcctcagcatatattattgctctactgcatgatacgcttaaaatgccactggatcataaaaggattgatgttgtaaaccaaatccatggcgtgcctgttgactgggcattgggtgctttcattgtgcagacgacgatgaacagaacagacattgtccattctaaggtggagaaaacctcgtctgaagacgatctacgatatggagaaaggcaggtacatcataacaagggtcagccaatgagtcgcgcacatcagcgttgggagtgggtggactttctgcagcggagcactattgaccatgtatgtagattttcctaaattgatttcttacttagtggccaactacctccagcatgttgccttgcggagtcaacttgttgagtttgagcagcaacccctgtatatgatagaaggatgcgggttgccgtggcatttgtgcatgttcagtgttgtatgtaatgttgctaaactgttgttgatgtaattagaattttgtgcatgggcatccatccgatgatgtaatcctgagataaccatgtgtctaatgatcgattgaagttctctgccatggatcatggatggcagggcagctgtatctttgtttcatgtcaaatcactgatgttatgtaatcctaagatattatttctaa

SEQ ID NO: 211900 - DNA, 2076 bp, Zea Mays
cccatgcggaccggaacggtcaattatccctccactgcccgccacaccctatcccccacactcaccctccgcaccggatcccgtcatcacctccgagcggcgcgccgggccggcatccaactcgccgccgacgcgccgcgccccagaacgagccgccggaacgatctccctaacccccgatgcgccgtcctattgcccgcggcgagcccaaggtacaaaccctagctctagctcctccctccgcagccgccccaaccaagatgggcgcccataggcgacaacccagctcccaccgccgcgttgccggcgccctcacgctcctcgccgcgtccgcgctcgcgcttcttctcctagcatcccgccgggttcccccgacctacggcgtcatcatcgacgccggcagcacggggagccgcgtccacgtcctcgcctaccgctccacggcgggactcccgcagctggactgggcacgcatggcctcgatgaaggctaccccagggctatcgtccttcgcggcggacccacgcggcgcggggctgtctctggcgccgctattggagtttgccaggcgccgtgtgccgcgggagagctggggggaaaccgaggtgcggctcatggccactgccgggctgcggctgctcgattccgcagtggccgagtccatcctgcagtcttgcagggaagtgcttcgggggtcggggttccaatttcaggacgaatgggccaccgtgatctcaggggctgaggaagggatatacgcatgggttgcagcaaattatgctttggggactcttgggggtgatccaaacgacaccactgggattattgaacttggtggggcttctattcaggtgacacttgttactggtgaacctgtgccaccgaagttctctcatatgcttaagtttggtgatgtctcatataacctgtacagccacagttttttgcatcttggtctgaatgtagcatatgaatcactccatgacttgctcagctcacctggccttagatcaatggccacacatttgatttctcaagctaagtacaaagatccttgcactccaaggggatttacacgcatagcaggatcagctaaacttcctgttggtgttcttgagccgaaggttgaatacagaccttttgctcattctgcggggaacttctctgagtgtagatctgcagcactaacactactgcaaaaaggaaatgagggatgtacatatcatgaatgccgccttggagcagcatttgtaccagagttggaagggaaatttttggcgacagaaaacttttaccatacttcaaagttctttggtctgagttcgaagcccttcctttctgatctgatggtggctggggagaaattttgccatggggattggtcgaagattaaaaataagattgatgttgtaaaccaaatccatggcgtgcctgttgactgggcattgggtgctttcattgtgcagacgacgatgaacagaacagagtactcagattcatcagtttcatatctaaacagctatgactctcctggcttggttccgcttctgttcattattgtggttgtatttacagcattgtccattctaaggtggagaaaacctcgtctgaagacgatctacgatatggagaaaggcaggtacatcataacaagggtcagccaatgagtcgcgcacatcagcgttgggagtgggtggactttctgcagcggagcactattgaccatgtatgtagattttcctaaattgatttcttacttagtggccaactacctccagcatgttgccttgcggagtcaacttgttgagtttgagcagcaacccctgtatatgatagaaggatgcgggttgccgtggcatttgtgcatgttcagtgttgtatgtaatgttgctaaactgttgttgatgtaattagaattttgtgcatgggcatccatccgatgatgtaatcctgagataaccatgtgtctaatgatcgattgaagttctctgccatggatcatggatggcagggcagctgtatctttgtttcatgtcaaatcactgatgttatgtaatcctaagatattatttctaa

SEQ ID NO: 211901 - DNA, 2076 bp, Zea Mays
cccatgcggaccggaacggtcaattatccctccactgcccgccacaccctatcccccacactcaccctccgcaccggatcccgtcatcacctccgagcggcgcgccgggccggcatccaactcgccgccgacgcgccgcgccccagaacgagccgccggaacgatctccctaacccccgatgcgccgtcctattgcccgcggcgagcccaaggtacaaaccctagctctagctcctccctccgcagccgccccaaccaagatgggcgcccataggcgacaacccagctcccaccgccgcgttgccggcgccctcacgctcctcgccgcgtccgcgctcgcgcttcttctcctagcatcccgccgggttcccccgacctacggcgtcatcatcgacgccggcagcacggggagccgcgtccacgtcctcgcctaccgctccacggcgggactcccgcagctggactgggcacgcatggcctcgatgaaggctaccccagggctatcgtccttcgcggcggacccacgcggcgcggggctgtctctggcgccgctattggagtttgccaggcgccgtgtgccgcgggagagctggggggaaaccgaggtgcggctcatggccactgccgggctgcggctgctcgattccgcagtggccgagtccatcctgcagtcttgcagggaagtgcttcgggggtcggggttccaatttcaggacgaatgggccaccgtgatctcaggggctgaggaagggatatacgcatgggttgcagcaaattatgctttggggactcttgggggtgatccaaacgacaccactgggattattgaacttggtggggcttctattcaggtgacacttgttactggtgaacctgtgccaccgaagttctctcatatgcttaagtttggtgatgtctcatataacctgtacagccacagttttttgcatcttggtctgaatgtagcatatgaatcactccatgacttgctcagctcacctggccttagatcaatggccacacatttgatttctcaagctaagtacaaagatccttgcactccaaggggatttacacgcatagcaggatcagctaaacttcctgttggtgttcttgagccgaaggttgaatacagaccttttgctcattctgcggggaacttctctgagtgtagatctgcagcactaacactactgcaaaaaggaaatgagggatgtacatatcatgaatgccgccttggagcagcatttgtaccagagttggaagggaaatttttggcgacagaaaacttttaccatacttcaaagttctttggtctgagttcgaagcccttcctttctgatctgatggtggctggggagaaattttgccatggggattggtcgaagattaaaaataagtacagttcttttgatgacggacaactgcttcttttttgcttttcctcagcatatattattgctctactgcatgatacgcttaaaatgccactggatcataaaaggattgatgttgtaaaccaaatccatggcgtgcctgttgactgggcattgggtgctttcattgtgcagacgacgatgaacagaacagagtggagaaaacctcgtctgaagacgatctacgatatggagaaaggcaggtacatcataacaagggtcagccaatgagtcgcgcacatcagcgttgggagtgggtggactttctgcagcggagcactattgaccatgtatgtagattttcctaaattgatttcttacttagtggccaactacctccagcatgttgccttgcggagtcaacttgttgagtttgagcagcaacccctgtatatgatagaaggatgcgggttgccgtggcatttgtgcatgttcagtgttgtatgtaatgttgctaaactgttgttgatgtaattagaattttgtgcatgggcatccatccgatgatgtaatcctgagataaccatgtgtctaatgatcgattgaagttctctgccatggatcatggatggcagggcagctgtatctttgtttcatgtcaaatcactgatgttatgtaatcctaagatattatttctaa

SEQ ID NO: 211902 - DNA, 2039 bp, Zea Mays
cccatgcggaccggaacggtcaattatccctccactgcccgccacaccctatcccccacactcaccctccgcaccggatcccgtcatcacctccgagcggcgcgccgggccggcatccaactcgccgccgacgcgccgcgccccagaacgagccgccggaacgatctccctaacccccgatgcgccgtcctattgcccgcggcgagcccaaggtacaaaccctagctctagctcctccctccgcagccgccccaaccaagatgggcgcccataggcgacaacccagctcccaccgccgcgttgccggcgccctcacgctcctcgccgcgtccgcgctcgcgcttcttctcctagcatcccgccgggttcccccgacctacggcgtcatcatcgacgccggcagcacggggagccgcgtccacgtcctcgcctaccgctccacggcgggactcccgcagctggactgggcacgcatggcctcgatgaaggctaccccagggctatcgtccttcgcggcggacccacgcggcgcggggctgtctctggcgccgctattggagtttgccaggcgccgtgtgccgcgggagagctggggggaaaccgaggtgcggctcatggccactgccgggctgcggctgctcgattccgcagtggccgagtccatcctgcagtcttgcagggaagtgcttcgggggtcggggttccaatttcaggacgaatgggccaccgtgatctcaggggctgaggaagggatatacgcatgggttgcagcaaattatgctttggggactcttgggggtgatccaaacgacaccactgggattattgaacttggtggggcttctattcaggtgacacttgttactggtgaacctgtgccaccgaagttctctcatatgcttaagtttggtgatgtctcatataacctgtacagccacagttttttgcatcttggtctgaatgtagcatatgaatcactccatgacttgctcagctcacctggccttagatcaatggccacacatttgatttctcaagctaagtacaaagatccttgcactccaaggggatttacacgcatagcaggatcagctaaacttcctgttggtgttcttgagccgaaggttgaatacagaccttttgctcattctgcggggaacttctctgagtgtagatctgcagcactaacactactgcaaaaaggaaatgagggatgtacatatcatgaatgccgccttggagcagcatttgtaccagagttggaagggaaatttttggcgacagaaaacttttaccatacttcaaagcatatattattgctctactgcatgatacgcttaaaatgccactggatcataaaaggattgatgttgtaaaccaaatccatggcgtgcctgttgactgggcattgggtgctttcattgtgcagacgacgatgaacagaacagagtactcagattcatcagtttcatatctaaacagctatgactctcctggcttggttccgcttctgttcattattgtggttgtatttacagcattgtccattctaaggtggagaaaacctcgtctgaagacgatctacgatatggagaaaggcaggtacatcataacaagggtcagccaatgagtcgcgcacatcagcgttgggagtgggtggactttctgcagcggagcactattgaccatgtatgtagattttcctaaattgatttcttacttagtggccaactacctccagcatgttgccttgcggagtcaacttgttgagtttgagcagcaacccctgtatatgatagaaggatgcgggttgccgtggcatttgtgcatgttcagtgttgtatgtaatgttgctaaactgttgttgatgtaattagaattttgtgcatgggcatccatccgatgatgtaatcctgagataaccatgtgtctaatgatcgattgaagttctctgccatggatcatggatggcagggcagctgtatctttgtttcatgtcaaatcactgatgttatgtaatcctaagatattatttctaa

SEQ ID NO: 211903 - DNA, 1976 bp, Zea Mays
gggataaccagataaaccgttgaagagagtctgagcgggtctcgccaaactgcgccccctctttcaattccttatccgcacagtcacacggtttaatcgaatggcttcgccgtcgtgtttcctcttccgcccccgtccgccgctgtgcagccgccgccgccgcagcagcagcaggtccctctacctcctctccaagcagagcctgcaccgacttccctcaccaagaacatgccgccgtccagtggcagagcagctcgtcctgcggtcgctgccgcccggtaacggcaggcggatgggggcgacgggcttcgcctgctactgttcctacgacaccgagaacggactgcccacgccttcaccggacaagggaaaaagctcggatgagtggccaatccttcgccggtgggatgttccatgggagtggccaacgatttctctcaccatggtggcatgtgcagtaagctttcttttgacagggatagctgagcaatctattttggagcaactaggttttcgagctggggagacaactctagatgagaaagcagagatactcttcttgggacaacttagcacgacggtagttgtacttggagttatatttggcatgaccaatacctttcgaccattctcagatgatatatttcgctatggtaaaggtttggtcttgctacgtttgtgttcattttcatgttcttttttatacattggccacacgttagttcctttccaaagattacctaatttaataagaggactgtacaagatgttaaagtgtaattaaattacttaatatctaatatggatatctgtgttcaatagtgtctctttccgtttgtactatggttgcattgtggtaattcaggttgttctgaacaatggtctagtgttgtttgtattctttaactttcagaattcaatgaaccacttaagctgcaaaacggatggcttctgtggtctgcaatcggcctgtttgttgcaatagttgctattgctttagcaggtgctgcaatgacatttctgaatggtgaaacaccacagagagagacagactcgctggtccttttgttgccgctgattggctcgtcaaacatcagcactgcctgtttgctgggcatcactgggattttggcacccattctggaggaaactgtgtttcgaggatttcttatggtatccctgactatgtggtttcctactccatatgctgtgcttatgactgctgcagtgtttgcctttgctcactttacaccaggagaatttcctcagcttttcgtgcttggtgtggtcttaggattttcatatgctcaaactcgcaaccttctaactcctattgcaatacacgctgtctggaactctggagtaatattgttgctaacttttcttcagatgcaagggtatgatatcagggagattttgcaggcatcttgaagatttaacgcagttagattaatttcatcctgtgttttcttgtgtcagagagggtcttgcaagttacggaactacttgtgctctgctcaaagggacattttcacgaaagtgactattttaagctgaattacggaggcatcggcaaaggtgtagaaactctgttggggttacaacaatggttctcacctacatatagaagatccttgttttcctttgtcttttctatgttagttagatccatttcccttttcccagtggtcatttatctatcagactgggcaaaagcatctcatgactcatgaggctgggcctgggatactatttccatcatcaacataaaagacaaagtttatgtataccagagtcgtcttaatgacggtgtttctgttcacttcgccgtttgtgtatgattgcagagaactgtgactgataggaacatcaagactgtataattaatcagcaaccgtagttggtgtcttacctgtaacgttatttgaaggggtaaaaaattgtttatgttgctatcttttttttttatgattcct

SEQ ID NO: 211904 - DNA, 1647 bp, Zea Mays
gggataaccagataaaccgttgaagagagtctgagcgggtctcgccaaactgcgccccctctttcaattccttatccgcacagtcacacggtttaatcgaatggcttcgccgtcgtgtttcctcttccgcccccgtccgccgctgtgcagccgccgccgccgcagcagcagcaggtccctctacctcctctccaagcagagcctgcaccgacttccctcaccaagaacatgccgccgtccagtggcagagcagctcgtcctgcggtcgctgccgcccggtaacggcaggcggatgggggcgacgggcttcgcctgctactgttcctacgacaccgagaacggactgcccacgccttcaccggacaagggaaaaagctcggatgagtggccaatccttcgccggtgggatgttccatgggagtggccaacgatttctctcaccatggtggcatgtgcagtaagagtgacattacttgccattttctgtttctgcaagtgcagtagcacgacggtagttgtacttggagttatatttggcatgaccaatacctttcgaccattctcagatgatatatttcgctatgaattcaatgaaccacttaagctgcaaaacggatggcttctgtggtctgcaatcggcctgtttgttgcaatagttgctattgctttagcaggtgctgcaatgacatttctgaatggtgaaacaccacagagagagacagactcgctggtccttttgttgccgctgattggctcgtcaaacatcagcactgcctgtttgctgggcatcactgggattttggcacccattctggaggaaactgtgtttcgaggatttcttatggtatccctgactatgtggtttcctactccatatgctgtgcttatgactgctgcagtgtttgcctttgctcactttacaccaggagaatttcctcagcttttcgtgcttggtgtggtcttaggattttcatatgctcaaactcgcaaccttctaactcctattgcaatacacgctgtctggaactctggagtaatattgttgctaacttttcttcagatgcaagggtatgatatcagggagattttgcaggcatcttgaagatttaacgcagttagattaatttcatcctgtgttttcttgtgtcagagagggtcttgcaagttacggaactacttgtgctctgctcaaagggacattttcacgaaagtgactattttaagctgaattacggaggcatcggcaaaggtgtagaaactctgttggggttacaacaatggttctcacctacatatagaagatccttgttttcctttgtcttttctatgttagttagatccatttcccttttcccagtggtcatttatctatcagactgggcaaaagcatctcatgactcatgaggctgggcctgggatactatttccatcatcaacataaaagacaaagtttatgtataccagagtcgtcttaatgacggtgtttctgttcacttcgccgtttgtgtatgattgcagagaactgtgactgataggaacatcaagactgtataattaatcagcaaccgtagttggtgtcttacctgtaacgttatttgaaggggtaaaaaattgtttatgttgctatcttttttttttatgattcct

SEQ ID NO: 211905 - DNA, 1881 bp, Zea Mays
ggtggagttgatcctttcattaaatttgtgagagtgattgaggatgaacatgttatcaatggaaaaccggttgaaattaagagaacgatccctaagggagctgctcctttgaaagatttcaagacgaagaagatttttgttggtggattaccctcagctctaaaagaagatgaattcaaggaattcttttccaagtttgggaaggttgtggagcatgaaatcatccgtgaccatgcaaccaaccggtcacgtggatttggttttatagtctttgatgcagaaaaagcagtagatgatttattacataagaagggcaatatgattgatctaaatggttctcaggtggagatcaagaaggcagaaccaaagaaaccctctaaccaaccacctcgttcacttgatagtgagcctaggggccgtccatatgcagacagttatgatggatttggcagctcttacaattatggtggtagttttggtccctatagatcacctcgaagttttggcgctaggcctagcagctacagtagtgcttatggtcctggtgattatggtagtggctatgctacttatggtggagcattagtaggataccgtgaaccttccctttattctagtcgctatggtagcacttatggaggcagccttggtggtgggtatggtggtgttagttatgatggtggattagctggtgcatatgagcgtgatgctgggggctatggtggttctagctatggtcgtagttatgactcttcctgggctaatactggtgatgggtttggcaccggtggactctatggtgctaggacaggctatggtggcagtggcggcagtggtgctgctggtcgttaccatccatatggaagatagaaaatctccagtgctgctgtttgctagagaagcttgcagaagatgaattctagatgtgtgctcaagagatcatctgcatctaaaagatgcactgaagttcaatatgctcagttttctgtattaggaagtactgttagatcaacttgtagaaatttaaacctttgttttggtatttggaattggaatttaagcatatttgataagcgtatgcacttttatagatagaaaatctagtgacccgtcaaaactagctgctagtacaagcatgagttattctttgttagtatagtttgctttgtctttacgaatattatggagtggtcaaagttaacctaagggccgaacgcagtttctttacatgtagttacagaagtgttatcttgtttctttatcttgttccgcgtaggttttgtttggagttcgatggattaagttgtacttagaactagattggtctttttatagtggttcgcatgctttcaccgtttaacatgccgatgttgttttccccattcattatgtaatcggtgatcttgatatcatcacgctggtaattacatcttaattacatttgggtagcatcatcgttctacatcagttcaggcagctctgagggctcatttggccatcttccgctaagaggcactgtgcgatactgtaacgtatagggctttttctctgcactgggtaaaatggattggggaagcagagctgttctgtagaaagacattcattcggatcgaaggatctaattctgttgcattgtcagaattcatgtgttatgactggaaagggctacaatagaaggactaaggatggccaggggcaatccgcctaatagggacaatctgttaggatattgtgttaggatattgtgcagcccggtttgtttggataaagtcctagtcattagatattattagttgttagatctcatatctagggggattctgtaggggccggcgtctttaaaaccaaggcctttgtaattaatagtcaagcaagaagtaa

SEQ ID NO: 211906 - DNA, 1987 bp, Zea Mays
aaatttgtgaggtacattcaaagaacattttgggaagtatggggatataattgatgctgtcataatgaaggaccgctacacacaaaagcccagaggctttggctttattacttttgctgatcccactgttgttgacagagtgattgaggatgaacatgttatcaatggaaaaccggttgaaattaagagaacgatccctaagggagctgctcctttgaaagatttcaagacgaagaagatttttgttggtggattaccctcagctctaaaagaagatgaattcaaggaattcttttccaagtttgggaaggttgtggagcatgaaatcatccgtgaccatgcaaccaaccggtcacgtggatttggttttatagtctttgatgcagaaaaagcagtagatgatttattacataagaagggcaatatgattgatctaaatggttctcaggtggagatcaagaaggcagaaccaaagaaaccctctaaccaaccacctcgttcacttgatagtgagcctaggggccgtccatatgcagacagttatgatggatttggcagctcttacaattatggtggtagttttggtccctatagatcacctcgaagttttggcgctaggcctagcagctacagtagtgcttatggtcctggtgattatggtagtggctatgctacttatggtggagcattagtaggataccgtgaaccttccctttattctagtcgctatggtagcacttatggaggcagccttggtggtgggtatggtggtgttagttatgatggtggattagctggtgcatatgagcgtgatgctgggggctatggtggttctagctatggtcgtagttatgactcttcctgggctaatactggtgatgggtttggcaccggtggactctatggtgctaggacaggctatggtggcagtggcggcagtggtgctgctggtcgttaccatccatatggaagatagaaaatctccagtgctgctgtttgctagagaagcttgcagaagatgaattctagatgtgtgctcaagagatcatctgcatctaaaagatgcactgaagttcaatatgctcagttttctgtattaggaagtactgttagatcaacttgtagaaatttaaacctttgttttggtatttggaattggaatttaagcatatttgataagcgtatgcacttttatagatagaaaatctagtgacccgtcaaaactagctgctagtacaagcatgagttattctttgttagtatagtttgctttgtctttacgaatattatggagtggtcaaagttaacctaagggccgaacgcagtttctttacatgtagttacagaagtgttatcttgtttctttatcttgttccgcgtaggttttgtttggagttcgatggattaagttgtacttagaactagattggtctttttatagtggttcgcatgctttcaccgtttaacatgccgatgttgttttccccattcattatgtaatcggtgatcttgatatcatcacgctggtaattacatcttaattacatttgggtagcatcatcgttctacatcagttcaggcagctctgagggctcatttggccatcttccgctaagaggcactgtgcgatactgtaacgtatagggctttttctctgcactgggtaaaatggattggggaagcagagctgttctgtagaaagacattcattcggatcgaaggatctaattctgttgcattgtcagaattcatgtgttatgactggaaagggctacaatagaaggactaaggatggccaggggcaatccgcctaatagggacaatctgttaggatattgtgttaggatattgtgcagcccggtttgtttggataaagtcctagtcattagatattattagttgttagatctcatatctagggggattctgtaggggccggcgtctttaaaaccaaggcctttgtaattaatagtcaagcaagaagtaa

SEQ ID NO: 211907 - DNA, 2724 bp, Zea Mays
cccgtttcacgaatcttcggatgcccagatccggctctcctcttcccacctcctcttcactgtctactactgccgctagccgcgcctgcttgctgcttccccctctctttttctctcgtctccattccagcatcgccaccaccagtccaccattccagcatcatcaccaccacccgagacaaaaaaataaaaaaaacccaacaacactgtaacgagaatatacggcaaaaccctagatctctctctcctctcggcattgctggctggggtgtgcggcggcccgcagtggtgagggacgcacggcgatggcctccgccgccgccgtcatcgcctcgccggcccccggcgccgccgcggccgagcccgccgcctggctcgtcgacgagcgcgacggcttcatcacctggctgcgcggcgagttcgccgccgccaacgccatcgtcgaccacctcatcttccacctccgctccatcagcgagccgggcgagtacgaccacgtcttctctctcgtccagcagcgccgccaccactggccgcacgtgatccacatgcagcagttcttccccgtcagcgacatcgccttcgcgctccagcaagccagctggcgccgccacgcgccgccggcccaggcgctcggggctggcgcgtcgccggccgcgctcccgccgccgcctcctcgccgcgcctcgttctcgcagtcccatcactcccaccagcaccatcgccacggcgcccactaccgccccgatccagcgcgcggcgccgccactgcggcgactggatccgagaaagatggacgtgaagttcataataacaaggaagggagggggctgaaagaagcggggaatgtcgtcgatactaaaagtttgcggttggattctcctataactgatgaaggtgaggaaaaatcaaagctgcaagctgtttctgaagaaagtagcaaaatggttgcaacccctgtagagtattcaaccaatgagatcattgatggcagcatggttaatactgttgaagggctcaaggtttatgaaggattactaaatgtaaccgaggcaaataagatcctttccttagtcaatgaaacaagagcctcttaccggcgaggggggcttgaagctagacagaaggttattattgctaaaagaccaatgaagggtcatggacgggaaattgttcagctgggtgttcctattattgatggccctcctgatgatgaaaatctaagagagacaagggtggaggcgattcctgggctgctgaatgatctgtttgatcgcttgtctcagcaggaaattatacccttcaagccagattattgtgtcattgacatcttcaatgagggagactattctcatcctcaccaatccccttcttggtatggtagacctctttgtaccctctgcttaacagattgtgatatggtgtttggccgttatatatcaggagaaaaaggcgatcatagaggtcctctgaagctctcgctcgcaactgggtcacttctactcatgcaagggagaagtattgactgtgcaaagcgagctattcctgctacacgcaagcagagagtcatactgaattttggaaagtccgtagcaagaaagcacatcccagctgaaagtgcctggtctactccattaacacctcctatgccctggggtcagtcatcaaggccagttaacggctcccgccatccccaaagtcctaaacactatgggtatgctccaatcagcggtgtacttccagcaccaccagttggagctcatcacgtcccaccgtctgatgggatgcagccactatttgtagcccctgctcctatttctgctgcagccatacctttcacgccaactgttcccttgcaaaatacatcagctgcttggatacaagaagttactccaaggcctgctccgccacgattccctggtcctggtacgggggtcttccttcctccgggatcaggccaccctctgcctcatcagatgatgccggcttctcatggccatggcgaacccaactctccacaaggttcatccgcttacctgcatagtaaggtcaatggcaaggagacatctaatggcaatctttctcctaagaactcgccgagaaagacatcttgcacagccgaggagaaaccagaatgcaatgggagcttaaatggtggtggcggctctgcggatgagaagtcaactgtaggtatggagcagcagaatggtgttcagaagaatgttgggagtagcaaggtccagccacatggacatgcaactgaatagagtgggacttatagtacatagacaacagaaaactgaagagacgaggagttgaattttgggccgtgaatttgcggtagtgcgcagagctcagcagaggtctttgctggcactctcttgtccctgacaagaatcatcgtgtcaagttctcgagacggaaaacatttgtcctaaactttgtagctgcactgttgcaaatctagattatcgacattgcctcgggttatcatctgctatcagagtcgtgggcagtgaaaaccatttctgatggtttatgttgcccaaatattatcgacctagtacatctgaaatgggaaaaaatgtggacgaaatttcttgcatcgaactctcttgtgatcgactggcctttgatgcatctgtagcagactacttatggtagactgttacttgctgatagatggttctgctacaggacgtgggcaaagcatatggatttatg

SEQ ID NO: 211908 - DNA, 2354 bp, Zea Mays
gtcaatttaaccggcccggcccataatcccttgtaagagaggattttgctaggtttttgcccccaaccgcccaactgcgcgtgctcctgccgacctcccacccctccactcccctgcggttggcggctgtctcgccgaagcgacccagccggcgcagccgatatggcgaagggcgacgacgcgctggcgcggaagcgcaaccgtgtgcgccgcaagcgcctccgtagcagcgagaacgctgtttccgcgcgtgtcgcggcgatcatcgcctccaagcaccgccgcaagtcggggaagcgccgcgcctgcgagggcatgtgcttctcgctccccacgcccgacgacccgttcaacgagcgccatggcaggaagcacaagctcgatgacgagccggccgacgacacagccgccgacgccgctgaggacagcggcaaccccaagaagaagggcgcgaacaccaaaaagcagcagccggtggcaaagtatggcgccgaggcgaagtcgaaggcggttcgcgagagggagacgggtgcggaggtggtccgcggggacttcgaccggccgtccaagttcctggtggtctgtctcaacgctatccgggatgcggtggcgcccgaggaaggcggtggcagcatccacggcgccggcgactggggcgtggagctctggcggtgctgctccgcccaggcgccgtccgacgtgctcgacgctagcggcgcgtgcgccacggtggcgcagaccgcgtggctcgtctccaccgcctgcgacatcgtcgctaggaaagagaggcatgggatggtcgtgtcttgccccttcctgctgtacctcgtctcgtcgcaggataaggccgcgcaggtgcgatcgatatgcaaacccctgaagcctcttgggattcattcagtgagcttgcatcctggcgcatccattgaacaccagatctctggactgaaaacttgtgagccggagtttcttattgctacccccgagaggcttcttgaacttgtttcgttaaaggcgattgacatatcaggtgtatcaatgttggtaagtgaacgtggtaatcggagtgaaaggcttgatgaactgtgtcattctgattgtgactatgaaagtggtgttctatgtaattgcacattgcaaaccgtgaatttgcaacaagttattcatcatggttcttagtgtgcttagttgttctagtttctgtattgcttttctccatatagttatcaatcctgctaccgagcttcagctaaagatgacaacttcaattggcaggtcattgatggactgaaatgtttcgtagaccacaatgttagtgacaaaatattttctattagagacgccatatcaaacaatcttcagattactatcttcaccgatccatctgataaaaatattgcaacaatggctaaaaatctactccgtggaagaattacaaagctttctatcaatgattctgtttcttcacgaagtgcatttatagcccagcatgtacacttctgtccatcggaggagctgaaaacaacaaaggttaaggaaattcttgagcagatattgcaagatcatcctaaaaagacatcaaaggtgcttctagtagctgcaagcgataaaaaagcacggctcatgtcactgtcgctgaagctggaaaattgcacagtgattgatgactcatgtggcaactcctttacaatatgcagcagtgtggggctgatgaatgtcattgtgaaagaccgggagaacatgtcagtgacagatgtagaggcatttgaaaccgtgctggtggtggatctgcctccttcagtcgacgaatacattgagatcctcactggggctgctcttcatgtgattggaggcgaagtgcatagcatattctgtaacactgatgcttctgttgcaaaacctctggctcagcttcttgcagactgcggtcaggtggtgcctgaattcctcaaaagcctgaagtcttcatagcagagacttgtgtacgcaatcagagtagtcagatcacaccgtggcgattcagatcatatcggagcagtgtgtgttctacatgttattctcatttatcagcacagcattggtattcaggcctcgtccttggtatgtactattatgtcgtgcattgtgaaatgtgaatgccttgaggcccttttcctgggagttgtttattgtcaattgtgtcaaaggaactgagtcagtcatccctttgctccctccccagcttcctttgtccaaaggcaagcagaaacagggacctccactgagagatcttggcaccttcaaagtgcatcaaccaaaatgtcaaagacacagcttcttttaatcaagttatttttcacatctttacagcacct

SEQ ID NO: 211909 - DNA, 543 bp, Zea Mays
gtacaccaagaagcgcgcgagcggaccgaagtgcccagtcaccgggaagaagatccaaggaattccacacctgagacctgctgagtacaagaggtccaggttggcaaggaaccaaaggactgtgaatcgtccatatggtggtgttctgtctggtactgcagttagggagaggatcatccgtgcctttttggtcgaggaacagaagatagtgaagaaggtgttgaagatccaaaagaccaaggataaggcctccaagagctagacgatataggccacaatgtttgagtccattcgaatttatttcagcaggaaaatttctcgcgggtatggggaatcttggtacttatgctagtagtatgtgagatgggtgtggtttaaattttgagcgtaagttgagttctgttaacttgttaagttcggtggaatgttttaaactatgtggatgtcagattttgttaatgtttgcgcagtttgccccaattttggccttcattacgtacataacggtgatcataacattaaatttctttaggactacttagg

SEQ ID NO: 211910 - DNA, 883 bp, Zea Mays
tattgaagtccattctgttggcatcgtcccatctcccttgaaccctttcgcccacaccacagcaccgctgccgaaggtgggaaagaaggcggcggcggaggcaccggcaccggcaccgcctaggaaaggaaaccgaggaaactacagccatggtggtacggatccgtctggcgcggttcgggtgccggaatcggcccttctaccgggtgatggccgccgatagccgctcccctcgagacggcaagcacctcgaggtcctcggctactataacccgctcccagggaaggatggaggcaagaggatgggcctgaaattcgaccgggtgaagtattggctgtcagttggggcacagccatcagatcctgtgcagagtattctctttcgtgccggacttctgccaccacctccattgctagctatggcacggaagggtgggccacgtgataggcgccccattcatccaatgactgggcgccctctggatctcgagggtgtcgcaattattgataattccaatgctcctgaaggcgatactgaagtgcctacagatgaggtggctcaataagccttttgtattagcatagcatatgtagcggtgctgcaaaagaaaacttgtttgatgtgcttgtggcaagactttgggtactcgtacaatgtggcaaacttttaaacagtgcagtgcagcatcctttcgcggtctggagtctcctgcgggagtcattggtcaaggtctcggggagatggatggcgatggcgccagtcagagacgaaattcagggatcatgtgctcagagagtggctcaattgacttgatccggataagcacaatggcgatgaagtttttagtcgaatttgtttgcagaggtagtgtttcgttgatgg

SEQ ID NO: 211911 - DNA, 2841 bp, Zea Mays
cctcgcctccctccttccatgggagcttggaagctgctggatctctgcaagtgactatgagccagagttttgacatcaacgtacttcgtgaagaagcaaggagtcggtggttaaagccttctgaagtgtactatatcttgcagaatcacgagaggttcccgatcacccatgaggcaccaaagaagccgcccagtggttccctattcctttacaatcgtcgtgtcaatcgttatttccggagagatggtcacacatggcggcggaagaaggatggaagaactgttggagaggctcatgaacgactgaaggttggaaatgttgatgctttgagctgctattacgctcacggggagcaaaatccaagtttccagagacggtgtttctggatgctggaacctgcatacgaacacattgtgctggtacaatatagagaggttgatgtggttagaaattattcatcacaactgtcaaatggcctcccagaacctctttcatccttgggatatccaaatgccatctgtggaaaccaataccacagctcctcttctggcgctagcgagtgtagtgagtcccatcagagctattctaatttgagttctgtaactgaagtaagttcctattccggtaacaaagagtacaccaaaaatgatggcggtttactgagcataccggaggttggacacacttgtctgcaacaaaatcggactgataatggtaactcgaaaaataaatctgggcttaatattgctttaaagaagatagctgagcagttaagtttgggtgaagatgatgatgactatattttctcaaatcaagctcattctgtgggaggcgacaaccaagtaaaacatattcaacaagaaggaacacagaaaggtttaagtaggaatatagcgccatcatgggaagatgtactgcagtccagttcaggtttaccaatttcatccatataccagcaatcggatgtcgagtatcagaaaaattcagaataccatccaccagaacgcctggacagcagtgatttacgcatacaacttgctgctgctaaaaagtttcttttaggaccagaagccaccgttgactcaccatctttgaactctgtgctgagaaatagagcgaactgtgtaactgatactatttcagcttatgacagtagatttggaagctctctgaacccagattggcaaacaaaaacagcattaacatttcaaagcaattctcagggctctgaaataacggagttgtttgaccatggtcattttgaacactactccagagaagatacaacattttctttaggacagacaaacaagtttaatattcgtgagatctctccagaatgggcattttcatatgagatcaccaaggtcatcattactggagattttctatgtaatccatcgaatttgggttgggctgtgatgtttggtgatagtgaggtacctgctaaagtagtccagccaggtgttcttctctgccacacgccactgcactgcagtggaaatctcagaatctgcattacttcgggaaacagagaagtttgcagtgaattcaaagactttgagttccgctcaaaaccctcttctagtttcacagacatcgcaccatcttctagacatctgaaatccagtgaagagttactaattcttgcaaaatttgctagaatgcttttgtctgggaatggaaaccctgaagttccagatggtgatccccaatctggacagtgtccaaaacttaagatggatgaagggctctgggataggttgattgaagaactcaaagtagggtgtgaaagtccattaagctcggttgattggattttggaggaactgctgaaaagtaaattacaaaagtggttatctgtgaagctcagaggattcaatggaacggattctatatccaagcatgaccagggtattatacacttaatctctgccctaggctatgagtgggcattgtcttcagttctcagtgttggtgttggtctaaattttcgtgattcaaatggatggactgctcttcattgggctgcttattttggaagctgttcattcagaagaaatacaaaggttgcaaaggtcgcaacatttctcaacatgagaagaaatgcagttaaaatacaggctcatgtaagaggccatcaagtgagaaagaaatacagaacaattgtaagcactgtcagtgtgctagagaaagtaatacttaggtggcgccgtaaaggtcatggcctccgtggcttccgagctgagcagcaatcaatggtcgaagcaatagaggaagatgatgaggaggatgatgacttcgatgatgacgaagcagtcaagatctttcgccggcagaaggtcgatcaagctgtaaaggaggctgtgtcaagagtgttgtccatggtagactctacagaagcgaggatgcaataccggcgaatgcttgaggaatttcgccaggcaactaattggaaggatcaaatgaagtaacatcaatatttgacagtgatttagagttattacttattagggatcaacgacttcatgtaaggagcatttatgtctcgagatctgccagcacccatcaatgacataaattaagtatttagggaatgtgttccagttgctactaattggccgtctaattgtacagtgttagcgaaatcgaaagtagattatttctgccacgatgtattttcactttctgtatttaggtatattttgacaatggcagatcaattaagtatattttttatgggttgttggcttcgccagtttggaaaaaatcagtttctcaacaatggcagaacttcataatgctgttaaaaaaaagacagcatgagacattgtattaaaa

SEQ ID NO: 211912 - DNA, 2701 bp, Zea Mays
atggggtttaatagaatattaactaacggtgcacctatcggcttattctttggtggttccctattcctttacaatcgtcgtgtcaatcgttatttccggagagatggtcacacatggcggcggaagaaggatggaagaactgttggagaggctcatgaacgactgaaggttggaaatgttgatgctttgagctgctattacgctcacggggagcaaaatccaagtttccagagacggtgtttctggatgctggaacctgcatacgaacacattgtgctggtacaatatagagaggttgatgtggttagaaattattcatcacaactgtcaaatggcctcccagaacctctttcatccttgggatatccaaatgccatctgtggaaaccaataccacagctcctcttctggcgctagcgagtgtagtgagtcccatcagagctattctaatttgagttctgtaactgaagtaagttcctattccggtaacaaagagtacaccaaaaatgatggcggtttactgagcataccggaggttggacacacttgtctgcaacaaaatcggactgataatggtaactcgaaaaataaatctgggcttaatattgctttaaagaagatagctgagcagttaagtttgggtgaagatgatgatgactatattttctcaaatcaagctcattctgtgggaggcgacaaccaagtaaaacatattcaacaagaaggaacacagaaaggtttaagtaggaatatagcgccatcatgggaagatgtactgcagtccagttcaggtttaccaatttcatccatataccagcaatcggatgtcgagtatcagaaaaattcagaataccatccaccagaacgcctggacagcagtgatttacgcatacaacttgctgctgctaaaaagtttcttttaggaccagaagccaccgttgactcaccatctttgaactctgtgctgagaaatagagcgaactgtgtaactgatactatttcagcttatgacagtagatttggaagctctctgaacccagattggcaaacaaaaacagcattaacatttcaaagcaattctcagggctctgaaataacggagttgtttgaccatggtcattttgaacactactccagagaagatacaacattttctttaggacagacaaacaagtttaatattcgtgagatctctccagaatgggcattttcatatgagatcaccaaggtcatcattactggagattttctatgtaatccatcgaatttgggttgggctgtgatgtttggtgatagtgaggtacctgctaaagtagtccagccaggtgttcttctctgccacacgccactgcactgcagtggaaatctcagaatctgcattacttcgggaaacagagaagtttgcagtgaattcaaagactttgagttccgctcaaaaccctcttctagtttcacagacatcgcaccatcttctagacatctgaaatccagtgaagagttactaattcttgcaaaatttgctagaatgcttttgtctgggaatggaaaccctgaagttccagatggtgatccccaatctggacagtgtccaaaacttaagatggatgaagggctctgggataggttgattgaagaactcaaagtagggtgtgaaagtccattaagctcggttgattggattttggaggaactgctgaaaagtaaattacaaaagtggttatctgtgaagctcagaggattcaatggaacggattctatatccaagcatgaccagggtattatacacttaatctctgccctaggctatgagtgggcattgtcttcagttctcagtgttggtgttggtctaaattttcgtgattcaaatggatggactgctcttcattgggctgcttattttggaagctgttcattcagaagaaatacaaaggttgcaaaggtcgcaacatttctcaacatgagaagaaatgcagttaaaatacaggctcatgtaagaggccatcaagtgagaaagaaatacagaacaattgtaagcactgtcagtgtgctagagaaagtaatacttaggtggcgccgtaaaggtcatggcctccgtggcttccgagctgagcagcaatcaatggtcgaagcaatagaggaagatgatgaggaggatgatgacttcgatgatgacgaagcagtcaagatctttcgccggcagaaggtcgatcaagctgtaaaggaggctgtgtcaagagtgttgtccatggtagactctacagaagcgaggatgcaataccggcgaatgcttgaggaatttcgccaggcaactaattggaaggatcaaatgaagtaacatcaatatttgacagtgatttagagttattacttattagggatcaacgacttcatgtaaggagcatttatgtctcgagatctgccagcacccatcaatgacataaattaagtatttagggaatgtgttccagttgctactaattggccgtctaattgtacagtgttagcgaaatcgaaagtagattatttctgccacgatgtattttcactttctgtatttaggtatattttgacaatggcagatcaattaagtatattttttatgggttgttggcttcgccagtttggaaaaaatcagtttctcaacaatggcagaacttcataatgctgttaaaaaaaagacagcatgagacattgtattaaaa

SEQ ID NO: 211913 - DNA, 1839 bp, Zea Mays
tgaccgcccttgacgtgtcccacggaccacagcgacccacccacccagcgggggcggcgtcaggcgtgtgccatcaaccaagcttgaaacttcttcccttctctttcccttctcctcccgccgccctcgcgctctcgcttcctctccacgaccgtcacaaccaccgccaccgccacctcctcgcgcgggggcaactgtgaggtgagggcgaggcggggcgatgctggcgtggaaggagaaggtggcggaccgtctcgcccgcctgctcgccgactcccctgtctctccctcccctgctcaggccgccgtcgagccatcgcaggctaaatcttttccaccagaacattttactccccccaagacatcatcattatcttcgtatgtattttcccttctaccaacctcaaacacagggcatgagcagaattcaccttgttcagagactttgagaccattacctcctgaatcacttcctaaaaaatggagatggagtgatgtaacttggaaagatcctcccgtggaattgagtgaggagtctgggtctgaaagtgatagagatgaaaggaatgggaattttggtaacgacccagtccttcagtcatataggcccataaataactcaaatggcaatgaggaaacatcgacttcagattgtgtgggcactcttcgttatctaactgaaaagtctatgtttgtgtctccaaaactatttgcattctttcaatcttctctccctgggactttgaaggggtgccactgggtattgctatatagcacagcacctggaagcatgggatatctctgagaacacttcttcgtagaagtgagaatattcagggtccatgcctattgattgttggagatatgcaaggggctgtgtttggtggcttattgaacagtcctctgcggcccacagagaaaaggaaatatcagggaacaaaccagacgtttgtgttcacaacaatacatggtgaacctagacttttcagaccaactgattctactatttgtgcttgaataatgctttagcatttggaggtggtggaagcttcgcattgtgtgttgatgaagatctgttacatggaagcagtggatcatgtgagacatttggaaactcatgtttggcatatagtccagagtttgaactaaagaatgtggagttatggggattcacacattcatggagccgatcgacataaccgatgctagttgtcttcatttgtgacctggcaacagatggaaaggggcatgaaaatgctaggtggaactgttaggggaattcactgtcacttggggctggtttggtttcaagggaattggaggggattcaccaaaccagccctcggagatttgtactcccagttctcttgtttggcttgtggattgaattaaatattgagagctggacaaggaattcatatccttctgtttggtgagtgggatttggagtggtgccgtaagtcatgatgcgcacacatcttccacttaatgcccaatcaccacctatctctgtctaaacttctcatcacgtcaatattttcaaacccattaaacccttgtctcgaatctttccatttcctcccaccaattacctctaaccacacacaacgtggttaatccactgtacatgatcattgtaatgtctagtattcattcacttgattaacacatttcatatttgtacatgcctctctgttcagtgtaattactttgaatcaacttgccttcttggagccgtgtgcctgaagtgcattcttcagcatggaaaaaaactgtgatgatagatattaaaacgaagtattgtgtgttattcagtgaattcatgcatatctgttactg

SEQ ID NO: 211914 - DNA, 1191 bp, Zea Mays
tgaccgcccttgacgtgtcccacggaccacagcgacccacccacccagcgggggcggcgtcaggcgtgtgccatcaaccaagcttgaaacttcttcccttctctttcccttctcctcccgccgccctcgcgctctcgcttcctctccacgaccgtcacaaccaccgccaccgccacctcctcgcgcgggggcaactgtgaggtgagggcgaggcggggcgatgctggcgtggaaggagaaggtggcggaccgtctcgcccgcctgctcgccgactcccctgtctctccctcccctgctcaggccgccgtcgagccatcgcaggctaaatcttttccaccagaacattttactccccccaagacatcatcattatcttcgtatgtattttcccttctaccaacctcaaacacagggcatgagcagaattcaccttgttcagagactttgagaccattacctcctgaatcacttcctaaaaaatggagatggagtgatgtaacttggaaagatcctcccgtggaattgagtgaggagtctgggtctgaaagtgatagagatgaaaggaatgggaattttggtaacgacccagtccttcagtcatataggcccataaataactcaaatggcaatgaggaaacatcgacttcagattgtgtgggcactcttcgttatctaactgaaaagtctatgtttgtgtctccaaaactatttgcattctttcaatcttctctccctgggactttgaaggggtgccactgggtattgctatatagcacagcacctggaagcatgggatatctctgagaacacttcttcgtagaagtgagaatattcagggtccatgcctattgattgttggagatatgcaaggggctgtgtttggtggcttattgaacagtcctctgcggcccacagagaaaaggaaatatcagggaacaaaccagacgtttgtgttcacaacaatacatggtgaacctagacttttcagaccaactggtgcaaacagattctactatttgtgcttgaataatgctttagcatttggaggtggtggaagcttcgcattgtgtgttgatgaagatctgttacatggaagcagtggatcatgtgagacatttggaaactcatgtttggcatatagtccagagtttgaactaaagaatgtggaggagattcagcttcggaataga

SEQ ID NO: 211915 - DNA, 2625 bp, Zea Mays
ctcccgaagacagagccaggccgccaaattaaacttgaccatttcctctctctctttctctctaactccgggtccctctctcttactctctctattctctccatccttgcttctgggaagctcatcagccatggacgatgccgctgcagaggaagaagcttccattcgcgcacaaaaaagctaggtgcttcggcttcctttcgcgcccaattggaggcgagacacaccccgaaataaaaaaaagatgagaattcgatgcgacaaacaagctcaaatgcttggtcggtgtccttttgaaggttcgagaccagccatgtcctcggcgccctgctggcctcctcgccgttgctggcgcgcgcctgggaccgctgcacagccgcctccgctgcagcgccgtggttcgttcacggcgaagacggcggcaaggtgtacgtggggttctctggggtgcaggctgcgcttacggcggcaggcgcggcggtggccggcggcggcgccgacatcttcgcgccggtgagtctcggcggggacgcggcggggcggatgttcgcgccgctggtcgccgccgagcccgacccggccgctaccggggagccggttgccgtgcaggcgctggcgctgcagtgcttcctgaaactctgctgcagtcctgatttccagatgcttctgaatcagatcaggggcaaggcagtcgtgttcacgggccactcccttggtggcgccgttgcggccctcacggcgctacactacctctgcatctcatcgtcaagctcgccacctgctcctcctgtcctgtgcgtcacctttggaagcccattacttggcaacgaggcgctgtccagggccatcctgcgtgagcactggggtggtaacttctgccacgtagtctcacagcacgatgtcgtcccaaggctcctcttctgctccccggacgccgtacccgcgcacatcattgttggaatgcaactgcagcaatggccggcgtggactcggcacacaggagctgtgagcacggtcaccgcgcacatggcggacactgacaaagacgtgctccggcagctgatacagacgcacgttggcgctgtggccgtggaacagaagcttgccgcttctgagacgacaggtgggagcccgtaccggccgtttgggacgtacgtgctgtgctccccagaaggcgcggcgtgcgtggacaacccgaccgccgcggtacagatgctgtacgccaccttcgcctctcagagctcagccggtgcagagtccccggaggccgcgcactcctgctacggcgagctcgtgctgaaaatgccgcaccacttgcttctcaagagatggctgcgtgtggacgacgacatgccggcgacgcccaactacgacgacggcgtctccctcgcgttggaggcctctggcatcgacgtcatggccatggaggcgtcgacggcgcggcattggctgaaaacatcaaagcgggcagggcggcggccgagcctgaactgcgctcgcctggcgacgcagctgggccgggtcacgccgtgccgtgcacagatagaatggtacaaggcgctgttcgacgcagagatggggtactacgacgcgttcaagcagcggcggtcgcccaggaagtacaccaaggtgaacttaaaccgcatcaagctgggccagttctgggaccgagtgctgagcatgctcgacgccggccagctcccccacgatttccaccgccgcgccaagtgggtcaacgcctcccgcttctaccagctcctcgtcgagcctctcgacattgccgactaccatcgacacggccaccacctgacgagcgggagctacatgactcacggccgggagaggaggtacgagctgttcgacaggtggtggcatgagaagggatgcactggcgctggcggtggcatcacgtcctccatgtcggcagcgtcggcgagcagccggagacgcagcaaatacgccgggctaacgcaggacccgtgcttctgggcgagagtggaggaggcgagggagcagacggagagcgcacgccgcgagcgcgacgtggccgaactggcgatgaagctggaggagctgcaagagttcgagcgctactcccgtgagctggtggcgaccaaggaggtgtccgtcgacgtgctcgcgccgcagtcgagctacacgctgtgggtggaggattggaaccagctcaagctcagggctcagggatgatgtgaggacaatgttgcttcggttttgagctgggctgcaaacagatgatgaattcgtaggtagctggtgggcgttctacaaatagttcaggtgtaaatgaatcattggatcatggtgctagtatatgtgatggtaaatatatccaaacctatagaagcgctgcagtggattacagtattgttgtggttctcgtcgaaattctgaaaaaacgataatatgacaataccaattagttttaaaatcctccttttcttcgaagagttctgaggaaaaaacgaataaaatgctattttcaccgatcaatagtcctgaagttcatcgttttcgatatgcgtgaatataaatcatgacacagcttcaaaatattcttctctcctttgaaggtgtcaaaggggagaatgatgatttacttgtgtg

SEQ ID NO: 211916 - DNA, 2250 bp, Zea Mays
ctctttccaaccttgccgggtcgttgccaaatgccaacgcaggcgccgggcagtgcacgcacatggctgcgcgcgtgggcctgctcccgcacgcgatcctcgtctcctcccgagctctacccacgccccgagctcgcgtcccttatcctcttccacccgtcccttcctacctccgccacgcctcctcctccgcctcccgctcctgccgcgcgtcgccgcgttttgtcgcagtccgcgccatggcttcggggaacccctacgccgccgagctcgccgccgccaagaaggccgtcaccctcgccgccaaactctgccagacagttcaacaggatattatgcattctggcgttcaggctaaggcagacaaaagtcctgtcacagtggctgattatggatctcaaatattggtcggtttttccttaaagatggatgtatcatctggaccattttcattggtggctgaagagatgaattgagaaaagatggcgctgaagaaattttggaagatattactgaccttgtcaatgaaaccatctttgatgatggttcatataacatttcgtttacaaaggaaggtatactctctgcaattgatgatgggaagtctgagggaggtccatctggacgacattgggtgcttgatccgattgacggtactaaaggtttcttgaggggcgaccaatatgccattgcattggctctgcttgatgaaggtaaagttgttttgggtgtattggcttgtccaaatcttccattgtcatcaataaacaacatcaatggtaactcttcgggagataaagttggtgccctgttttctgctacaattggttgtggggctcaagtagagtccttagatggctctccaccacaaaagattagtgtttgctccatcgacaatcctgtcaatgcatcattttttgaatcctatgaaagtgcacactccatgcatgatttgactggctctattgcagagaaacttggtgtccaagctcctccagttagaatcgacagccaagcaaaatatggtgctctggcccgaggtgatggcgccatttacttgcgctttccacacaaaggttatagagagaaaatatgggaccatgcagcaggatcaattgtcgtgacagaagctggaggcatagtaacagatgctgcgggaaacgacttggatttctccaaagggagatttctggatctcgacacaggcatcatcgcaaccaacaaggagttgatgccgtcgctcctgaaagctgtccaagaggctattaaagagacgaaccaggctgcctccctcttatagctgttgtagtggtcgacaaaaaagtagttgcaaaattttcgtactggcaaacagcattgctagaagtggacaacatgaataatttgagtgagtccatagttgcctgaactcagctttggcatttgaactggttatagaaattgtgaaataattaatggatatttggaagacaaacttgaacttcagttggaatccaaatgtagcatacaaagtctgtaaaaacaagaatcccgaaacatgaaatgcatcgtgtctgaaaatgacccaaatatatttttactaattttcatgacctgtcctaggcatcatcaagacaggcgagcgcttggtgccggtgctcttaaaggccatccaagaggttatcaaggagaaagttgagcagtcgtaatgatgaacagaaattttagttgcacgtgtgacttacatatttcagctgtaccacttttgatcagacacgttcccagtgggtgcttagcagataacagttcttttactgaatactgtaaaagcctttttttttcaaaaataaactaggtttcctccgttttctttctagtgtaaaatctgtttacatcctgcggatcgatgacccgtctgcgaaagccactggaggcagcaacaacatcttcactaatgctcatgtcgctcaactcatttttttagtttttttttttttgcttcgaagcctttatatagcattatagcttgcttcaccgaacgatgttcagttttcaaatggaacatagtatacacttttacaagggaaaatggagttcctaaactagtccttgtataacggtctcacccggtggatgcatgtgtatagaaacatgtcgtgattgttccatcgagaaaccatttcgtaattttgcgaacacataacatatgtgcttactatgttcagttgtgatgggtgattatctaggagatggccagctttagtggagttt

SEQ ID NO: 211917 - DNA, 1357 bp, Zea Mays
acactattaattcagtgctcttcccttcgtctgcgtctgcgtgcagcgtgctcgcgaggccctgcttcctgctgcgatggggggcgagacgcacctgagcgtgcaggagctggcggcgtcgctgggcgcgctaccgccggagttcgtgcggtctgagcaggaccagccgggcgcgaccacgtaccgcggggccgccgtgccggacgcgccggtgatcgacatatcggagcccgggttcggcgcgcgcatggccgcagccgccagggagtgggggctgttccaggtggtgaaccacggcgtgccctcagcggcggtggcggagctccagcgcgtcgggcgggccttcttcgcgcttccgacggaggagaaggagcgctacgccatggacccggcgtccggcaagatcgagggctacggcaccaagctgcagagggacctcgagggcaagaagacgtggaacgacttcttcttccacgtcgtcgcgccgccggagaaggtggaccacgccgtctggccccggagcctcgccgggtacagggaggccaacgaggagtactgccgccacatgcagcgcctgacgcgcgagctgttcgagcacctctcgctggggctggggctccacgggggcgccatggcggaggcgttcggcggagacggcctggtgttcctgcagaagatcaacttctacccgccgtgcccgcagccggagctcacgctcggcgtcgcgccgcacaccgacatgagcacgctcaccgtcctcgtgcccaacgaggtgcaggggctccaggtcttcaaagatggtcaatggtacgaggccaagtacgtgcccgacgcactcatcgtccatatcggcgatcagatcgagcaacggggcatacaaggcggtgctgcaccgtacgacggtgaacaaggagaagacgcggatgtcatggccgatgttcgtggagccgccgggggagctcgtcgtcgggccgcaccccaagctggtcacggaggagagcccggccaagtacaaggccaagaagtacaaggactaccagcactgcaagatcaacaagctccccatgtaattatgtagctcgggttctactgtcgtgtgcacccgcttctgtaatttcagtctaccatatttaagtcacataaccgttattccagtcgcatgcatggccacagaattggcttgtgggctctttcgtctggtttgggccattgcgggctgcttatctactctctttcccgaccgtgtttatttgttgttgttgtaagggcactaatacatgttaaagaataacgggtcttttgtccgtatattactacaatttctatagatgggattgtccacgccatttaaaatatt

SEQ ID NO: 211918 - DNA, 1804 bp, Zea Mays
aaaccctttgctctacagtggtctataaagaggaggtttgaacttgctggtttactatcatctatactaagagctcatttagaagcttatgaccctgttctttcgctgacgctaagatacttaataagcattcacaaggcattttgcacgcgccaaggaattcaatcacctatatctgatctcactgaacgactgttatttgaggatcgtgacccccctgtggttcctccggaatgctcactcgaagcaccatcatttgatgagagccctagcgcatgctgttgagttgacaagacaaggtgctgtggatagcttgaagtttgcaaaaggacatttataccaagcttttcagaacgaattgtgccggatgaagctggacctgacacttctggataaacttgtacatgagtattgtgtatacaggggaatagttgaaggcagttcacatgttctttctggaactgctgacttgaaatgtaatcaaaataatgatgttaataatgaaacacagctttattgtgaaatgaccaacaatcagaatggacattgtagcaccagcggtatcaatcttgacgattcttggtccaggaggttgcatagggatagacatattatgcctgggcagcaaagacgaaagagatggagaggacggttagatgatcttgattatgcttgtgatgcgttgttggatcccagtaagcatgatagtttgtctcctactcttgatatggacgaagatactatggtagaaaaacaggacttggtggaaaattttaatttatctgataaacacatggaagatcagaaatatgaaattattttggagatgcgggacctcacacgaaaagggatggcttccaaagttgttgaggaaataagcagtatagatcctgatttctttcaacagaaccctattctcctgtttcagctgaaacaggttgaatttcttaagctggtagctgccggtgatcatgtatctgctctcaaggttgcatcaacttatctgggaccacttgctgccaataacgaagctctactgaagcccttgaaggaaacattggtgacactaattcaacccaatgaagatgtagtcatgaatgcattgtcattgccagtacttgccagttctgtccaggttgcaatgagcagaaggcttggtattgaagagcctcagttaatgaagatagtcagaacaacaatccatacacacactgaatggtttaagcttcagatgtgcaaggaccgttttgagcacttattgaagattgattctctaaaagaggttgatccatcattggggagtcaccgtaagtccaaggtccttacagatgaatgtgcaaatggatcatctcaaatgacaacatgttcaagtggcaaggtgccagatgaaggtagtagccctcaagtctcatcagaagttgcctgtgatgaaaatgctatactgaaggttatggaattccttgcgttgccaagggcggacgccatccaactcctcatgcagtacaatggaaatgcagaagcagtcatccaacagatcttccaatagtgcttactgtaaataacaaagtattttgcttgctttcaaacgtaattatttgttgatacttttcttgccctgtacagaagattctgttagaactaggagtctgtgtttgatgatccacagtacttctatggacttacacagagtaggaatcggtgggattcagcacaggctaaactcaacgataaatgcaaagatattgatttatactggttcagaccattgaacagcgtgcgtaatatatattatgtctagttagtt

SEQ ID NO: 211919 - DNA, 1399 bp, Zea Mays
gtttcgtgttcatacgagctagaataattaatatccaataataataagtcagatttcaacatatattgcatgtaatgtatagacaggttggccagtaaaaagaaaaagaaaaaagataaaaacgtagggcctagtgatcagcacagcatgcagaattgcagatgcggcgcacatgcgaacgtaacaaacacagcaacacgcccacgctagcggtttccatttccggccctgcaatcctgcaccggcgcgaaagccccctcacggcctcacctccactccggtgatggccgcctctcctttacttctcagatctcagtgctcacgccgtccacggtccactagttgcatcggctcccgcataaagatccacaccacttgagcagcagctagctcaagggaaggagaaggctggaagtggaaagaagtgggttcttgcttgagctgagctcttgctgcccttgaatctgttagggagtggagaacggagtatggggcgcggcaagatcgagatcaagaggatcgagaactctaccaaccggcaggtgaccttctccaagcgccgggccggactggtcaagaaggcacgggagatcggcgtgctctgcgacgccgaggtcggcgtcgtcatcttctccagcggcggcaagctctacgactactgctcgcccaggacctcgtctgtccattgcccctctcattctttttattcttttgcttgtttattatcgtccttcttcttttcttgtgtgcaagcaaaactgatcgcaaagacccaaacttggttggaaaggcaaaactgagtaaaaaacacgattaagcgtaaaattgaggacaccaataaaaatgagggcaccagcctaaaaaacccaaatttggtttggtggcaggctgtccaggatcttggagaagtaccagaccaactccgggaagattctgtggggtgagaagcacaagaacctgagtgcagagatcgacagagtcaagaaggagaacgacaacatgcagattcagctcaggcatctgaaaggcgaggacctgaactccctgcagcccagggagctgatcgctattgaagagggcctccagaatgggcagaccaacatgcgcgagaagcagatggactactggaggatgcacaagacgaatgggaagatgctggaggacgaacacaagatactgacttttaggatggtaattctccccatctgaatagcagttgaaactttgcttgatcatccttcctcctttcaactccttagcataacttatcagtatgcaatattctaaacaaactcaatgttccgagctaaccgaagaaactgcacaaccacgctgagcaaatttccaaggacatgaaaattcttgtcttgggatttctagttggaacgcaattctgctc

SEQ ID NO: 211920 - DNA, 1063 bp, Zea Mays
gtttcgtgttcatacgagctagaataattaatatccaataataataagtcagatttcaacatatattgcatgtaatgtatagacaggttggccagtaaaaagaaaaagaaaaaagataaaaacgtagggcctagtgatcagcacagcatgcagaattgcagatgcggcgcacatgcgaacgtaacaaacacagcaacacgcccacgctagcggtttccatttccggccctgcaatcctgcaccggcgcgaaagccccctcacggcctcacctccactccggtgatggccgcctctcctttacttctcagatctcagtgctcacgccgtccacggtccactagttgcatcggctcccgcataaagatccacaccacttgagcagcagctagctcaagggaaggagaaggctggaagtggaaagaagtgggttcttgcttgagctgagctcttgctgcccttgaatctgttagggagtggagaacggagtatggggcgcggcaagatcgagatcaagaggatcgagaactctaccaaccggcaggtgaccttctccaagcgccgggccggactggtcaagaaggcacgggagatcggcgtgctctgcgacgccgaggtcggcgtcgtcatcttctccagcggcggcaagctctacgactactgctcgcccaggacctcgctgtccaggatcttggagaagtaccagaccaactccgggaagattctgtggggtgagaagcacaagaacctgagtgcagagatcgacagagtcaagaaggagaacgacaacatgcagattcagctcaggcatctgaaaggcgaggacctgaactccctgcagcccagggagctgatcgctattgaagagggcctccagaatgggcagaccaacatgcgcgagaagcagatggactactggaggatgcacaagacgaatgggaagatgctggaggacgaacacaagatactgacttttaggatgaaactgcacaaccacgctgagcaaatttccaaggacatgaaaattcttgtcttgggatttctagttggaacgcaattctgctc

SEQ ID NO: 211921 - DNA, 2888 bp, Zea Mays
cgtgcaaattcaagtcctgcaacatttggcttggtctatgttcagaaaataaggagatttggcagaagcctcgtcagttcgatggctttaattctttgtatctataccggagatggtatagatgttttactactttgaatagtttttcgtttgacgatggacatgtggaaaggaaagatgactttttattggatcagtttcgttctcagtatgatggaaaatgcccagttttggttacgaagttggccgaaacctggcctgcgaggacaaaatggacactgcagcaactgacaaaggattttggggaagttccattcaggatatcacaaagaagccctcagaagataacaatgaaactaaaggattatgtttcttacatggaactccagcatgatgaagatcctctatacatatttgatgataagtttggagaatcagcaccaacattacttgaagattatagtgtccctcatttattccaagaagacttttttgatatcttggattatgaccaacgaccagcattcagatggcttattattggaccagagagatcaggtgcttcttggcatgttgatcctggactgacaagtgcatggaatactcttctttgtggccgaaaaagatgggcattgtaccctccaggaagagtgcctggtggtgtcacagtacatgtaaatgatgaagacggtgatgttgacattgaaactccgacatcattgcaatggtggcttgatatatatccacaccttcctgaacatgagaagccattggaatgcacacaattgccaggagagaccatttttgttcctagtgggtggtggcattgcgttctgaatctcgagacaacaattgcagttacacagaactttgtaaaccagtctaattttcagcatgtatgtttggatatggcacctggtcacagacacaaaggagtttgccgtgctggcttacttgctgttccaggaaaattcgttaaagataataaaaaccatcaatctgtcacaatgagtggatggaaccaccctgatatgagtcgtaaggaaaaaaggcttaaaggttctgaagcactaagaatctcaaatagcataaatcattgttctgcatttgagttctcaggtgttcaagagagtttggagaatcaagatttctcatatgatattgattttttgtcacaattcattgagaaagaaagggaccattattcttctctctggagtccaactaattcaattgggcagagagaagcaagagaatggctgcgaaggctttgggttctgaaacctgatctgagagaactaatatggaagggtgcatgccttgcaataaatgttgacaaatggtattcatgcttagaggagatatgtgcatgccatagtttaccaccacctacagaggatgagaagcttcctgttggcactggtagcaacccagtcttcattgtctcgggcaatgtgattaaaatatatgctgaaggaggattggtttattctgtccatggtttgggcacagagcttgagttctatgatctcctgcaaaaaagtggttcacctttgatcaatcacattcctgagataattgctagtggcttccttgagtataaggatgatatctacagcacggttccgtggaatggaaaaggaataccagaaattttggttaagtactactcattggaggtttcttgtgcgaacagctgctttcctcttgggctttggagcaagcaacgatttgggatgtgtagttcggctgatgtttcagacagaccaatttggccttacatggtaacaagaaagtgcaaaggagatatttttgctcgcatccgcgatatgctgtcgaagactgatattcttcatcttgcatcatccttgggagttcaaatgcgaaacatacatttattacccctgccacccgtggagcatgtacctgaatctgggaacaatgatgtgaaagaagtggtaggaacatgtgatgataccacggttctacctgaatggcagcaacttgtctctactctaaataggaggaagcagaatgtaaaaaagcacctagctaactggggggactctgttccacaagttctagtagaaaaggctgaagaatatctccctccgaatatgggcttcctcatcaagtttgttaaggatgatggtgagttgctgtacccatgcccctcttggatacattcagatataatggacgataacattcttatcgaggggatcataaaactgagttcttctggtgagagggaaagagtttatgactcagatcgggacaaaataaatgcaattcacatcattgatttcagtgatctgtccattggggatcctatatgtgacataattccgctgcacttggatattttccggggtgatagtgaccttctcaaggaatttctacggagctatcaacttccccttctgaggggggaatcaaccaccgatgtctacagatcagtgcgaaactcgaagttcagcagggcatcatatcgcgcgatgtgctactgtatattacacgaggacaacgtcttgggagctatattcagcctgtggaaggagatgagggctgcaacgtcctgggaggacgttgagaacctggtctggggagagctgaaccggtaccaggactctgcagttcgctcagcataactaaacaccagcaaaaaaaaaaaaaactttctgaacatacgtgtatgttgttgttcctccgacgaatgtaacttccaaatataaaaaaaaagtgtagggaaaataacgaaggctcgacacggcatgcccgtattttcctatggctggtgataatattgagatccctgaaatggttctatgaaatgaaccgcagaccgttgaaatcgtttcagatcggcaacataaatcgcatgggac

SEQ ID NO: 211922 - DNA, 3025 bp, Zea Mays
cagtgtcatgtacatactttgtaatgaagaacctctctggatgagcaaatgtctttcaatcgggggtcctcttgaatacaaagtttcctggaagaagacggcactatgtaggcttggtctatgttcagaaaataaggagatttggcagaagcctcgtcagttcgatggctttaattctttgtatctataccggagatggtatagatgttttactactttgaatagtttttcgtttgacgatggacatgtggaaaggaaagatgactttttattggatcagtttcgttctcagtatgatggaaaatgcccagttttggttacgaagttggccgaaacctggcctgcgaggacaaaatggacactgcagcaactgacaaaggattttggggaagttccattcaggatatcacaaagaagccctcagaagataacaatgaaactaaaggattatgtttcttacatggaactccagcatgatgaagatcctctatacatatttgatgataagtttggagaatcagcaccaacattacttgaagattatagtgtccctcatttattccaagaagacttttttgatatcttggattatgaccaacgaccagcattcagatggcttattattggaccagagagatcaggtgcttcttggcatgttgatcctggactgacaagtgcatggaatactcttctttgtggccgaaaaaggaagagtgcctggtggtgtcacagtacatgtaaatgatgaagacggtgatgttgacattgaaactccgacatcattgcaatggtggcttgatatatatccacaccttcctgaacatgagaagccattggaatgcacacaattgccaggagagaccatttttgttcctagtgggtggtggcattgcgttctgaatctcgagacaacaattgcagttacacagaactttgtaaaccagtctaattttcagcatgtatgtttggatatggcacctggtcacagacacaaaggagtttgccgtgctggcttacttgctgttccaggaaaattcgttaaagataataaaaaccatcaatctgtcacaatgagtggatggaaccaccctgatatgagtcgtaaggaaaaaaggcttaaaggttctgaagcactaagaatctcaaatagcataaatcattgttctgcatttgagttctcaggtgttcaagagagtttggagaatcaagatttctcatatgatattgattttttgtcacaattcattgagaaagaaagggaccattattcttctctctggagtccaactaattcaattgggcagagagaagcaagagaatggctgcgaaggctttgggttctgaaacctgatctgagagaactaatatggaagggtgcatgccttgcaataaatgttgacaaatggtattcatgcttagaggagatatgtgcatgccatagtttaccaccacctacagaggatgagaagcttcctgttggcactggtagcaacccagtcttcattgtctcgggcaatgtgattaaaatatatgctgaaggaggattggtttattctgtccatggtttgggcacagagcttgagttctatgatctcctgcaaaaaagtggttcacctttgatcaatcacattcctgagataattgctagtggcttccttgagtataaggatgatatctacagcacggttccgtggaatggaaaaggaataccagaaattttggttaagtactactcattggaggtttcttgtgcgaacagctgctttcctcttgggctttggagcaagcaacgatttgggatgtgtagttcggctgatgtttcagacagaccaatttggccttacatggtaacaagaaagtgcaaaggagatatttttgctcgcatccgcgatatgctgtcgaagactgatattcttcatcttgcatcatccttgggagttcaaatgcgaaacatacatttattacccctgccacccgtggagcatgtacctgaatctgggaacaatgatgtgaaagaagtggtaggaacatgtgatgataccacggttctacctgaatggcagcaacttgtctctactctaaataggaggaagcagaatgtaaaaaagcacctagctaactggggggactctgttccacaagttctagtagaaaaggctgaagaatatctccctccgaatatgggcttcctcatcaagtttgttaaggtaaatttgcatccttgtcttcttcgttgctcgtgtcgagcattaggtttgacgagtgctgattaagttaacaggatgatggtgagttgctgtacccatgcccctcttggatacattcagatataatggacgataacattcttatcgaggggatcataaaactgagttcttctggtgagagggaaagagtttatgactcagatcgggacaaaataaatgcaattcacatcattgatttcagtgatctgtccattggggatcctatatgtgacataattccgctgcacttggatattttccggggtgatagtgaccttctcaaggaatttctacggagctatcaacttccccttctgaggggggaatcaaccaccgatgtctacagatcagtgcgaaactcgaagttcagcagggcatcatatcgcgcgatgtgctactgtatattacacgaggacaacgtcttgggagctatattcagcctgtggaaggagatgagggctgcaacgtcctgggaggacgttgagaacctggtctggggagagctgaaccggtaccaggactctgcagttcgctcagcataactaaacaccagcaaaaaaaaaaaaaactttctgaacatacgtgtatgttgttgttcctccgacgaatgtaacttccaaatataaaaaaaaagtgtagggaaaataacgaaggctcgacacggcatgcccgtattttcctatggctggtgataatattgagatccctgaaatggttctatgaaatgaaccgcagaccgttgaaatcgtttcagatcggcaacataaatcgcatgggac

SEQ ID NO: 211923 - DNA, 3063 bp, Zea Mays
ctcgatctggcgatctctttcttacctgattagaaaaacagggtccttatgttacattttcttagttatttgtcttgctagtatctatacataatatccttctagggtttggaactatgttcattcttagatcactttcagtgtcatgtacatactttgtaatgaagaacctctctggatgagcaaatgtctttcaatcgggggtcctcttgaatacaaagtttcctggaagaagacggcactatgtaggcttggtctatgttcagaaaataaggagatttggcagaagcctcgtcagttcgatggctttaattctttgtatctataccggagatggtatagatgttttactactttgaatagtttttcgtttgacgatggacatgtggaaaggaaagatgactttttattggatcagtttcgttctcagtatgatggaaaatgcccagttttggttacgaagttggccgaaacctggcctgcgaggacaaaatggacactgcagcaactgacaaaggattttggggaagttccattcaggatatcacaaagaagccctcagaagataacaatgaaactaaaggattatgtttcttacatggaactccagcatgatgaagatcctctatacatatttgatgataagtttggagaatcagcaccaacattacttgaagattatagtgtccctcatttattccaagaagacttttttgatatcttggattatgaccaacgaccagcattcagatggcttattattggaccagagagatcaggtgcttcttggcatgttgatcctggactgacaagtgcatggaatactcttctttgtggccgaaaaagatgggcattgtaccctccaggaagagtgcctggtggtgtcacagtacatgtaaatgatgaagacggtgatgttgacattgaaactccgacatcattgcaatggtggcttgatatatatccacaccttcctgaacatgagaagccattggaatgcacacaattgccaggagagaccatttttgttcctagtgggtggtggcattgcgttctgaatctcgagacaacaattgcagttacacagaactttgtaaaccagtctaattttcagcatgtatgtttggatatggcacctggtcacagacacaaaggagtttgccgtgctggcttacttgctgttccaggaaaattcgttaaagataataaaaaccatcaatctgtcacaatgagtggatggaaccaccctgatatgagtcgtaaggaaaaaaggcttaaaggttctgaagcactaagaatctcaaatagcataaatcattgttctgcatttgagttctcaggtgttcaagagagtttggagaatcaagatttctcatatgatattgattttttgtcacaattcattgagaaagaaagggaccattattcttctctctggagtccaactaattcaattgggcagagagaagcaagagaatggctgcgaaggctttgggttctgaaacctgatctgagagaactaatatggaagggtgcatgccttgcaataaatgttgacaaatggtattcatgcttagaggagatatgtgcatgccatagtttaccaccacctacagaggatgagaagcttcctgttggcactggtagcaacccagtcttcattgtctcgggcaatgtgattaaaatatatgctgaaggaggattggtttattctgtccatggtttgggcacagagcttgagttctatgatctcctgcaaaaaagtggttcacctttgatcaatcacattcctgagataattgctagtggcttccttgagtataaggatgatatctacagcacggttccgtggaatggaaaaggaataccagaaattttggttaagtactactcattggaggtttcttgtgcgaacagctgctttcctcttgggctttggagcaagcaacgatttgggatgtgtagttcggctgatgtttcagacagaccaatttggccttacatggtaacaagaaagtgcaaaggagatatttttgctcgcatccgcgatatgctgtcgaagactgatattcttcatcttgcatcatccttgggagttcaaatgcgaaacatacatttattacccctgccacccgtggagcatgtacctgaatctgggaacaatgatgtgaaagaagtggtaggaacatgtgatgataccacggttctacctgaatggcagcaacttgtctctactctaaataggaggaagcagaatgtaaaaaagcacctagctaactggggggactctgttccacaagttctagtagaaaaggctgaagaatatctccctccgaatatgggcttcctcatcaagtttgttaagatataatggacgataacattcttatcgaggggatcataaaactgagttcttctggtgagagggaaagagtttatgactcagatcgggacaaaataaatgcaattcacatcattgatttcagtgatctgtccattggggatcctatatgtgacataattccgctgcacttggatattttccggggtgatagtgaccttctcaaggaatttctacggagctatcaacttccccttctgaggggggaatcaaccaccgatgtctacagatcagtgcgaaactcgaagttcagcagggcatcatatcgcgcgatgtgctactgtatattacacgaggacaacgtcttgggagctatattcagcctgtggaaggagatgagggctgcaacgtcctgggaggacgttgagaacctggtctggggagagctgaaccggtaccaggactctgcagttcgctcagcataactaaacaccagcaaaaaaaaaaaaaactttctgaacatacgtgtatgttgttgttcctccgacgaatgtaacttccaaatataaaaaaaaagtgtagggaaaataacgaaggctcgacacggcatgcccgtattttcctatggctggtgataatattgagatccctgaaatggttctatgaaatgaaccgcagaccgttgaaatcgtttcagatcggcaacataaatcgcatgggac

SEQ ID NO: 211924 - DNA, 2116 bp, Zea Mays
cttcgtcttctgtcactgtcccacactcctatcattctcgccttcgacttcccaggagcgcccagcgccgcggagcttctagaacacgcgactggggcgagctagacgaagctaaggaggcgcgaggggtgacgatgcggggcaggtgacggtgcggcgtggtggaggcgggacagaggccgggggatggtggcggcggagggtgggcccgtcgaggagggcgtcggggagagctcgtccccgccgcgcgtagacgcagccccagcgccctctggctccgttgggagcgggggcagaggaggcgccagcgacatctgcgccgaggtgctcgagcgcctcgtcgccgacggccacgcggaggcgtccgaccccgagttccgcgacaggctcgccgcacatttcgggcggctcccgcacagctatcagctggatatcaatgttgacaaagcaaccgatgtcttggtccaccagaatgtcttagcggaagcaaaggaccctgataggcgccctgcattctatgttcgtttcttgaggattgaagatattgatcctgcaaacgactccgatgcatctgaagaaggggatggtgatggtgatgatctctctgtaaggcaggacacaccatatactcacattcatgaggtagtattctccacaatcgacaagccaaagctccttagtcagctatctgcattgctatctgacattggattgaacatcagagaagcacatgttttctctactcatgatggctattctcttgatgttttcgttgttgatggctggcccattaaggatactgatggtttgcacaaagcactggaagcatccattttaagaaatgagggttcatggtctggttcatctcattcgtcagcagctgaaagaacactgcccttccaagttaaaggtatcacgggacttacctcggtgaggatgtagctgttaaagttctaagagctgagcatttgaataagaatgtttggaacgaatttactcaagaagtatatatactaagagaagttcaacatacaaatgttgtgcgattcattggtgcttgcacaaaaccaccacaattttgcataattacagaatacatgtctggaggaagcttatatgactttgtgcacaagcagcataacgttctaaacctcacgactctattgaagtttgcagttgatgtatgccgagggatgtgctacttgcatgaaaggggtatcatccatagagacttaaagactgccaaccttctaatggacaacgatcatgctgtgaaagtggctgattttggcgtagctcggttccaggatcaaggaggtatcatgacagctgaaactggaacatacagatggatggcgcctgaggttataaaccaccaaccctatgatagcaaagcagatgtgttcagctttgccattgttctctgggagctgataacgtccaagatcccatatgataccatgacccctctccaagcggctgtaggtgtgagacaggtgggtaaagaaagagatctcatatgctctctgaaacgtgctaaatgtactgtcattcataacaggggttgcgcccaggacttccgaagaagacgcacccaaagctgttggacttgatgcagagatgttgggaagcagatccatccgaccggcctgctttctcggacattttagccgaactggaggatcttttggcacaagctcagggaacatcgggaaagacggtccaagatccatcaaactcgaacgcgaaagattaacccccatacctgacattttttctcaatccagtgatttgccacatctaggattcgagttgccaattatgaggaaatttgttttgcttgtgtacattcgaacaatcttcttggggccaattttttatgggcacctcattattcttatacaaaagaaattgggctcgacgcttgggataccacacagattcaggggaaaaaaacaaagacggttcagcaaaacgtatcaaaatgaggctccctgccacaggttcagcaaacaaattccagaagccaaggcatgggtttattaaagctatttgacttcctgaaaggagccgcgccttcaaagttgcgttccgttatcatttcagtttgtcgaag

SEQ ID NO: 211925 - DNA, 3017 bp, Zea Mays
atcctgcgccttattatcatcatctaggtgtaattacttccgtttgtgctaatcacctcgtgattgcctgcaataaggaaccccagcccccccaccttgctgatgccgtgcttttctagagaagtaccctgccgcgtcacgcttcgtcctcgcctgctttggattcaacggctttttggaggccgaggccattggtgccatgcggccagcccttttcttctccatggttcccatcgatgtgtttttgttcggttctctcgtcagatctgtataaataggcgcctcccttctccgccattcctcggtcctctgaagcgtttcagttcatcgattcagttcttgcctgaggatccaggaagaggacagcaatgggggaaggtgcaggtgaccgtgtcctgagccgcctccacagcgtcagggagcgcattggcgactcactctctgcccaccccaatgagcttgtcgccgtcttcaccaggctgaaaaaccttggaaagggtatgctgcagccccaccagatcattgccgagtacaacaatgcgatccctgaggctgagcgcgagaagctcaaggatggtgcttttgaggatgtcctgagggcagctcaggaggcgattgtcatccccccatgggttgcacttgccatccgccctaggcctggtgtctgggagtatgtgagggtcaacgtcagtgagctcgctgttgaggagctgagagttcctgagtacctgcagttcaaggaacagcttgtggaagaaggccccaacaacaactttgttcttgagctggactttgagccattcaatgcctccttcccccgtccttctctgtcaaagtccattggcaatggcgtgcagttcctcaacaggcacctgtcatcaaagctcttccatgacaaggagagcatgtaccccttgctcaacttccttcgcgcccacaactacaaggggatgaccatgatgttgaacgacagaatccgcagtctcagtgctctgcaaggtgcgctgaggaaggctgaggagcacctgtccaccctacaagctgataccccatactctgaatttcaccacaggttccaggaacttggtctggagaagggttggggtgattgcgctaagcgtgcacaggagactatccacctcctcttggacctcctggaggccccagatccgtccaccctggagaagttccttggaacgatccccatggtgttcaatgtcgttatcctctcccctcatggttacttcgctcaagctaatgtcttgggttaccctgacaccggaggccaggttgtctacatcttggatcaagtgcgcgctatggagaacgaaatgctgctgaggatcaagcagtgtggtcttgacatcacgccgaagatccttattgtcaccaggttgctccctgatgcaactggcaccacctgtggccagcgccttgagaaggtccttggcaccgagcactgccatatccttcgcgtgccattcagaacagaaaacggaatcgttcgcaagtggatctcgcgatttgaagtctggccgtacctggagacttacactgatgacgtggcgcatgagattgctggagagcttcaggccaatcctgacctgatcatcggaaactacagtgacggaaaccttgttgcgtgtttgctcgcccacaagatgggtgttactcactgtaccattgcccatgcgcttgagaaaactaagtaccctaactccgacctctactggaagaagtttgaggatcactaccacttctcgtgccagttcaccactgacttgattgcaatgaaccatgccgacttcatcatcaccagtaccttccaagagatcgccggaaacaaggacaccgtcggccagtacgagtcacacatggcgttcacaatgcctggcctgtaccgcgttgtccacggcattgatgtgttcgaccccaagttcaacatcgtgtctcctggcgcggacctgtccatctacttcccgtacaccgagtcgcacaagaggctgacctcccttcacccggagattgaggagctcctgtacagccaaaccgagaacacggagcacaagttcgttctgaacgacaggaacaagccaatcatcttctccatggctcgtctcgaccgtgtgaagaacttgactgggctggtggagctgtacggccggaacaagcggctgcaggagctggtgaacctcgtggtcgtctgcggcgaccatggcaacccttccaaggacaaggaggagcaggccgagttcaagaagatgtttgacctcatcgagcagtacaacctgaacgggcacatccgctggatctccgcccagatgaaccgcgtccgcaacggcgagctgtaccgctacatctgcgacaccaagggcgccttcgtgcagcctgctttctacgaggctttcgggctgacggtggttgaggccatgacctgcggcctgcccacgtttgccacagcctacggcggtccggccgagatcatcgtgcacggcgtgtctggctaccacatcgacccttaccagggcgacaaggcgtcggccctgctcgtggacttcttcgacaagtgccaggcggacccgagccactggagcaagatctcccagggcgggctccagcgtatcgaggagaagtacacctggaagctctactcggagaggctgatgaccctcaccggcgtgtacgggttctggaagtacgtgtccaacctggagaggcgcgagacccggcggtacctggagatgctgtacgcgctcaagtaccgcaccatggcgagcaccgtgccgctggccgtggagggagagccctccagcaagcgtggtgctccctttgtttcctggatgggatgttgctccttgaataataatcgtagtggccttggagcccttttcctgaaataagagcagcatcctagtgcttacctttgcagctgtaactggtgtttgcctcaggatttttgctcctcccttctatggattgtgcttaaaattctctataataaccttacagataaagct

SEQ ID NO: 211926 - DNA, 2390 bp, Zea Mays
ctctccacaccacccactatagctttggacttggatctcaaattctcccagtttcccactccccctgggtcttccccatcccccctccactccccccctgggttttccccttcctttaccccccatcagatcttcccccatatctctgtcctgcatcactcgccgccatccactcccgatccaaacccgagagctcccacctccgccgccctgttcgctcgtccgccttttcactccccgtagctagctgctgtcgcggagcaaccccgcgattccaagaaaagcaacttggtcaagaaagagtgcaagaaaggaggacggtgctgacgatgatggcgataagccaccccatgattcgccccatcattccgtcgcctccggggcctgcgcgctagctgctagaagggcctcgccgtccgtcgtggtggtggtggtggtggtgtgcgcggggcgggaggggaggggaggggagtcgtcactgcgccgccacaatgccacagtaccaggagctgccctgcggcgggcaggagctcgatatcgacaccgcgctcaaggatggcatcctcgggggcgcgctggagcccgtgggtgcggcggcgggggacgatggcaagcagcccgtggagctgcgcaggatgatggacgagctggacgcggcggccggggacggcggcggcggcggcggggacgaggcggtgccggcggtcttcatctgcccgatctcgctcgagcccatggtggatccggtgacgctctgcacggggcagacgtacgagcgggccaacatctcgcggtggctagccctgggccaccggacctgcccgaccacgatgcaggagctctgggacgacgcgctcaccccaaacgccaccctccggcagctcatcgccgcctggttctcccgccggtacacgaggtttaagaagcgctccgccgacttccacggccgcgccgccgacctcgtcggcagcctccgcggcacggcggtgcccaggcggcagcccctcaagggccaggcccgcgtcgcggcgctgcgggagctgcgcaccctcgccgccgcccaccagtccgtcaccaaggccatcgccgaggccgtcgcgatactcgtcagcggggtgctgcttgacgctgacaccaaggccgcgctcatgcagccggcgaaggtgtcgctcgtggtcgacatgctcaacgagggcgccgcggacaccaagatcaactgtgtccgcctcatccgcatcctcatggtcgagaggggtttccggccggagacggtggcgagcctcagcctcttggtcggcgtcatgcgcctcatccgggacaagcggcatccggacggtgtggccgcggggctcgagctgctgaattcgatctgcgcggtgcacaggccagcgaggtgtatggttgttagcatcggtgcggtgccgcagctggtggaattgttgccggagctagcgacggagtgtgtcgagccggctttggacatcttggatgccctgtctgcggttccagaggggaggatggctcttaaggattgtccgcggacgatccccaatgctgtccggttgctgatgagagtttcagaggcatgcactagacgcgcgctgtcgatgctgtggacggtgtgtcggatggctccggaagaatgtgcacctgctgcagtggaggctgggttggcggcgaagcttctgcttgtcatccaaagtggttgtgcgccggagctgaagcagaaggcgtcggagctgctcaagctgtgccgcctcaactacaccgacaccctcttcatctccaagtgcaaactcacaaggacaattcagtgagagatgcaaatgatgctggtctgatctgatttggttcgatgatgcgtggtttgttgattgaccttgctgagttcagagttccaaggaaatggagttggcaaattgacgaatgatggcaagactggtggttaccacaacaatttccggggagacaagaagcgatgcagcctaatgactggcaagttagatggcaagcaggcgggtgtacatgcaaattgttgagaatttgatcagctcaataagcacatgaggctgggtggtaagtacagccagttttgccattaggagtagctagcattaagcaaaaccagcaaacttagatttttggcaatgtgggtatctcagagctgtagatgtcgttcccttccttgtaattacacagtactgttgcttctacactggaatatacattgccattgctccgggaaaaaaaattgaattgtcatcttgatcgagtactgcctagtcaaattgtggaagtgtgtgctctttcatctccaacaattatgtaaatttagcaaccctaaattatagatttagaagctgctaaagcattttaataagtaaaaaaaa

SEQ ID NO: 211927 - DNA, 1236 bp, Zea Mays
ctcccgatgttgagcatcaattgctagtacgatttcttctctcctccaaaccggccaagccaccaaccagcgccccccaccgccgcctttttatttcatccacgctgctcgtgctcgctgcctgcttcttgcgcgatcgtctcggcctctcgggactctagagtggcggccggctctccgcctgttcttgtcgtcgctgctcctttccctggtatagtctctatcttggtagttcaaccggcgatgtggaatcttaagggattttctttttacctgctcctttttgtactgaaagatggacctggtgactttactgatgtcggaacgttctgagagtgcaactgaaaagattatgagcagcatcatggataccattgctgacaaccttcctaagcagaagtctgggaaatttgatccaggttcagtctctgacaaagtgaagaacaagctgtttggtcgtcagaagaccttgcatggagttctgggtggtggaaaacctgctgatgtgctgttatggaggaacaaaaaaatatcatcgagtgttctggctcttgcaacagctatttgggttttctttgagtggctcgactaccactttctgacaattgtttcatttgcccttgttcttggaatggttgtccagtttgtttggtccaacttctcaaacatgctaagcagcggatcccgttctcaggtgccccgagttgaattgcctgatgagttatttgtgaacattgccgttgcaatcggtgcccaagtaaacaagttcctgtgcttccttcaggatgtttcttgtgaaagaaacttgaagcattttgtagtggcgatcgcaggactgtgggctgctgcggtgattggaagttggtgcaatttcctgactgtcatatatgtcgggtttgtttgtgttcacacgcttccggtgctctatgagaagtacgaagaccaagtggacgatttcctctacagccttcttggtctgctgcgagatcaatatcagaagctcgaccacggcgtcttgagcaagattcccaaggggaacatgaaggctaagaagaacgagtagtttagcagatggtttctcgtgaatgagatcaatatcgttttgacttgtgtcgattattaatttattacctaaggcgtgtgtgccattctgaacctggctgctagttcatcgcccaccggggttttaaactactaagctgcaatgcacaagtaatgaagtgtgctaaaaaaaca

SEQ ID NO: 211928 - DNA, 699 bp, Zea Mays
tggcaagccagaccaaaccaagaatacacggttgtgatgcttggtctggatgcagctggtaaaacaacaatactgtacaggcttcacatgggagaggttctttcaacagtccctacagtcggttttaatgtcgagaaggttcagtataagaatgtggcattcactgtgtgggatgtgggtgggcaagaaaaactcaggtcactgtggaagatgtacctgagtaattctgatgcactgctttgggtttgttgcagatctatgtcgttgattctctggacagagaaaggatcagagacgcgaggcaagagttccagaccattatcaaggaccctttgatggcaaacagcataatcttggtatttgcaaacaaacaggacctgagaggcacgatgagcacggacgaggtcagcgaagggctggggctgcacgacctcaggaacaggatctggcacatacaggggacctgcgcgctccgcggcgagggcctctacgacgggctcgactggcttgcgtccaccctgaagcagctgcaagaatcgggccacgcgacttcggtcgctggcccttccatctgatccagcgcaaggctcagctcggtcagagctttcggttgcatgtggatcggatgggatgcttgtttggtttgtggctaactgtgccccactttgcctaaggttagtcgttcgaattgagggcgtg

SEQ ID NO: 211929 - DNA, 699 bp, Zea Mays
gttgttgacggggatgttccattgtcagaggttgtgatgcttggtctggatgcagctggtaaaacaacaatactgtacaggcttcacatgggagaggttctttcaacagtccctacagtcggttttaatgtcgagaaggttcagtataagaatgtggcattcactgtgtgggatgtgggtgggcaagaaaaactcaggtcactgtggaagatgtacctgagtaattctgatgcactgctttgggtttgttgcagatctatgtcgttgattctctggacagagaaaggatcagagacgcgaggcaagagttccagaccattatcaaggaccctttgatggcaaacagcataatcttggtatttgcaaacaaacaggacctgagaggcacgatgagcacggacgaggtcagcgaagggctggggctgcacgacctcaggaacaggatctggcacatacaggggacctgcgcgctccgcggcgagggcctctacgacgggctcgactggcttgcgtccaccctgaagcagctgcaagaatcgggccacgcgacttcggtcgctggcccttccatctgatccagcgcaaggctcagctcggtcagagctttcggttgcatgtggatcggatgggatgcttgtttggtttgtggctaactgtgccccactttgcctaaggttagtcgttcgaattgagggcgtg

SEQ ID NO: 211930 - DNA, 1711 bp, Zea Mays
atagtccactaaaggcaagaagtaggagagagaaacaaacctacgtgcatatacgacgatttaaaagaagtataaggattttttaaaggaaccacggtgaaaacgagaaagagtacatactcctttagagaagttagatttgtagataaaaaaagctgcttaaacgactactgtaatagcaaaatactcgaacggaacgaagatttggcatcacccaccccctagctggcgtttcttaatttcacgtggagcgaatgctgctcctgctcggcatcggctgctctgctgccgtggcccgtgcgtgggatttagctcaggaacccacgcctgacatcccctcttcctccccggccggcgatgtcgtcttcgtcttccgcgctggccaaaggcaagtcggcaatcggatccgcagccggatctgccaaattcgaggccaaggggaaattctcctcctcctcctccccagctgcggcagctaccaagcgtggaaccaccaccagcagcagcagaggtagaggtagagggaaggccgacaagaaggtctactccttgcccggccagaagttcgatcctccggaggagagggagcctctcaggattttctacgagtcactgtccaagcagatcccctccagtgagatggctgaattctggttgacgcagcccttatagctacaggaagggcgccattcaccaaagggcttggcttggaaaacatcaatgttgttacacaacgtggttttgtgcctgttgatgaacggatgcgagtcatggatgcaggtggcaatgtggtacccaatttatattgcattggagatgccaatggcaagctcatgcttgcccatgctgccagtgcacaaggaatttcagttgttgaacaaatctctggaaaggatcacatcctaaatcatttaagcatcccagcagcatgtttcacccatccagagattagtatggttggattgacagagccacaagccagagagaaggcagataaagaaggatttgaggtaaatgttgtgaagactagctttaaggctaacactaaagctttggcagaaaatgaaggagatgggattgctaagttgatttaccgacctgacacgggtgaaattcttggggttcacattttgggtttgcatgctgctgatctcattcacgaggcatcaagacatcaagtttgctgttcacgcacaccctacattgtctgaggtcctggatgaactcttcaaagcagccaaggttaattccggtgtttctcattctgtaaatgaaccagttgcagcctagagaaaggccggatagcaagccaaggcagccaccccaaccactcctgaaggtcctcagcttcgtcacgaccctgttttcttccccaaaacgagattgacaacggtaacggggagggtgttgttgtaggcagttgctgtaggttacaaatttgaggaagaaattcatcagtgaatacaagcacacaaatgtttctttttttggtccagattgttaaaagggtctttttttttgacggtggggtgggtttttgttggcttcgttatttgcatatttgttgttggttgccctgtaagatgaagtgccgaggctagctcagctagtttgaaataattcatgtttcaaaactcagatgtattgcgccgacacaatggattagttggttatcttcagtaagctgcaaaacaatattttgcacggcaca

SEQ ID NO: 211931 - DNA, 391 bp, Zea Mays
catgtgtcaagactggaaaatttatctggcgtctagggatcaagacaagaaactcaccgtaccacggagatcaatatgtccatttcaatgtcaacatccccgaaaatttgacgtctagacagcgggagctgatcgaggaattcgcgaaggaggagcaaggcgaagacgagaaggacgccaaggcagcagctggagcatcggggggatagccggttttaggagccacagtagtgccttttagctggtatttataccgtgaccgtagacctgtctcaaattcgcagcggaaagatttatagataggtctttgtttcggattttgtagctggaataaatgaataatacgtctagaactgattttctgtctttttcgtaaaaaataaaaacaaat

SEQ ID NO: 211932 - DNA, 1548 bp, Zea Mays
gctgacaacaccagcccctgagaagcagcgcaggcgcagggcattccagaacgttcggcgccggcgaggccacacgcccaccatcagtcagccgccccgccaaagccatgcgcctccccgccggcgcacgcctcgcgctcctgctcgcccgccgctccctctcctcctccccccgcatcccgcgggcgcacacagggatatggagcgaggcgccctcccggagctctcccttctctccgccgagcagcgcccgcaggtccttccacgggaccaggccggtggcggcaagggactactacgatgtgctcggcgtcagcaagagcgccagccaggcggagataaaaaaggcctattatgggcttgcaaagaagctccacccagacacaaataaaggtgatgcggatgcagaacgcaagtttcaagaggttcaacgagcttatgagactttaaaggatgaacaaaaaagatcattatatgatcaggttggccctgatcagtatgagaaaactgcttctggcggaggcggaactggcttcgagggtggttttggaaatccatttgaggatatttttggtggtggcggtggcggtggtggaatgaatgatttctttaggaacattttcggggatagggactttggaggacgagatgttaagttcaagggtgcagcaaaacggtcaccttccaaacgtctgtaacatgtgaaatctgtggtggagccggtgtgcctcctggaaccacacctgaaacatgtctatcttgcaggggttcaggatttatattcatgcaaaccgggccattcaggatgcaatcaacctgcacaaaatgtggtggttctgggaaaactgtgaaggaattctgcaaggcatgcagaggaaacaaagttgtgcctggaaggaaatcagtccgccttgacatactgcctggttcggataatgaggacaccataaaggtggttcgatcaggtggagaagacccagatggccgtccaggtgatctttatgtgaccctcgaggttcgtgaggatcctgttttccgaagagagaaaggtgatattcatgttgatgctgtcctgaatgtgactcaggcaattttgggagggacagttcaagtcccaactctcagtggagacgttgttctaaagatcaagcccggtactcaacctggtcagaaggtagttctgagaggaaaagggatcaagacaagaaactcaccgtaccacggagatcaatatgtccatttcaatgtcaacatccccgaaaatttgacgtctagacagcgggagctgatcgaggaattcgcgaaggaggagcaaggcgaagacgagaaggacgccaaggcagcagctggagcatcggggggatagccggttttaggagccacagtagtgccttttagctggtatttataccgtgaccgtagacctgtctcaaattcgcagcggaaagatttatagataggtctttgtttcggattttgtagctggaataaatgaataatacgtctagaactgattttctgtctttttcgtaaaaaataaaaacaaat

SEQ ID NO: 211933 - DNA, 1595 bp, Zea Mays
gtgcggtagaatggtcccttgctaattggcccccaaatggagggtgatccatgtgaagaggcccagcccagctgacaacaccagcccctgagaagcagcgcaggcgcagggcattccagaacgttcggcgccggcgaggccacacgcccaccatcagtcagccgccccgccaaagccatgcgcctccccgccggcgcacgcctcgcgctcctgctcgcccgccgctccctctcctcctccccccgcatcccgcgggcgcacacagggatatggagcgaggcgccctcccggagctctcccttctctccgccgagcagcgcccgcaggtccttccacgggaccaggccggtggcggcaagggactactacgatgtgctcggcgtcagcaagagcgccagccaggcggagataaaaaaggcctattatgggcttgcaaagaagctccacccagacacaaataaaggtgatgcggatgcagaacgcaagtttcaagaggttcaacgagcttatgagactttaaaggatgaacaaaaaagatcattatatgatcaggttggccctgatcagtatgagaaaactgcttctggcggaggcggaactggcttcgagggtggttttggaaatccatttgaggatatttttggtggtggcggtggcggtggtggaatgaatgatttctttaggaacattttcggggatagggactttggaggacgagatgttaagttcaagggtgcagcaaaacggtcaccttccaaacgtctgtaacatgtgaaatctgtggtggagccggtgtgcctcctggaaccacacctgaaacatgtctatcttgcaggggttcaggatttatattcatgcaaaccgggccattcaggatgcaatcaacctgcacaaaatgtggtggttctgggaaaactgtgaaggaattctgcaaggcatgcagaggaaacaaagttgtgcctggaaggaaatcagtccgccttgacatactgcctggttcggataatgaggacaccataaaggtggttcgatcaggtggagaagacccagatggccgtccaggttcgtgaggatcctgttttccgaagagagaaaggtgatattcatgttgatgctgtcctgaatgtgactcaggcaattttgggagggacagttcaagtcccaactctcagtggagacgttgttctaaagatcaagcccggtactcaacctggtcagaaggtagttctgagaggaaaagggatcaagacaagaaactcaccgtaccacggagatcaatatgtccatttcaatgtcaacatccccgaaaatttgacgtctagacagcgggagctgatcgaggaattcgcgaaggaggagcaaggcgaagacgagaaggacgccaaggcagcagctggagcatcggggggatagccggttttaggagccacagtagtgccttttagctggtatttataccgtgaccgtagacctgtctcaaattcgcagcggaaagatttatagataggtctttgtttcggattttgtagctggaataaatgaataatacgtctagaactgattttctgtctttttcgtaaaaaataaaaacaaat

SEQ ID NO: 211934 - DNA, 1658 bp, Zea Mays
gagcaggtcgtgcggtagaatggtcccttgctaattggcccccaaatggagggtgatccatgtgaagaggcccagcccagctgacaacaccagcccctgagaagcagcgcaggcgcagggcattccagaacgttcggcgccggcgaggccacacgcccaccatcagtcagccgccccgccaaagccatgcgcctccccgccggcgcacgcctcgcgctcctgctcgcccgccgctccctctcctcctccccccgcatcccgcgggcgcacacagggatatggagcgaggcgccctcccggagctctcccttctctccgccgagcagcgcccgcaggtccttccacgggaccaggccggtggcggcaagggactactacgatgtgctcggcgtcagcaagagcgccagccaggcggagataaaaaaggcctattatgggcttgcaaagaagctccacccagacacaaataaaggtgatgcggatgcagaacgcaagtttcaagaggttcaacgagcttatgagactttaaaggatgaacaaaaaagatcattatatgatcaggttggccctgatcagtatgagaaaactgcttctggcggaggcggaactggcttcgagggtggttttggaaatccatttgaggatatttttggtggtggcggtggcggtggtggaatgaatgatttctttaggaacattttcggggatagggactttggaggacgagatgttaaggttgcactcgaactatcatttgtggaagcagttcaagggtgcagcaaaacggtcaccttccaaacgtctgtaacatgtgaaatctgtggtggagccggtgtgcctcctggaaccacacctgaaacatgtctatcttgcaggggttcaggatttatattcatgcaaaccgggccattcaggatgcaatcaacctgcacaaaatgtggtggttctgggaaaactgtgaaggaattctgcaaggcatgcagaggaaacaaagttgtgcctggaaggaaatcagtccgccttgacatactgcctggttcggataatgaggacaccataaaggtggttcgatcaggtggagaagacccagatggccgtccaggtgatctttatgtgaccctcgaggttcgtgaggatcctgttttccgaagagagaaaggtgatattcatgttgatgctgtcctgaatgtgactcaggcaattttgggagggacagttcaagtcccaactctcagtggagacgttgttctaaagatcaagcccggtactcaacctggtcagaaggtagttctgagaggaaaagggatcaagacaagaaactcaccgtaccacggagatcaatatgtccatttcaatgtcaacatccccgaaaatttgacgtctagacagcgggagctgatcgaggaattcgcgaaggaggagcaaggcgaagacgagaaggacgccaaggcagcagctggagcatcggggggatagccggttttaggagccacagtagtgccttttagctggtatttataccgtgaccgtagacctgtctcaaattcgcagcggaaagatttatagataggtctttgtttcggattttgtagctggaataaatgaataatacgtctagaactgattttctgtctttttcgtaaaaaataaaaacaaat

SEQ ID NO: 211935 - DNA, 730 bp, Zea Mays
cgaccgtccggaaacacgacggaacgggggcttctacctcgagaaagctccccatgttcccatcgccttgtacttgcggctgcctagaaacagcttggtagtataaccactgaagatggtcagtgggaggccgcatggtgaattggactcatggttcaagagcctcatggtgacctctagcagcgagagggggcaggctgggagtggtggtccagcgccaacattaacaggatggaaggaccttccgatggagctcctggtgcggataatatccacagttggagatgataggatggtcatcgtggcgtctggtgtttgcacaggctggcgtgacgcgctgggatggggggtcactaatctttcacttacatggtgcaaactgagcatgaataatttaatgatatctcttgcccacaagttcacgaagttgcaagttctcactctccggcaaaacaaacctcagcttgaagacagtgccgtagaggctgttgccaactactgccatgacctacgtgagttagacctcagcagaagcttcaggcttagtgaccgctccttgtatgcgctggcccatggatgcccacggcttacaagactgaacattagtggatgttccagtttcagcgacactgcgttgatttaccttacctgccgctgtaaaaacctcaagtgcctgaacttgtgtggatgcgtgaaggctgttactgacagagctttgcagttttggtgc

SEQ ID NO: 211936 - DNA, 1641 bp, Zea Mays
gtgggtttgtcacaagacatgtcaggaaacagcttggtagtataaccactgaagatggtcagtgggaggccgcatggtgaattggactcatggttcaagagcctcatggtgacctctagcagcgagagggggcaggctgggagtggtggtccagcgccaacattaacaggatggaaggaccttccgatggagctcctggtgcggataatatccacagttggagatgataggatggtcatcgtggcgtctggtgtttgcacaggctggcgtgacgcgctgggatggggggtcactaatctttcacttacatggtgcaaactgagcatgaataatttaatgatatctcttgcccacaagttcacgaagttgcaagttctcactctccggcaaaacaaacctcagcttgaagacagtgccgtagaggctgttgccaactactgccatgacctacgtgagttagacctcagcagaagcttcaggcttagtgaccgctccttgtatgcgctggcccatggatgcccacggcttacaagactgaacattagtggatgttccagtttcagcgacactgcgttgatttaccttacctgccgctgtaaaaacctcaagtgcctgaacttgtgtggatgcgtgaaggctgttactgacagagctttgcaggctattgctcagaactgtgggcagctgcagtctttgaacctaggctggtgtgatgatgttacagataagggagtgaccagcttagcgtcaggatgccctgatctcagagccgtagacttgtgcggttgtgttcttataacagatgagagtgtggttgctcttgccaacggatgtccgcacctgcgctcgctgggcctctacttctgccagaacatcacggaccgcgccatgtactccctcgcaaacagccgcgtgaagagcaagcgtgggaggtgggatgcagtgaaagacgggctcgcgaacctcaacatcagccagtgcaccgccctgacgcccccggcggtgcaggccgtctgcgactccttcccggcgctgcacacctgccccgagaggcactccctcatcatcagtggctgcctcagcctcacgtcagtccactgcgcctgcgccctccacccacaccgtgccgggagagccctgatggccaaccatgcgtactaataaacatgttggtggctttgcgctgatagttctcgcgaatggggacgcatgcctggggggtgatggcgtcgtccaggtgtagaggaagctccctgtgtacataaactcgaaacttggcggtgtgataaggcactgctgtggtaggactttgtgtgataatcatggagtggcgaatttctagagaatggcatgtactccagtgctacctggacattgaccagaaaaaatgtggtatctagttgccttctgtgtaagggcggacgtgttgggatgttcatgcattttcattaatctgataccttaatctgactaaaatctagattaagttacatatcaaatcattactttaatctcataacttaatctttatttagattcttgaattgagctgaaagatctaatgtgtacttattttatggactgcctaaatgttgatgccaaatgcctggctctgttgaaaattttgcataggagaaaata

SEQ ID NO: 211937 - DNA, 4202 bp, Zea Mays
ctccgtgcctccgtgcctccgtgggcctgttccgacgtcatcgtccgcatcgcacggccgtttattgaggaacaattcgtttttattctcacgttcattccgcgggcgcagggttctctctcgtggcgatcgctgaccgtagcggccaccctccgccaggtggccaggttttcgtgtggccctccgccatgtcttcgcaggaccctccgccggcgacgagcacccaaaagaagcaatcggagagtttggtaaacctactggcagaggcaagcaggttctaccgcaaagcatataatgaactgttctcaggtttaattactgagtgggagcctgaatcatctactaatactcctgactatatgctttttgggtggcatctcttcttaacgcttcgttcgagatcaccagaattgttcaaggacctggtgtcctgcatccatggattagttgctgtattggccatactattggttcacgtgccagctaaattcaggaccttcacgattgaaggctcttctcacttaatcaaacaaactgagaaaggcgtggatcttattgcttctttatgtcataattatcatacctctgaagaatgtttgaaagaaatgatggacaagtctcacaaggcaatagaagaagttttcagtatgaaagcactaagtgcttcagagtgcaaaacagagaatttggataagatagacacagatcgcctgatgtatttcaaaggtctcattgatatggagtgtttccagtcaaatctggaaaaaatggagaaactatgtaattctaataactgtgaagcggagcttgattttaaattaattttgaccaataatgattatattccctgtgccgagaatttgtcgagggattccactaatttaggatgttcaaagtgtgcctttgaaacattggcatctcccacaaagacaataaagaacatgttgactgttcctagttcccctttgtcacccaccaacggtggttcagtcaagattgtgcaaatgacaccaataacttctgccatgacgacagctaagtggcttcgtgaggtgatatcttcattgccagagaagccttcatctaagcttcagcagttgatgtcatcatgcgatagagatttgacaaatgccgtcacagaaagggtcagcatagttctggaagcaatttttccaaccaagtcttctgctgatcggggtggctcattaggcctcaattgtgcaaatgcctttgatactctatgggcagatgccagaaaaatggaggcttccaagttgtactatagggtattagaggcaatctgcagagctgagttacaaaacagcaatgtaaacaatctaactccattgctgtcaaatgagcgttttcaccgatgtttgattgcatgttcagcggagctagtattggcgacacataagacggtcatcatgatgtttcctgctgttcttgagagtactggtctaacctcatttgatttgagcaaaataattgagaactttgtgagacatgaagagaccctcccaagagaattgaaaagacacctaaattccttagaagaacaaattttggaaagcatggcatgggagaaaggttcatcattgtataactcactgattgttgccaggccatctgttgcttcagaaattaatcgctttggtcttctggctgaatcaatgccatctcttgatgacttagtggcaaggcagaatattcatattgagggcttgcctgctacaccatctaaaaaacgtgctgctggtcgagacgacaatgctgatcctcgatcaccaaagagaccatgcaatgaatctaggagcacagtagtagaacacaatttgcagacacctccacccaagcaatgccacatggtgttgactagtttgaaagcaaaatgccatccactccagtccacatttgcaagtccaactgtcagtaatcctgttggtgggaacgaaaaatgtgctgacgtgacaattcagatattcttttccaaaattctgaagttagctgctattagaataagaaacttgtgtgaaaggattcaatatatggaacagacagagcgtgtctataatgtcttcaagcagattcttgatcaacagacaacattattttttaatagacacatcgatcaacttattctttgctgtctttatggtgttgcaaaggtttgccaattagaactctcattcagggagatactcaacaattacaaaaaagaagcacaatgcaaaccagaagtttttttaagcatctatattggaagtaggaatcataatggggtattaatatcacgccatgttgatatcattactttttacaatgaggtctttgttccagcagccaagcctttcctggtgtcattaatatcatctggtactcgtccagaagacaagaagaatgctagtggccaagttcctggatcaccgaagctatctcctttcccaaatttaccagatatgtccccaaagaaagtttcagcttctcataatgtatatgtgtctcctttgcggcaaaccaagatggatttactgctgtcaccaagttccaggagtttttatgcatgcattggtgaaggcacccatgcttatcagagcccatctaaagatttggctgctataaatagccgcctaaattataatggtcggagagtaaacagtcgattaaactttgacatggtgagcgactcagtggtagctggtagtctaggccagccaaatggtggttctacttccttggatcctgcagctgcatttagccccctttcaaagagaaagccagatacttgatcaaatataaatggcgatctctctcgtatatagctcacagctccatagcagtctattcttctgaataagtgggttgactggagtgatttaactgtacatgtatgtgttagtgagaaccagcagtttataggcagcaaactgttttaaattagctttgaggttttatcaccatttccctgctgattgaacatattttagattgtaacatctgctttgtagaatgctaatgaatctttagttttcagtgggttgacattaaaaatccttatcctagttggctggttgttgggagacattcatcaaggttatatttggtcgtcaaatagtactgtacttgattcatatctttcatatttttcactagcgttggcaaccgtaaattgctttcctgactaggaacatattcttcacaagtatggcaactctaaactatttgaccttttatattctcatttttaagtactttctctatttctgctacttttgtactgtgtatttccagcttctccaccagactgattgttagagtgtatgctcctatattatccatgtatgtgtaaaatgggctgctagcccattagggttagggttcccctgggtctatatatgtaaccaccctctatgcaatagaagttgaatatcagtttctatcactaatgattccatattcagtgggctgcaagtgatttgacatacgtgccttatccttcagggtggttggttttctgaatcaatcaatccatttcctcggacacaagataatttttgcgagataaggaaaatctgaaatgctatcaccatttaaaacattggctcctggaagttcaggttaggtgttgctgtagaatgagatggttaccatctttacaagctcaggctatatgatttcagcagcactgtaacctggggtgcaaatgttaaggccctgcaagcactttccaggccacaccaattctgcttggttcttgaagatacattcttcctatggtgccccctatataaaagccatttctggttgttatgtttatccttgacatgtcaacagattagtgttgggttgcagtcatgcggtccttaagtctcggagaaggcgagaagtcattgctgctagcattgtgatcgtcggccacgaaagtaatcaaaaagtgagagctacttgttcctagcaaatggagaagggcgatatataggtttatgatcaaattcagtgtatgcaagcagcatattttgtttagagttagcttttgaggttcatcatttcatttcacagctgattctctatgttgtaactccttagtcgtgtagaaattagaatgctatctgcttaatttttagtgaataatttgctagtatattttttaatgtaattgcagtagctctgcctcttcattaaggaattgaccccgttttaag

SEQ ID NO: 211938 - DNA, 3785 bp, Zea Mays
ctccgtgcctccgtgcctccgtgggcctgttccgacgtcatcgtccgcatcgcacggccgtttattgaggaacaattcgtttttattctcacgttcattccgcgggcgcagggttctctctcgtggcgatcgctgaccgtagcggccaccctccgccaggtggccaggttttcgtgtggccctccgccatgtcttcgcaggaccctccgccggcgacgagcacccaaaagaagcaatcggagagtttggtaaacctactggcagaggcaagcaggttctaccgcaaagcatataatgaactgttctcaggtttaattactgagtgggagcctgaatcatctactaatactcctgactatatgctttttgggtggcatctcttcttaacgcttcgttcgagatcaccagaattgttcaaggacctggtgtcctgcatccatggattagttgctgtattggccatactattggttcacgtgccagctaaattcaggaccttcacgattgaaggctcttctcacttaatcaaacaaactgagaaaggcgtggatcttattgcttctttatgtcataattatcatacctctgaagaatgtttgaaagaaatgatggacaagtctcacaaggcaatagaagaagttttcagtatgaaagcactaagtgcttcagagtgcaaaacagagaatttggataagatagacacagatcgcctgatgtatttcaaaggtctcattgatatggagtgtttccagtcaaatctggaaaaaatggagaaactatgtaattctaataactgtgaagcggagcttgattttaaattaattttgaccaataatgattatattccctgtgccgagaatttgtcgagggattccactaatttaggatgttcaaagtgtgcctttgaaacattggcatctcccacaaagacaataaagaacatgttgactgttcctagttcccctttgtcacccaccaacggtggttcagtcaagattgtgcaaatgacaccaataacttctgccatgacgacagctaagtggcttcgtgaggtgatatcttcattgccagagaagccttcatctaagcttcagcagttgatgtcatcatgcgatagagatttgacaaatgccgtcacagaaagggtcagcatagttctggaagcaatttttccaaccaagtcttctgctgatcggggtggctcattaggcctcaattgtgcaaatgcctttgatactctatgggcagatgccagaaaaatggaggcttccaagttgtactatagggtattagaggcaatctgcagagctgagttacaaaacagcaatgtaaacaatctaactccattgctgtcaaatgagcgttttcaccgatgtttgattgcatgttcagcggagctagtattggcgacacataagacggtcatcatgatgtttcctgctgttcttgagagtactggtctaacctcatttgatttgagcaaaataattgagaactttgtgagacatgaagagaccctcccaagagaattgaaaagacacctaaattccttagaagaacaaattttggaaagcatggcatgggagaaaggttcatcattgtataactcactgattgttgccaggccatctgttgcttcagaaattaatcgctttggtcttctggctgaatcaatgccatctcttgatgacttagtggcaaggcagaatattcatattgagggcttgcctgctacaccatctaaaaaacgtgctgctggtcgagacgacaatgctgatcctcgatcaccaaagagaccatgcaatgaatctaggagcacagtagtagaacacaatttgcagacacctccacccaagcaatgccacatggtgttgactagtttgaaagcaaaatgccatccactccagtccacatttgcaagtccaactgtcagtaatcctgttggtgggaacgaaaaatgtgctgacgtgacaattcagatattcttttccaaaattctgaagttagctgctattagaataagaaacttgtgtgaaaggattcaatatatggaacagacagagcgtgtctataatgtcttcaagcagattcttgatcaacagacaacattattttttaatagacacatcgatcaacttattctttgctgtctttatggtgttgcaaaggtttgccaattagaactctcattcagggagatactcaacaattacaaaaaagaagcacaatgcaaaccagaagtttttttaagcatctatattggaagtaggaatcataatggggtattaatatcacgccatgttgatatcattactttttacaatgaggtctttgttccagcagccaagcctttcctggtgtcattaatatcatctggtactcgtccagaagacaagaagaatgctagtggccaagttcctggatcaccgaagctatctcctttcccaaatttaccagatatgtccccaaagaaagtttcagcttctcataatgtatatgtgtctcctttgcggcaaaccaagatggatttactgctgtcaccaagttccaggagtttttatgcatgcattggtgaaggcacccatgcttatcagagcccatctaaagatttggctgctataaatagccgcctaaattataatggtcggagagtaaacagtcgattaaactttgacatggtatgtctcatgttgactttgcttttgtaatggtactgttggcttcattgctggaatgctggttataatcaacctttactgctctatattgttctttttttggtttgcacaaccagggtggttggttttctgaatcaatcaatccatttcctcggacacaagataatttttgtatgttacacttcccaaaattgcaattaattcagaagtctgcctactttcattcagttagttctcagcaacactgaaaggatatgaatcagtcaacccgatagatgtttatctggttattccaaacaatctgacatcacatctgtttctgcaggcgagataaggaaaatctgaaatgctatcaccatttaaaacattggctcctggaagttcaggagtcgttcttaaacagcaactgctccttcgttcagcgcttctcatttctgattgtattgaccgagagcatccacctttccttctggtatcaactgaatgagttgccgacaccgacccatctgcgcataatggcaggttaggtgttgctgtagaatgagatggttaccatctttacaagctcaggctatatgatttcagcagcactgtaacctggggtgcaaatgttaaggccctgcaagcactttccaggccacaccaattctgcttggttcttgaagatacattcttcctatggtgccccctatataaaagccatttctggttgttatgtttatccttgacatgtcaacagattagtgttgggttgcagtcatgcggtccttaagtctcggagaaggcgagaagtcattgctgctagcattgtgatcgtcggccacgaaagtaatcaaaaagtgagagctacttgttcctagcaaatggagaagggcgatatataggtttatgatcaaattcagtgtatgcaagcagcatattttgtttagagttagcttttgaggttcatcatttcatttcacagctgattctctatgttgtaactccttagtcgtgtagaaattagaatgctatctgcttaatttttagtgaataatttgctagtatattttttaatgtaattgcagtagctctgcctcttcattaaggaattgaccccgttttaag

SEQ ID NO: 211939 - DNA, 4013 bp, Zea Mays
ttccgacgtcatcgtccgcatcgcacggccgtttattgaggaacaattcgtttttattctcacgttcattccgcgggcgcagggttctctctcgtggcgatcgctgaccgtagcggccaccctccgccaggtggccaggttttcgtgtggccctccgccatgtcttcgcaggaccctccgccggcgacgagcacccaaaagaagcaatcggagagtttggtaaacctactggcagaggcaagcaggttctaccgcaaagcatataatgaactgttctcaggtttaattactgagtgggagcctgaatcatctactaatactcctgactatatgctttttgggtggcatctcttcttaacgcttcgttcgagatcaccagaattgttcaaggacctggtgtcctgcatccatggattagttgctgtattggccatactattggttcacgtgccagctaaattcaggaccttcacgattgaaggctcttctcacttaatgtgcctttgaaacattggcatctcccacaaagacaataaagaacatgttgactgttcctagttcccctttgtcacccaccaacggtggttcagtcaagattgtgcaaatgacaccaataacttctgccatgacgacagctaagtggcttcgtgaggtgatatcttcattgccagagaagccttcatctaagcttcagcagttgatgtcatcatgcgatagagatttgacaaatgccgtcacagaaagggtcagcatagttctggaagcaatttttccaaccaagtcttctgctgatcggggtggctcattaggcctcaattgtgcaaatgcctttgatactctatgggcagatgccagaaaaatggaggcttccaagttgtactatagggtattagaggcaatctgcagagctgagttacaaaacagcaatgtaaacaatctaactccattgctgtcaaatgagcgttttcaccgatgtttgattgcatgttcagcggagctagtattggcgacacataagacggtcatcatgatgtttcctgctgttcttgagagtactggtctaacctcatttgatttgagcaaaataattgagaactttgtgagacatgaagagaccctcccaagagaattgaaaagacacctaaattccttagaagaacaaattttggaaagcatggcatgggagaaaggttcatcattgtataactcactgattgttgccaggccatctgttgcttcagaaattaatcgctttggtcttctggctgaatcaatgccatctcttgatgacttagtggcaaggcagaatattcatattgagggcttgcctgctacaccatctaaaaaacgtgctgctggtcgagacgacaatgctgatcctcgatcaccaaagagaccatgcaatgaatctaggagcacagtagtagaacacaatttgcagacacctccacccaagcaatgccacatggtgttgactagtttgaaagcaaaatgccatccactccagtccacatttgcaagtccaactgtcagtaatcctgttggtgggaacgaaaaatgtgctgacgtgacaattcagatattcttttccaaaattctgaagttagctgctattagaataagaaacttgtgtgaaaggattcaatatatggaacagacagagcgtgtctataatgtcttcaagcagattcttgatcaacagacaacattattttttaatagacacatcgatcaacttattctttgctgtctttatggtgttgcaaaggtttgccaattagaactctcattcagggagatactcaacaattacaaaaaagaagcacaatgcaaaccagaagtttttttaagcatctatattggaagtaggaatcataatggggtattaatatcacgccatgttgatatcattactttttacaatgaggtctttgttccagcagccaagcctttcctggtgtcattaatatcatctggtactcgtccagaagacaagaagaatgctagtggccaagttcctggatcaccgaagctatctcctttcccaaatttaccagatatgtccccaaagaaagtttcagcttctcataatgtatatgtgtctcctttgcggcaaaccaagatggatttactgctgtcaccaagttccaggagtttttatgcatgcattggtgaaggcacccatgcttatcagagcccatctaaagatttggctgctataaatagccgcctaaattataatggtcggagagtaaacagtcgattaaactttgacatggtgagcgactcagtggtagctggtagtctaggccagccaaatggtggttctacttccttggatcctgcagctgcatttagccccctttcaaagagaaagccagatacttgatcaaatataaatggcgatctctctcgtatatagctcacagctccatagcagtctattcttctgaataagtgggttgactggagtgatttaactgtacatgtatgtgttagtgagaaccagcagtttataggcagcaaactgttttaaattagctttgaggttttatcaccatttccctgctgattgaacatattttagattgtaacatctgctttgtagaatgctaatgaatctttagttttcagtgggttgacattaaaaatccttatcctagttggctggttgttgggagacattcatcaaggttatatttggtcgtcaaatagtactgtacttgattcatatctttcatatttttcactagcgttggcaaccgtaaattgctttcctgactaggaacatattcttcacaagtatggcaactctaaactatttgaccttttatattctcatttttaagtactttctctatttctgctacttttgtactgtgtatttccagcttctccaccagactgattgttagagtgtatgctcctatattatccatgtatgtgtaaaatgggctgctagcccattagggttagggttcccctgggtctatatatgtaaccaccctctatgcaatagaagttgaatatcagtttctatcactaatgattccatattcagtgggctgcaagtgatttgacatacgtgccttatccttcagggtggttggttttctgaatcaatcaatccatttcctcggacacaagataatttttgcgagataaggaaaatctgaaatgctatcaccatttaaaacattggctcctggaagttcaggtgattaacaaacctccttcatctacatctgacattggcatgtatggtagagtccagcaactcttgtgatggcaggagtcgttcttaaacagcaactgctccttcgttcagcgcttctcatttctgattgtattgaccgagagcatccacctttccttctggtatcaactgaatgagttgccgacaccgacccatctgcgcataatggcaggttaggtgttgctgtagaatgagatggttaccatctttacaagctcaggctatatgatttcagcagcactgtaacctggggtgcaaatgttaaggccctgcaagcactttccaggccacaccaattctgcttggttcttgaagatacattcttcctatggtgccccctatataaaagccatttctggttgttatgtttatccttgacatgtcaacagattagtgttgggttgcagtcatgcggtccttaagtctcggagaaggcgagaagtcattgctgctagcattgtgatcgtcggccacgaaagtaatcaaaaagtgagagctacttgttcctagcaaatggagaagggcgatatataggtttatgatcaaattcagtgtatgcaagcagcatattttgtttagagttagcttttgaggttcatcatttcatttcacagctgattctctatgttgtaactccttagtcgtgtagaaattagaatgctatctgcttaatttttagtgaataatttgctagtatattttttaatgtaattgcagtagctctgcctcttcattaaggaattgaccccgttttaag

SEQ ID NO: 211940 - DNA, 3860 bp, Zea Mays
ctcacgttcattccgcgggcgcagggttctctctcgtggcgatcgctgaccgtagcggccaccctccgccaggtggccaggttttcgtgtggccctccgccatgtcttcgcaggaccctccgccggcgacgagcacccaaaagaagcaatcggagagtttggtaaacctactggcagaggcaagcaggttctaccgcaaagcatataatgaactgttctcaggtttaattactgagtgggagcctgaatcatctactaatactcctgactatatgctttttgggtggcatctcttcttaacgcttcgttcgagatcaccagaattgttcaaggacctggtgtcctgcatccatggattagttgctgtattggccatactattggttcacgtgccagctaaattcaggaccttcacgattgaaggctcttctcacttaatgtgcctttgaaacattggcatctcccacaaagacaataaagaacatgttgactgttcctagttcccctttgtcacccaccaacggtggttcagtcaagattgtgcaaatgacaccaataacttctgccatgacgacagctaagtggcttcgtgaggtgatatcttcattgccagagaagccttcatctaagcttcagcagttgatgtcatcatgcgatagagatttgacaaatgccgtcacagaaagggtcagcatagttctggaagcaatttttccaaccaagtcttctgctgatcggggtggctcattaggcctcaattgtgcaaatgcctttgatactctatgggcagatgccagaaaaatggaggcttccaagttgtactatagggtattagaggcaatctgcagagctgagttacaaaacagcaatgtaaacaatctaactccattgctgtcaaatgagcgttttcaccgatgtttgattgcatgttcagcggagctagtattggcgacacataagacggtcatcatgatgtttcctgctgttcttgagagtactggtctaacctcatttgatttgagcaaaataattgagaactttgtgagacatgaagagaccctcccaagagaattgaaaagacacctaaattccttagaagaacaaattttggaaagcatggcatgggagaaaggttcatcattgtataactcactgattgttgccaggccatctgttgcttcagaaattaatcgctttggtcttctggctgaatcaatgccatctcttgatgacttagtggcaaggcagaatattcatattgagggcttgcctgctacaccatctaaaaaacgtgctgctggtcgagacgacaatgctgatcctcgatcaccaaagagaccatgcaatgaatctaggagcacagtagtagaacacaatttgcagacacctccacccaagcaatgccacatggtgttgactagtttgaaagcaaaatgccatccactccagtccacatttgcaagtccaactgtcagtaatcctgttggtgggaacgaaaaatgtgctgacgtgacaattcagatattcttttccaaaattctgaagttagctgctattagaataagaaacttgtgtgaaaggattcaatatatggaacagacagagcgtgtctataatgtcttcaagcagattcttgatcaacagacaacattattttttaatagacacatcgatcaacttattctttgctgtctttatggtgttgcaaaggtttgccaattagaactctcattcagggagatactcaacaattacaaaaaagaagcacaatgcaaaccagaagtttttttaagcatctatattggaagtaggaatcataatggggtattaatatcacgccatgttgatatcattactttttacaatgaggtctttgttccagcagccaagcctttcctggtgtcattaatatcatctggtactcgtccagaagacaagaagaatgctagtggccaagttcctggatcaccgaagctatctcctttcccaaatttaccagatatgtccccaaagaaagtttcagcttctcataatgtatatgtgtctcctttgcggcaaaccaagatggatttactgctgtcaccaagttccaggagtttttatgcatgcattggtgaaggcacccatgcttatcagagcccatctaaagatttggctgctataaatagccgcctaaattataatggtcggagagtaaacagtcgattaaactttgacatggtgagcgactcagtggtagctggtagtctaggccagccaaatggtggttctacttccttggatcctgcagctgcatttagccccctttcaaagagaaagccagatacttgatcaaatataaatggcgatctctctcgtatatagctcacagctccatagcagtctattcttctgaataagtgggttgactggagtgatttaactgtacatgtatgtgttagtgagaaccagcagtttataggcagcaaactgttttaaattagctttgaggttttatcaccatttccctgctgattgaacatattttagattgtaacatctgctttgtagaatgctaatgaatctttagttttcagtgggttgacattaaaaatccttatcctagttggctggttgttgggagacattcatcaaggttatatttggtcgtcaaatagtactgtacttgattcatatctttcatatttttcactagcgttggcaaccgtaaattgctttcctgactaggaacatattcttcacaagtatggcaactctaaactatttgaccttttatattctcatttttaagtactttctctatttctgctacttttgtactgtgtatttccagcttctccaccagactgattgttagagtgtatgctcctatattatccatgtatgtgtaaaatgggctgctagcccattagggttagggttcccctgggtctatatatgtaaccaccctctatgcaatagaagttgaatatcagtttctatcactaatgattccatattcagtgggctgcaagtgatttgacatacgtgccttatccttcaggtatgtctcatgttgactttgcttttgtaatggtactgttggcttcattgctggaatgctggttataatcaacctttactgctctatattgttctttttttggtttgcacaaccagggtggttggttttctgaatcaatcaatccatttcctcggacacaagataatttttgcgagataaggaaaatctgaaatgctatcaccatttaaaacattggctcctggaagttcaggttaggtgttgctgtagaatgagatggttaccatctttacaagctcaggctatatgatttcagcagcactgtaacctggggtgcaaatgttaaggccctgcaagcactttccaggccacaccaattctgcttggttcttgaagatacattcttcctatggtgccccctatataaaagccatttctggttgttatgtttatccttgacatgtcaacagattagtgttgggttgcagtcatgcggtccttaagtctcggagaaggcgagaagtcattgctgctagcattgtgatcgtcggccacgaaagtaatcaaaaagtgagagctacttgttcctagcaaatggagaagggcgatatataggtttatgatcaaattcagtgtatgcaagcagcatattttgtttagagttagcttttgaggttcatcatttcatttcacagctgattctctatgttgtaactccttagtcgtgtagaaattagaatgctatctgcttaatttttagtgaataatttgctagtatattttttaatgtaattgcagtagctctgcctcttcattaaggaattgaccccgttttaag

SEQ ID NO: 211941 - DNA, 797 bp, Zea Mays
aataacgtaataatggcaaaatagcaaatgcccctatcaccgcctccgacccatggacgtcgagggcgaggtccccgccgccgctgcagcggcgatggcgaacggcctgggcggcgccgatgaggcctctccggcgccggtctcgcccgagcagctcgacgtggaggcgtacgcggcgcagtactcggggcggacccgcctcgcccgaggcgtcttcgtcgcggaccggtgcggggtggaggcgatacagctcgaggcgctgcggatggcgtacgacgagatcaagcgcggggaggacgtgcagctcgaccgcgacgtcgccgccaagatcggcggccgcctcggcccgcgctacggcctcgaccaggcgtgggtcgacaccatcacccgccgcgccgatcagcgcaatgagaagctcgagaacgagctcaacggatacagaactaacttaatcaaagagagcatcagaatgggctacaatgacattggcgatttcttctatgcccatggccaactttcaaaagctacatcaggactcgggactattgcaccacttccaaacatatagttcagatgtgtatgaatgtgattcaggttagcattgagctggggcaatatgcacacatgtttcaaactatgtcagcaaagcagagcaaaccccggactctctggatcctatcattgttgcaaagctgaaagcagctgcaggcttggccaacatggaaacaaagaaatacaaacttgctgcacgcaaggcgcttgagtttggagcttcctccgcgtttggcgtgtacggc

SEQ ID NO: 211942 - DNA, 6534 bp, Zea Mays
ctaggatcaaggcgcacatcgcggcctcgcgagcggacgccagccacccagccccgtccgtccgatctggccccttgaccgcttaagctcacctcagatacgattagttacactttttgttccttccgtaatcgtcgccttcgatttgttgctgctgcagctgctggccaggccatactactagagagggacgccctcccttcctctcgcttggcttacacttctccccatcccccaacacaaacccaacacaactccgccgtgtcgcctacacgcactggccacgaccaaaccctaggcgccgccgcccccggggcccccagggctgtcgtagggaggagaaggaggaggagatcggtgaggagagaaggggatttatgtcccagcgaggggacaggggcgaggggcacgccaggagacccggccggtccagcagcttcggcggccaccgcggaggcggagtcggtggcgcgggcaagggcggcgcgggctcctcaggccagcctcctctctcatccaaccgcagctttagaaagcctggcaatggccacggcgggcaccagagggtggtgaaccagcccgacaccactggcttccagcctgcaccagcgcctggcacccaccaaactcctgcgcgcccgccacctgcgcctcagaatgcagccgtgcatgttcctgtctccgcatcacggccacaacaccaggatccacatgtgtcatcttcattgtctgccagcgagaaaccggctaatccgccgttaccactaccgaaagctacacatgctgctccaagggctctaccaaaaaactctaacacagcgcttcctcagggaggatcgcaaggagaaccatcaaaggggtttaactttcagtttggtagtataaatatgaatgggctaccgcaatttcctgccaggacaagctcagctcctccaaatttggatgaacaaaaacgtaatcaggcacttgtggaggaacttaaggttacacctgcccctgtgcaaccagctctgaaacagcagcagttgcagcagcagccacagctgccgccacagctgccgccgcagcaggttccccagcagccacagcagcagtcagcaagaaaggaagctgttggttccagccaacataactccatcaatccccatattacatcgcaattgaaaagagatgtgcacccatctccatctgtccctaatgttacatctcttagacctaccgttcaaattcctggtgttcagatgccgatccccttccatcaccagccggcacaagtttccttgcagtttggtggtcatggggcacaactgcagcctcaagtcgtgcctagctcatatcaaatgtcaatgggattgacaggcagtagtacacaagtcccacagcagctgtatgcccctactctgcagcatcatcaattgcaacagcaagcaatgatgcatcctggccagggtatgggttatgttccttccgttgctcaccaattcccacagttgggaaacattcctatgaacatcgcatcacaatatgctcagcaacagccaaacacgcatgctgctgcacgtaagactactgtaaaaattactcatccagacactcatgaagagttgaagctcgataagaggatggactcttctgggcagagagctgcaccgagcttgacacaacaatcccagcccgttggtaattatgctcctcatattggcttctttcatcagccacagagttcctacaatcagtcaggaatgtattaccctactacagctggtgtgaaccaggttgctactggatcttcaggtcctagatataattatcctgtcactcagtctgggcaagcgatgacatatatcagtccatctgcagtgcctccggtatctgctcagtcccaatatacagttaaaccgcaccctattgggttggtgactgaaaaatctagtactcatgtcacaataagtgctccaccagctaaatctgagcctcctaagttacgtgctgctgaggattctgcgtcaagtcggcaaaaggataatgaaattgtttctgggatcgctgtttctagtaaatcaatccttgagaaggaggagagtaacgatcctttagtcacagtgaagcattcgactgtaataagcccgtccttgccaattcatggtgcaaaatcacaaacttcagtgacatcatctcctgttgtgaattcagtctcacctgtggcaggagttgatggaaaaagcatagaatctattcaaaggactggatcatttaatgataacaagaaaattgtcactaaaaaggatgtcaggatttcatctgaaccaccgaattcagcttcatctgttgaagataaggtgcaaactgtaaaggctggaggcagtgatcaccaggaaactaacaacctgaacaatgagttggatttggccagctcatcttcatgctcaacggttccactggcagtaagtaggatctttccagggaccgtttcagtgaatgctaacagcacagcagtaactgctgctgatgttcctgggacagatagaagctcaagaagaccatctcccgagggtactggtgagcctgcagtagaaagcttcactgttttggctgttgaatgtgacaaaaggaagcggactgatgaagttgcgacagatcctagcaaggataatatttcttctgatgctaccaaacatgaattgcctgatgcatgtgcagtggaccctactgaacaggcatcagcagtgacttctaatactgatgattcatatgcatcccctatagtaaataatcaggagcagttgctgaaagagtctgctccatctgcttctgaggaacaagctatgatgaataacttttccaagaattctgagacttcacattttcttgatagcaatgctgtggaagtgagaactggaacttcagagcctactgttcaaagttccaatgacgaaggtgactcggatattagtccagaaacagacctagctgtttgcaatgttcctctagtttcatctgagggacaactgaaatctgagagtagggctgatgatcaacaggctgctgaaccaacagtttcagttcgatcagtatccagggaaaagcctagtgttgagatcgccaggtcaaagtccgcagctgggaagaggaagaagaaaaaggaaatgcttgctaaggctgatgctgctgggtcttcagatctttataatgcatacaagggaccagaagagaagtctgaaatggttggtactgcagatggtgctgatagttcttcaatagttgacacaacacatgtgctgcttgatgaagcagaaagggatgttagtacgtttgcagatgattgtaagaaaaaagttgagcttgatgattgggaagatgctgcagacatgtctactccaaagctggcaccagattctggaaatcaggctggcaccacccaagtgctagattcagatacaagtgaagcaaacagcaggaagaaatattcacgggattttctgttgaccttgcaacaccactgtactggtcttcctgttggatttcagatgaatgaagctgtcaatgcaataatgaataatttggttggaaagtcttatgttgttgaccgggaaccttaccctagtcctggaaggggtttggaccgcccaacttctcgtggtgaccgccgtggtgctgccatgactgacgacaggtggactaagacgggtgttcctctcagtcctggtcgtgatgttcacatggacctgccaaatggaacatcagttgtcaactaccgtagctcaggaggtaatcatggtgttttaaggaatccacgtggccaaccatcaaatcaatatggtggtggtcttcttgcaggacctgtgcattctgttgggcctcaagtacctcgcagcggctctgattctgatagatggcagcaaaagggtctcatgccttcccctgtcacacccatgcaaacaatgcacaaagcagagaggaagtatgttgttgggaaagtttctgatgaggaggaggcgaaacagaggcagttgaaaggcattcttaacaagctgactccacaaaactttgaaaaactgtttgaacaagttaaggaagtcaacattgacagtgtagcaactcttactggggtcatttcacagatatttgacaaagctttgatggaaccaactttttgtgaaatgtatgctaatttttgcttccatctggctggtgccttgcctgacttcagtgaagacaatgaaaagatcacattcaaaagattgcttttgaataaatgccaagaggagtttgagagaggtgaaagggaagaagctgaagctgataaaacagaagaggaaggtgagatcaaacagaccaaagaagaaagagaggaaaagagaatccgtgctcgaaggcgcatgctgggaaacattaggttaatcggagagttgttcaaaaagaaaatgttgacagaaaggattatgcatgagtgcattaaaaaattgtttggaaattgtgatgatcccgatgaggagaacattgaagcactatgcaaattgatgagtacaattggtgagatgattgatcgtgcaaaggcaaaggagcacatggatgcatattttggtatgatgcataagatgtcaacaagtcagaagttgtcttctcgtgtaaggtttatgttgagagattcaattgacctcaggagaaataaatggcaacagaggcgtaaagttgaaggccccaagaagattgaggaggtgcacagagatgcagctcaagaaagacatgctcagtcaagtaggctaggacgtggtccagctgttagttctgtttcaagaagaggagcaccttctatggattatggctctcgtggctcatctgcgttagcatcctcaagttcccaacaagggagcattcgtggaatgcctccacactcgcgtggttcacaagacatccgatatgaggagaggaaccagtttgacaatagaactgttcttccccagcgtgtagtcaaggatgaagctatcactcttgggccacaaggtggccttgctaggggtatgtctataagagggctgtcaccagcatcaaatactgaacttccttctgttattgaccaccggagaatattatctggttctaatggttataactctgtgactgattggacatcatcatctggaagagaagattctagctcaataattccagatcgaacctctggccgaacttctgcttctagtcaatctgctggaccttcacagaggcctgccagccaggaaggccgtccaggaagtaaatcatattctgaggatgaattgagagaaaaatctgttttggccattcgggaatattacagtgcaaaagatgaaaaggaggttgctttgtgtattgaggagctgaatgctccgagtttctatccttctgttgtatcactttgggtaaatgattccttcgagagaaaagacatggaaagagagttgttggctaaacttctcgtcagcctttgcagtggtcgacataatttgttgagcaagcaacaactcagtgatggcctttcatctgttcttaccttattggaagatactctaagtgatgctccaagggccaccgagtaccttggacgactttttgcaaggtttgtggaggaaagcatattgctcttggaagagacaaaggggattcattcttgaatgaggttaagtcaacttcgagtttaaaattggttgatttcagaccacatcatcttaagcgatcaaagttggatgccttcatgtagctacatgagttattattacctgattcaccaatgggtgcggccgccaagcagtttactttgttcgcacgcaaatacccatcggcctttttgatgtactgtgaaaaattcctctgatgctactcctacttgctgtacctgatcgtgcactatttataagatggaaggcgatgggtcacccattttttcagagttgatgctggttgtaaactactgtcaatgaagggtcatgggtgggaagcagctagctaggcccccataagaggatcagggaatatttttgcgatcacagggagaagtctgctaaccaatattagttggtagttgggggaactgtaggttgaacttaatgcctcctgcgggcttctgaccaaatactcctttgtgatcagaattggtagtcggttaacttagcggcattttcgtgatagccaatgtttctcgtgatggtctgaatatgttgatgttgcttaaattttgctgtaatttgctatttttcctcgttctttgtttttgtacttattgagaattgatgcctcggattctctgatgtatgtatgattgggctcaggctcagggcactttgccatccctattttgtcatttcggttcttccttagcgtggaacgtaatgagtgtgagaaagtaaaattggtgaaagtgaaaatgggaactgagagcactttttttattgcattctcatacaagtgaaaagtcacatgcgaagacgtgcgaaagtgtagaatgtgcaaagggatatgtcccatgatcatttggttcatgcgactagtgcagtg

SEQ ID NO: 211943 - DNA, 1407 bp, Zea Mays
cagcatcccgtccgtccgatccgtccgcacggcgtatctccgccgtcggccgcagccggcgtctcctggccacacccgccgccccggcccggcaggcggcagtttaatacaaaccaggcttgctcgtggcggcaaaaaaccaacgtgcttgatctccctccgccactccatccatctcctcgctcccagtccccgggaagcatggcgtccgtcaccgcccgcgccccggtagcggcccttcgcccgtcgtcggcatcgctcaagtcgtcgtcggccttccttggccactctagccgcctcggccgcaccgcgtctcccacgaggcgcagcctcaaggcggaggccaagggcgagtggctccccggccttccctccccctcctacctcgacggcagcctggcgggtgacaatggcttcgacccgttgggcctggcggaggaccccgagaacctgcggtggttcgtgcaggcggagctggtgaacggccggtgggccatgcttggcgtggccgggatgctcatcccggaggtgctgaccaaagccgggctgatcaacgcgccgcagtggacatcaagaaccccggcagcgtcaaccaggaccccatcttcaagagctacagcctgccgccgcacgagtgcggctacccgggcagcgtcttcaacccgctcaacttcgcgcccacgctcgaggccaaggagaaggagctcgccaacgggaggctggcgatgctggcgttcctgggcttcctgatccagcacaacgtcaccggcaaggggcccttcgacaacctgctgcagcacctgtctgacccatggcacaacaccatcatccagaccttctccggttgagtcgaggtcgaggagggatacgatccatcgctggtgagctgatatggactggaaggcaaacattgaaaccttaagttcctttctggatcagtttgtgtgtgttgttaatctatctggagggtacagattcgggccgtgttgcaatgcatgcatggtctgaagggagcgagggctgaggagtgactggtatgtacattagctgaaggggatattaagggtagagatcgtttgatcagtatcatctgtatatccccatgcatggggtttcgttttgtgcgcttacttctggcttgccagcgtatggttcaatgtggaaacacatgtattagtacgagaactagtagacttataattaatataaatcaagcacgtacgacttctagctaaaaacaactcaacctactcggaagccctgagaatggtaagcaaccacattagggcttgttcggttattcctatcccatgtggattggatgggattgaaaaaaattgtgaaagattttgacttgtttggaattgaaacccatccaatcccacccaatccacatggattgagagc

SEQ ID NO: 211944 - DNA, 3435 bp, Zea Mays
gacgcaggggagagactgagagctacggtagtactagtatataaacaacgccagcagcacacgtatgcgatgggagaacaaaaagcctagcacaacgccagcagcacacacgttacctgcggcgcgcagatagcagccgcagcagcagcagtaacacaagacgggcagagatgacgggcgccggcgtcgcgacggtggccatggttgtggtcgccgcgttagcggcggcgggaagaggagcggggggcgaaagaggcaacacgacggccggccgcggagaggtcacgtacgacggcagggcgctgatcctggacggcgccaggaggatgctcttctccggcgacatgcactaccctcgcagcacgcctgagatgtggccggacctcatagcgaaagccaagaaaggcggcctggatgtcattcaaacatacgtcttctggaacgcacacgagcctgttcaggggcagtttaacttcgagggaagatacgacctggtgaaattcatcagagaaatacatgcccaaggtctctatgtaagcctcagaataggcccctttgtcgagtcggagtggaaatacggaggcttacccttttggttacgtggtatccctaacattacattcagatctgacaacgaacccttcaagaggcatatgcaaaagtttgttaccaaaatagtgaacttgatgaaggatgaaagactattctacccacaaggaggccccataatcatatcacagattgaaaatgaatataagctagttgaggctgcatttcattcaaaagggtcgtcttatgttcactgggcagcggcaatggcagtaaatctacagacaggtgttccatggatgatgtgtaagcaggatgatgccccagatccaattggccaaattcgccaaacaaaccagctttatggacagaaaactggacatctcggtgcagcaagaactcatgcatttcttctaatatttctaccatatactccgtttggtaaaacacctaacacaatgtttcccctgaatacagctatcctttatatggtcaagatcaaagatatagatcagcagcagaccttgcctttgcagtggcactgtttatagcgagaaagaaagggagctttgtaaactactacatggtagaaaaaatgaagctatagacctgacaaaactattttcaaaagaatctcttaattattctgttactcctctcacatgagttaagatttatgtagtaccatggtggaacaaactttggaagggttgcatcttcctatgtaacaacaagctattatgatggagcccctcttgatgaatatggattaatatggcaaccgacatgggctcatctcagagaactgcacgctgcagtaaagcaatctgcagagacattactttggggagcatattctaatcattcatttggtcaacaacaagaggggcatgtttttgcaacagattctgggtgtgtggctttcctggtaaactttgacatgcataaggtatcaaccattcaatttggtgaaggggtgttccagctagctcctaagtccatcagtatcctctcacaatgcagggatctaatatttgaaacaggcaagataaatgctcagcatggtttaagaacagcacagtaccaagcaaaatctcacatgtcaaaaaccagctatgcgaacacctctcaactacaaaagacgaaacagattatctctggtacctttccatgtacaactctagaagaaatgagaatggtgacttagtgcttaacgttgaggcacatgcacatattttacatgctttcattaacaatgattatgttggaagtgtgcacgggagtcatgataaacctggcaacatcgttcttaatgtatctatttcactaagggaaggacaaaactccatatccctgttatgcgtcatggttggttcaccggtacaatggctcaacttattatatatggaatatggtcacaaacaacaaaagctaacctattgccatctgtccgtgttgcttgaaatgaaataaataaatgactagaccgtaccttgatgttatcaatttatcacatccacagctggtaatactattcagatccaataggggaaaagaggaaaagaaaaaatataactccaaagtccacataagtatttaaaagagtaaaatgcaccgtaggtccttgaatttttcccgtattctcatctaggttcatgaattcacacagtggtccaagtgtgaatttatgtccatgattagacctatagtgaatttagaattaaccgcttgaaaagttcaaggaccaagatggtcactttgagaatttatggatctaaatgagaatataagaaaagcttaaggatccatggagcatttcattctatttagtgtgaaaaattattaaatcatagtacctagaatgtgcattaacctagggtttcatacacatactgtaaggactctggcgcatatatggagagaagaacctttggagtgcgaaagatgagcataaaacgaagacagcagagaccacattccataaacattgagctgtggaaacaccaagttggtttatatggagaaacaaataaaatctacacatctgaaggatcatctcatgcagaatggactgcatttagcaaatccatacatctgccacttatctggtataagacaacatttgacgcaccatggggaaatgatcctgtgacattgaacctaactagtatgggaaagggtgaagtgtggattaatggacagagcattggacggtactgggtctccttcaaaacccccagtgggcaatcttctcaatccatgtatcatatacctcgatattttctgaagactggagagaacctcctagtcctcatggaggaaactggtggcgacccactacagataacagtaaacacaatgtccattaccagaatctatggtactgtcagcgagttctctacaccatctctcttgtcacgcgaaaatcatccagctgttcacctccgatgcgagaaaggcaaacacataacagatatcgaattcgcaagctttggaaatcctgtccaagactgcagagggtctggacagagctgccaaggaagttgccacgcagaaatatctgaattcgttgtgaagaatgcttgcctaggaagaaggaagtgcgtccttccagtatgggcaaacaagtttggaggtgacccatgccctagaattgaaaaatccctttctgttgcggcgatctgtggatgaagagaagatgaaccacttcaatcaagttgtgaataatcaacaatgcaggagattccataatcatatcacagattgaaaatgaatataagctggttgaggctgcattttccattcaatcgggccaccttatgttaactgggcagcggcaatggcagaaaccccgaacaaacaccactagtaggaagcactcgcgtt

SEQ ID NO: 211945 - DNA, 3040 bp, Zea Mays
cacaacctacctcggcgcacagacgcaggggagagactgagagctacggtagtactagtatataaacaacgccagcagcacacgtatgcgatgggagaacaaaaagcctagcacaacgccagcagcacacacgttacctgcggcgcgcagatagcagccgcagcagcagcagtaacacaagacgggcagagatgacgggcgccggcgtcgcgacggtggccatggttgtggtcgccgcgttagcggcggcgggaagaggagcggggggcgaaagaggcaacacgacggccggccgcggagaggtcacgtacgacggcagggcgctgatcctggacggcgccaggaggatgctcttctccggcgacatgcactaccctcgcagcacgcctgagatgtggccggacctcatagcgaaagccaagaaaggcggcctggatgtcattcaaacatacgtcttctggaacgcacacgagcctgttcaggggcagtttaacttcgagggaagatacgacctggtgaaattcatcagagaaatacatgcccaaggtctctatgtaagcctcagaataggcccctttgtcgagtcggagtggaaatacggaggcttacccttttggttacgtggtatccctaacattacattcagatctgacaacgaacccttcaagaggcatatgcaaaagtttgttaccaaaatagtgaacttgatgaaggatgaaagactattctacccacaaggaggccccataatcatatcacagattgaaaatgaatataagctagttgaggctgcatttcattcaaaagggtcgtcttatgttcactgggcagcggcaatggcagtaaatctacagacaggtgttccatggatgatgtgtaagcaggatgatgccccagatccaattgtcagtgactcaatggccaaatttataccattatagtgacttataattggcatatgatttttgaaaatcaattcaatgttgatgatatgacttagattaatacctgcaatgggctcatctgtggggaaacatttccagggccaaattcgccaaacaaaccagctttatggacagaaaactggacatctcggtgcagcaagaactcatgcatttcttctaatatttctaccatatactccgtttggtaaaacacctaacacaatgtttcccctgaatacagctatcctttatatggtcaagatcaaagatatagatcagcagcagaccttgcctttgcagtggcactgtttatagcgagaaagaaagggagctttgtaaactactacatgtaccatggtggaacaaactttggaagggttgcatcttcctatgtaacaacaagctattatgatggagcccctcttgatgaatatggattaatatggcaaccgacatgggctcatctcagagaactgcacgctgcagtaaagcaatctgcagagacattactttggggagcatattctaatcattcatttggtcaacaacaagaggggcatgtttttgcaacagattctgggtgtgtggctttcctggtaaactttgacatgcataaggtatcaaccattcaatttggtgaaggggtgttccagctagctcctaagtccatcagtatcctctcacaatgcagggatctaatatttgaaacaggcaagataaatgctcagcatggtttaagaacagcacaggtagtgcaacctctcaatcatgctcataggtggaaattattcaaagaaccaattcctgcagtaccaagcaaaatctcacatgtcaaaaaccagctatgcgaacacctctcaactacaaaagacgaaacagattatctctggtacctttccatgtacaactctagaagaaatgagaatggtgacttagtgcttaacgttgaggcacatgcacatattttacatgctttcattaacaatgattatgttggaagtgtgcacgggagtcatgataaacctggcaacatcgttcttaatgtatctatttcactaagggaaggacaaaactccatatccctgttatgcgtcatggttggttcaccggactctggcgcatatatggagagaagaacctttggagtgcgaaagatgagcataaaacgaagacagcagagaccacattccataaacattgagctgtggaaacaccaagttggtttatatggagaaacaaataaaatctacacatctgaaggatcatctcatgcagaatggactgcatttagcaaatccatacatctgccacttatctggtataagacaacatttgacgcaccatggggaaatgatcctgtgacattgaacctaactagtatgggaaagggtgaagtgtggattaatggacagagcattggacggtactgggtctccttcaaaacccccagtgggcaatcttctcaatccatgtatcatatacctcgatattttctgaagactggagagaacctcctagtcctcatggaggaaactggtggcgacccactacagataacagtaaacacaatgtccattaccagaatctatggtactgtcagcgagttctctacaccatctctcttgtcacgcgaaaatcatccagctgttcacctccgatgcgagaaaggcaaacacataacagatatcgaattcgcaagctttggaaatcctgtccaagactgcagagggtctggacagagctgccaaggaagttgccacgcagaaatatctgaattcgttgtgaagaatgcttgcctaggaagaaggaagtgcgtccttccagtatgggcaaacaagtttggaggtgacccatgccctagaattgaaaaatccctttctgttgcggcgatctgtggatgaagagaagatgaaccacttcaatcaagttgtgaataatcaacaatgcaggagattccataatcatatcacagattgaaaatgaatataagctggttgaggctgcattttccattcaatcgggccaccttatgttaactgggcagcggcaatggcagaaaccccgaacaaacaccactagtaggaagcactcgcgtt

SEQ ID NO: 211946 - DNA, 3212 bp, Zea Mays
gatgggagaacaaaaagcctagcacaacgccagcagcacacacgttacctgcggcgcgcagatagcagccgcagcagcagcagtaacacaagacgggcagagatgacgggcgccggcgtcgcgacggtggccatggttgtggtcgccgcgttagcggcggcgggaagaggagcggggggcgaaagaggcaacacgacggccggccgcggagaggtcacgtacgacggcagggcgctgatcctggacggcgccaggaggatgctcttctccggcgacatgcactaccctcgcagcacgcctgagatgtggccggacctcatagcgaaagccaagaaaggcggcctggatgtcattcaaacatacgtcttctggaacgcacacgagcctgttcaggggcagtttaacttcgagggaagatacgacctggtgaaattcatcagagaaatacatgcccaaggtctctatgtaagcctcagaataggcccctttgtcgagtcggagtggaaatacggaggcttacccttttggttacgtggtatccctaacattacattcagatctgacaacgaacccttcaagaggcatatgcaaaagtttgttaccaaaatagtgaacttgatgaaggatgaaagactattctacccacaaggaggccccataatcatatcacagattgaaaatgaatataagctagttgaggctgcatttcattcaaaagggtcgtcttatgttcactgggcagcggcaatggcagtaaatctacagacaggtgttccatggatgatgtgtaagcaggatgatgccccagatccaattattaatacctgcaatgggctcatctgtggggaaacatttccagggccaaattcgccaaacaaaccagctttatggacagaaaactggacatctcggtgcagcaagaactcatgcatttcttctaatatttctaccatatactccgtttggtaaaacacctaacacaatgtttcccctgaatacagctatcctttatatggtcaagatcaaagatatagatcagcagcagaccttgcctttgcagtggcactgtttatagcgagaaagaaagggagctttgtaaactactacatggtagaaaaaatgaagctatagacctgacaaaactattttcaaaagaatctcttaattattctgttactcctctcacatgagttaagatttatgtagtaccatggtggaacaaactttggaagggttgcatcttcctatgtaacaacaagctattatgatggagcccctcttgatgaatatggattaatatggcaaccgacatgggctcatctcagagaactgcacgctgcagtaaagcaatctgcagagacattactttggggagcatattctaatcattcatttggtcaacaacaagaggggcatgtttttgcaacagattctgggtgtgtggctttcctggtaaactttgacatgcataaggtatcaaccattcaatttggtgaaggggtgttccagctagctcctaagtccatcagtatcctctcacaatgcagggatctaatatttgaaacaggcaagataaatgctcagcatggtttaagaacagcacaggtagtgcaacctctcaatcatgctcataggtggaaattattcaaagaaccaattcctgcagtaccaagcaaaatctcacatgtcaaaaaccagctatgcgaacacctctcaactacaaaagacgaaacagattatctctggtacctttccatgtacaactctagaagaaatgagaatggtgacttagtgcttaacgttgaggcacatgcacatattttacatgctttcattaacaatgattatgttggactctggcgcatatatggagagaagaacctttggagtgcgaaagatgagcataaaacgaagacagcagagaccacattccataaacattgagctgtggaaacaccaagtaaatcaatccaatccaacgttaattatgaattgatggatcaacatcacatgctcactttcaagtgtgcaatgtataggttggtttatatggagaaacaaataaaatctacacatctgaaggatcatctcatgcagaatggactgcatttagcaaatccatacatctgccacttatctggtataagacaacatttgacgcaccatggggaaatgatcctgtgacattgaacctaactagtatgggaaagggtgaagtgtggattaatggacagagcattggacggtactgggtctccttcaaaacccccagtgggcaatcttctcaatccatgtatcatatacctcgatattttctgaagactggagagaacctcctagtcctcatggaggaaactggtggcgacccactacagataacagtaaacacaatgtccattaccagaatctatggtactgtcagcgagttctctacaccatctctcttgtcacgcgaaaatcatccagctgttcacctccgatgcgagaaaggcaaacacataacagatatcgaattcgcaagctttggaaatcctgtccaagactgcagagggtctggacagagctgccaaggaagttgccacgcagaaatatctgaattcgttgtgaagaatgcttgcctaggaagaaggaagtgcgtccttccagtatgggcaaacaagtttggaggtgacccatgccctagaattgaaaaatccctttctgttgcggcgatctgtggatgaagagaagatgaaccacttcaatcaagttgtgaataatcaacaatgcaggagattccataatcatatcacagattgaaaatgaatataagctggttgaggctgcattttccattcaatcgggccaccttatgttaactgggcagcggcaatggcagtaagtctatgggatagtagcttatattgggcccactacataaccctggttgtcaagcttagacttcatcaccttctacacgcctcagggctcaggctgtacactagagtagcaaagctggacagttattaccatgtttccgtgtacatgtccaagaagtacacgcttcaggcttccagtcaatgaaagtaagagaaacccagacgaaccacttatgtggcgtcgcagatcaaatcttcagtggttctcattctgtatctgatggaaaagaaaaaaccacaaacagtgatgctgtgaccgtttggtctgaacgaacattttttttagataatggg

SEQ ID NO: 211947 - DNA, 3234 bp, Zea Mays
gatgggagaacaaaaagcctagcacaacgccagcagcacacacgttacctgcggcgcgcagatagcagccgcagcagcagcagtaacacaagacgggcagagatgacgggcgccggcgtcgcgacggtggccatggttgtggtcgccgcgttagcggcggcgggaagaggagcggggggcgaaagaggcaacacgacggccggccgcggagaggtcacgtacgacggcagggcgctgatcctggacggcgccaggaggatgctcttctccggcgacatgcactaccctcgcagcacgcctgagatgtggccggacctcatagcgaaagccaagaaaggcggcctggatgtcattcaaacatacgtcttctggaacgcacacgagcctgttcaggggcagtttaacttcgagggaagatacgacctggtgaaattcatcagagaaatacatgcccaaggtctctatgtaagcctcagaataggcccctttgtcgagtcggagtggaaatacggaggcttacccttttggttacgtggtatccctaacattacattcagatctgacaacgaacccttcaagaggcatatgcaaaagtttgttaccaaaatagtgaacttgatgaaggatgaaagactattctacccacaaggaggccccataatcatatcacagattgaaaatgaatataagctagttgaggctgcatttcattcaaaagggtcgtcttatgttcactgggcagcggcaatggcagtaaatctacagacaggtgttccatggatgatgtgtaagcaggatgatgccccagatccaattgtcagtgactcaatggccaaatttataccattatagtgacttataattggcatatgatttttgaaaatcaattcaatgttgatgatatgacttagattaatacctgcaatgggctcatctgtggggaaacatttccagggccaaattcgccaaacaaaccagctttatggacagaaaactggacatctcgctatcctttatatggtcaagatcaaagatatagatcagcagcagaccttgcctttgcagtggcactgtttatagcgagaaagaaagggagctttgtaaactactacatgtaccatggtggaacaaactttggaagggttgcatcttcctatgtaacaacaagctattatgatggagcccctcttgatgaatatggattaatatggcaaccgacatgggctcatctcagagaactgcacgctgcagtaaagcaatctgcagagacattactttggggagcatattctaatcattcatttggtcaacaacaagaggggcatgtttttgcaacagattctgggtgtgtggctttcctggtaaactttgacatgcataaggtatcaaccattcaatttggtgaaggggtgttccagctagctcctaagtccatcagtatcctctcacaatgcagggatctaatatttgaaacaggcaagataaatgctcagcatggtttaagaacagcacaggtagtgcaacctctcaatcatgctcataggtggaaattattcaaagaaccaattcctgcagtaccaagcaaaatctcacatgtcaaaaaccagctatgcgaacacctctcaactacaaaagacgaaacagattatctctggtacctttccatgtacaactctagaagaaatgagaatggtgacttagtgcttaacgttgaggcacatgcacatattttacatgctttcattaacaatgattatgttggaagtgtgcacgggagtcatgataaacctggcaacatcgttcttaatgtatctatttcactaagggaaggacaaaactccatatccctgttatgcgtcatggttggttcaccggactctggcgcatatatggagagaagaacctttggagtgcgaaagatgagcataaaacgaagacagcagagaccacattccataaacattgagctgtggaaacaccaagtaaatcaatccaatccaacgttaattatgaattgatggatcaacatcacatgctcactttcaagtgtgcaatgtataggttggtttatatggagaaacaaataaaatctacacatctgaaggatcatctcatgcagaatggactgcatttagcaaatccatacatctgccacttatctggtataagacaacatttgacgcaccatggggaaatgatcctgtgacattgaacctaactagtatgggaaagggtgaagtgtggattaatggacagagcattggacggtactgggtctccttcaaaacccccagtgggcaatcttctcaatccatgtatcatatacctcgatattttctgaagactggagagaacctcctagtcctcatggaggaaactggtggcgacccactacagataacagtaaacacaatgtccattaccagaatctatggtactgtcagcgagttctctacaccatctctcttgtcacgcgaaaatcatccagctgttcacctccgatgcgagaaaggcaaacacataacagatatcgaattcgcaagctttggaaatcctgtccaagactgcagagggtctggacagagctgccaaggaagttgccacgcagaaatatctgaattcgttgtgaagaatgcttgcctaggaagaaggaagtgcgtccttccagtatgggcaaacaagtttggaggtgacccatgccctagaattgaaaaatccctttctgttgcggcgatctgtggatgaagagaagatgaaccacttcaatcaagttgtgaataatcaacaatgcaggagattccataatcatatcacagattgaaaatgaatataagctggttgaggctgcattttccattcaatcgggccaccttatgttaactgggcagcggcaatggcagtaagtctatgggatagtagcttatattgggcccactacataaccctggttgtcaagcttagacttcatcaccttctacacgcctcagggctcaggctgtacactagagtagcaaagctggacagttattaccatgtttccgtgtacatgtccaagaagtacacgcttcaggcttccagtcaatgaaagtaagagaaacccagacgaaccacttatgtggcgtcgcagatcaaatcttcagtggttctcattctgtatctgatggaaaagaaaaaaccacaaacagtgatgctgtgaccgtttggtctgaacgaacattttttttagataatggg

SEQ ID NO: 211948 - DNA, 2462 bp, Zea Mays
ctcgtagccccaagtggccagctaattttagccgaggctccaactccaaggcaacggacgcacagaggatcaggaaggaagaaggggtcgcagccacaagggtgctttccaaatccacggctagcttacgcttacggaaagatcataggggcttactcggagcaaggaggcgcctgtttgcaacgacgaacgcgagattagagggagaaaccaaacgccgcaggggatgaagtcgccgttgcgcaggctcaggggcttcggccaccaccaccccaaggagcggagggggcaccagccgccgccggccaagctcgacgagctcgtctgcgccgcccatgaggtggaagacatgagaaactgctatgatggcttgatttcagctgcagccgctacaacaaatagtgtatatgagttttctgaggctcttgaagaactgggaggctgctttctcgcaaaaactgcactaaatggtgatgacgatgatagtggtagagtgctgatgatgctgggaaaggtccaatttgaattacaaaagtttgttgattcttatcggtcaaatatcatttatactatcacaaccccatcagagtctcttctcaaggagctacagacggtagaggaaatgaagcagcaatgcgacatgaaaagagaggcgtatgaagctacgagggcatcctatagagaaaaaggaaggtcaaggcattccaaaactgaaacatactctgcagaacaactgcaaagtgctctcgctgagtaccaagaagatgcagcgctgttcatatttcgcttaaaatcattgaggcaagggcaattccatagccttttaacacaggcttctcgccatcatgctgctcagttaagctttttcaggagagggctgaagtgtcttgaggcactcgaaccccatgtaaaagctatagctgagagacagcacattgactaccagttcagtggtcttgaggatgatgaatctgacaatgatgattacagctccgaccaggatgattgcagcgaagacggagagcttagtttcgactatgaaataaatgacaaggaccaagattttcttgcttcaggaggttcgatggatttagataaaagagatgtgaagaattccccgcagccagtaaaagaaagcatgcaggaagaggtcaaacaaaccaagggaaatgttttgactccacgagtgaagccagagttgaatgcacactcaggcaatttacaggatccatctgagagattatggcaaatgaagccatcttcagccaagcattcgtacaaacttccaatgccagttgatgacaagcaggatcccagaccagtaggtgctcccagatcacatcattcccagcagttggaaagtaagcctcgtgtctcgatgaatccgtggcactcatctccactgacgaaagacttcaggccgggtggccatgtgaaaacggtatcgagtacggaggcgacatcgacgttctcccagtcggtttctggctacaagaagacgaagagggagtcttggtctggtccaataccaagcagaccagggctaagcaagccatcttctctgaacggccacaggtcaccacccatggcacatcttgtgacgccaggaaatctacagtgccactctcggcagccatccgtgtccccaaaagtctcccccaagatgctgccacatccaacgagatcaccaacgatcagtgagctgcatgagctgcctaggcctccagcaaacgtggagtccctcaggccttctggtttgatcggttactctggtcctctggtacccaagcgtcagactgaaatgcctgcagcatcacaaaccccctcgccacttccgctgccgcccgctaccctcactcgcagctattccataccctcgaatagccagaggataccaatcatcactgtggacagactgttggaggctagaaatagcagggacggcagtgacaacttcttccccaccacttactccgttgtcactggctgatttgtcccaacagcaaggaacaaaaacaagtacaagtcgcacaaggataaagggagccttgtgacagagagcaaccaaatgcagactaatcttagttgattttgcaagtagtgacgtattgtaaattcatattcatgatattctttcattcaccatctttgttgcaaaggaaaaggatggaaaagtaatatatactttggttacataatgcaagaataaaagtcctttgttccttcaatctatccaatggatagaaaggaggaataatatcatgatcatagacatttcaataatacaattgaaatgctcgagaaagatcattactggtgtgtttcctttattattctttcctgactacaaataattacaggtataccatcgagagctgagatagtgatgcgaagataaagagaaaacatagcttcagagatacgataatcttaatctcccagaaggggcccctgtatccatg

SEQ ID NO: 211949 - DNA, 2006 bp, Zea Mays
atttagtgtttgcatcgcctaatcgaatgcgggtagagtgctgatgatgctgggaaaggtccaatttgaattacaaaagtttgttgattcttatcggtcaaatatcatttatactatcacaaccccatcagagtctcttctcaaggagctacagacggtagaggaaatgaagcagcaatgcgacatgaaaagagaggcgtatgaagctacgagggcatcctatagagaaaaaggaaggtcaaggcattccaaaactgaaacatactctgcagaacaactgcaaagtgctctcgctgagtaccaagaagatgcagcgctgttcatatttcgcttaaaatcattgaggcaagggcaattccatagccttttaacacaggcttctcgccatcatgctgctcagttaagctttttcaggagagggctgaagtgtcttgaggcactcgaaccccatgtaaaagctatagctgagagacagcacattgactaccagttcagtggtcttgaggatgatgaatctgacaatgatgattacagctccgaccaggatgattgcagcgaagacggagagcttagtttcgactatgaaataaatgacaaggaccaagattttcttgcttcaggaggttcgatggatttagataaaagagatgtgaagaattccccgcagccagtaaaagaaagcatgcaggaagaggtcaaacaaaccaagggaaatgttttgactccacgagtgaagccagagttgaatgcacactcaggcaatttacaggatccatctgagagattatggcaaatgaagccatcttcagccaagcattcgtacaaacttccaatgccagttgatgacaagcaggatcccagaccagtaggtgctcccagatcacatcattcccagcagttggaaagtaagcctcgtgtctcgatgaatccgtggcactcatctccactgacgaaagacttcaggccgggtggccatgtgaaaacggtatcgagtacggaggcgacatcgacgttctcccagtcggtttctggctacaagaagacgaagagggagtcttggtctggtccaataccaagcagaccagggctaagcaagccatcttctctgaacggccacaggtcaccacccatggcacatcttgtgacgccaggaaatctacagtgccactctcggcagccatccgtgtccccaaaagtctcccccaagatgctgccacatccaacgagatcaccaacgatcagtgagctgcatgagctgcctaggcctccagcaaacgtggagtccctcaggccttctggtttgatcggttactctggtcctctggtacccaagcgtcagactgaaatgcctgcagcatcacaaaccccctcgccacttccgctgccgcccgctaccctcactcgcagctattccataccctcgaatagccagaggataccaatcatcactgtggacagactgttggaggctagaaatagcagggacggcagtgacaacttcttccccaccacttactccgttgtcactggctgatttgtcccaacagcaaggaacaaaaacaagtacaagtcgcacaaggataaagggagccttgtgacagagagcaaccaaatgcagactaatcttagttgattttgcaagtagtgacgtattgtaaattcatattcatgatattctttcattcaccatctttgttgcaaaggaaaaggatggaaaagtaatatatactttggttacataatgcaagaataaaagtcctttgttccttcaatctatccaatggatagaaaggaggaataatatcatgatcatagacatttcaataatacaattgaaatgctcgagaaagatcattactggtgtgtttcctttattattctttcctgactacaaataattacaggtataccatcgagagctgagatagtgatgcgaagataaagagaaaacatagcttcagagatacgataatcttaatctcccagaaggggcccctgtatccatg

SEQ ID NO: 211950 - DNA, 1859 bp, Zea Mays
gcatgcgttgcccaccaccatctacatgttcctggcctctcttctcccagcttgttcctctctctgtcttctcttgtatcccgcgtctccggcaagcaaacggcgctagctcagcgccctgctgcacccgcccgcgcggccgtgtcatgaggaagctgtgcccgaacctggaccgcgacgactccctggacaccgtgctcgaggtgcccatccccgatgagatgctcatcaacgcccccggcgccgacaagcgccgcggcgccgggggcgccaacatgcgcgcctggctcaagaaccaggccttcgatcgcgccaccgtcgacgggcctgcctccgccaccgcggagctccagctgttcctcaacgtcgtcgggtcgccgctcatcccctgccccgtcccgcacgaccgcgctttcagccgctccatccgcgactcctctatccagtacatcgcggccacgggcgggcaggcggcgctgcagggggtgcggagcatgtacgccgtggggaaggtgcggatgtgcgcttccgagttccacctcggcgaccagacggtcaccgccgcgcagggccgcgccgaggtcggcggcttcgtgctctggcagaagacgcccgaggtctggttcttcgagctcataatggccggccacaagatgagcgccggcagcgacggcaaggtcgcgtggcggcagtctgccgccgagcactcccgcgtctcgcgcggcccgccccgccccctccgccgctctctccaggtaacggaaagcgccgaggcacacgtgcgggcacgcatagcgttcagccagaggcgtcttccatcgtgctcctttggttatttgcagggcctggatccacgctccatcgcgaacctcttctccgacgcggtgtgcataggcgagaagatcctcaacaacgaggagtgcttcatcctgaagctggaggctggcgccgcgacgctgcgggcgcggagcgctccggcgttcgacatcatccaccacacggtttggggctacttcagccagcgcacggggctgctcatccagctcgaagactcgcacctgctccgcatgaagtccggcaagggcgctcgccgcagcgagaacatcttctgggagaccagcatggagtccgtcatctccgactaccgctacatcgacggcatcaacatcgcgcacggcggccacaccaacgtcacgctcttccgctacggcgagggatccgtcaaccacaagcggaagctggaggagacatggacggtggaggaggccgatttcaacgtgcacggcctcaccacggactacttcctgccgccggccgacctcaagaaggacgacgaggatcacaataagtgatgggctagcgtttgatttcactcattaatcggagggcatagaaatgcattcatccagaggatttcttttatagggggtggcggtagttctttgttctttcatttccctcgttttctttttctggtttgaattgcagggaactacatggttaaaccatgtacatagcacaatagatatagggactgggtagcttgattaagttctttaattttggttggcacttttttatgaaacatctatagtgtgactaattggtttcattctgaatttcttatctttcaacaaaaaaaaaacggttgcaatgttcactcaacccttcagctgtgaagagctcatttcagacctttcggacattcgattctaaactggtagaccaacacatatcctccattttcatggaggcaaatcattaaatggatcaggaatgaagaatcactgtatcactatcaaaacattcggaagctatacaccctgttaccaaatcagtagaatgctatctctaacagc

SEQ ID NO: 211951 - DNA, 1670 bp, Zea Mays
cgcccgcgcggccgtgtcatgaggaagctgtgcccgaacctggaccgcgacgactccctggacaccgtgctcgaggtgcccatccccgatgagatgctcatcaacgcccccggcgccgacaagcgccgcggcgccgggggcgccaacatgcgcgcctggctcaagaaccaggccttcgatcgcgccaccgtcgacgggcctgcctccgccaccgcggagctccagctgttcctcaacgtcgtcgggtcgccgctcatcccctgccccgtcccgcacgaccgcgctttcagccgctccatccgcgactcctctatccatcgacagccaagtacatcatccagcagtacatcgcggccacgggcgggcaggcggcgctgcagggggtgcggagcatgtacgccgtggggaaggtgcggatgtgcgcttccgagttccacctcggcgaccagacggtcaccgccgcgcagggccgcgccgaggtcggcggcttcgtgctctggcagaagacgcccgaggtctggttcttcgagctcataatggccggccacaagatgagcgccggcagcgacggcaaggtcgcgtggcggcagtctgccgccgagcactcccgcgtctcgcgcggcccgccccgccccctccgccgctctctccagggcctggatccacgctccatcgcgaacctcttctccgacgcggtgtgcataggcgagaagatcctcaacaacgaggagtgcttcatcctgaagctggaggctggcgccgcgacgctgcgggcgcggagcgctccggcgttcgacatcatccaccacacggtttggggctacttcagccagcgcacggggctgctcatccagctcgaagactcgcacctgctccgcatgaagtccggcaagggcgctcgccgcagcgagaacatcttctgggagaccagcatggagtccgtcatctccgactaccgctacatcgacggcatcaacatcgcgcacggcggccacaccaacgtcacgctcttccgctacggcgagggatccgtcaaccacaagcggaagctggaggagacatggacggtggaggaggccgatttcaacgtgcacggcctcaccacggactacttcctgccgccggccgacctcaagaaggacgacgaggatcacaataagtgatgggctagcgtttgatttcactcattaatcggagggcatagaaatgcattcatccagaggatttcttttatagggggtggcggtagttctttgttctttcatttccctcgttttctttttctggtttgaattgcagggaactacatggttaaaccatgtacatagcacaatagatatagggactgggtagcttgattaagttctttaattttggttggcacttttttatgaaacatctatagtgtgactaattggtttcattctgaatttcttatctttcaacaaaaaaaaaacggttgcaatgttcactcaacccttcagctgtgaagagctcatttcagacctttcggacattcgattctaaactggtagaccaacacatatcctccattttcatggaggcaaatcattaaatggatcaggaatgaagaatcactgtatcactatcaaaacattcggaagctatacaccctgttaccaaatcagtagaatgctatctctaacagc

SEQ ID NO: 211952 - DNA, 1661 bp, Zea Mays
cgcccgcgcggccgtgtcatgaggaagctgtgcccgaacctggaccgcgacgactccctggacaccgtgctcgaggtgcccatccccgatgagatgctcatcaacgcccccggcgccgacaagcgccgcggcgccgggggcgccaacatgcgcgcctggctcaagaaccaggccttcgatcgcgccaccgtcgacgggcctgcctccgccaccgcggagctccagctgttcctcaacgtcgtcgggtcgccgctcatcccctgccccgtcccgcacgaccgcgctttcagccgctccatccgcgactcctctatcccaagtacatcatccagcagtacatcgcggccacgggcgggcaggcggcgctgcagggggtgcggagcatgtacgccgtggggaaggtgcggatgtgcgcttccgagttccacctcggcgaccagacggtcaccgccgcgcagggccgcgccgaggtcggcggcttcgtgctctggcagaagacgcccgaggtctggttcttcgagctcataatggccggccacaagatgagcgccggcagcgacggcaaggtcgcgtggcggcagtctgccgccgagcactcccgcgtctcgcgcggcccgccccgccccctccgccgctctctccagggcctggatccacgctccatcgcgaacctcttctccgacgcggtgtgcataggcgagaagatcctcaacaacgaggagtgcttcatcctgaagctggaggctggcgccgcgacgctgcgggcgcggagcgctccggcgttcgacatcatccaccacacggtttggggctacttcagccagcgcacggggctgctcatccagctcgaagactcgcacctgctccgcatgaagtccggcaagggcgctcgccgcagcgagaacatcttctgggagaccagcatggagtccgtcatctccgactaccgctacatcgacggcatcaacatcgcgcacggcggccacaccaacgtcacgctcttccgctacggcgagggatccgtcaaccacaagcggaagctggaggagacatggacggtggaggaggccgatttcaacgtgcacggcctcaccacggactacttcctgccgccggccgacctcaagaaggacgacgaggatcacaataagtgatgggctagcgtttgatttcactcattaatcggagggcatagaaatgcattcatccagaggatttcttttatagggggtggcggtagttctttgttctttcatttccctcgttttctttttctggtttgaattgcagggaactacatggttaaaccatgtacatagcacaatagatatagggactgggtagcttgattaagttctttaattttggttggcacttttttatgaaacatctatagtgtgactaattggtttcattctgaatttcttatctttcaacaaaaaaaaaacggttgcaatgttcactcaacccttcagctgtgaagagctcatttcagacctttcggacattcgattctaaactggtagaccaacacatatcctccattttcatggaggcaaatcattaaatggatcaggaatgaagaatcactgtatcactatcaaaacattcggaagctatacaccctgttaccaaatcagtagaatgctatctctaacagc

SEQ ID NO: 211953 - DNA, 2745 bp, Zea Mays
ccgaggcctcccacctcataattccaacccactgtgtgtgccgctgtagcagcgcgcgccaccaccgtcaacttctccccacctcgccgccgtctagatttcgtctcctgggctcgagcaaccgaagcaggcttggggtgttctcggagagaatcgttgcctcggccgatgccggccctgatgtaggtttctgctctgctttgcccggtgccaacgtctctcccggagtagcggttccgccgccccatgatctgccagttggaacacatgggcgttcacggaggaggttgctctgctggacagtgaccgcatttggtagcggtggaggaagacgacgaagaggaggaggagtaggccatgaaggaggtggccgaggaaaggtgccttgacccgcagctgtggcacgcgtgcgctggcggcatggtgcagatgccgcccgtgcgctcccgtgtctactacttcccgcagggtcacgcggagcacgcgcatggcggcggggccgcggacctcgccggggcgcgagcgctcccgtcgctcgtgctctgcagcgtcaccggggtgcgcttcctggccgatccggagaccgacgaggtcttcgccaagatccgcctggtgccggtcgcgcccggcgaggtggagttccgagagcccgatgagttcagcgtcgaccccgcggacgcccgggagaagctttcttccttcgccaagacgctgacgcagtccgacgccaacaacggtggcggcttctcggtgccgcgctactgcgccgagaccatcttccccaagctcgactaccgggccgacccgccggtgcagacggtgcttgccaaggacgtgcacggggaggtctggaagttccgccacatttaccggggcacgccgcgccggcatttgctcaccacgggatggagcacgttcgtcaaccagaagaagctcgtcgccggggactccatcgtcttcctgcgcactgagcatggcgagctgtgcgtcgggatacggcgtgtcaagcgggtgtcctgtggtggcatggagtgcatgtctgggtggaacgccccggggtatggggccttgtcggcattcttgaaggatgaggagggtaagatgatgaagagtcatggtgggtacatgagaggtagggggaaggtgaagatcacggatgttgtcaacgccgcaagtctagcagcgagcggacaaccatttgaagttgtgtactacccgagagctagcacaccggagtttgttgtgaaggctgcatcggtacagaacgcgatgaggaaccagtggtgcccggggatgaggttcaagatggcatttgagacagaggattcgtcaaggatcagttggtttatggggacgatagcttctgctcaggttgctgacccaatcagatggccaaattcaccgtggaggcttcttcaggtggcatgggatgaaccggacttgctgcagaacgtgaaatgtgtgaacccatggctcgtggagatcgtatcaagcattccaccgatccacctgggaccattttctccacctaggaagaagctgcgggtgccccaccatccggacttcccgttcgacggccagctgttgaatccgattttccacggcaacccactcggtccgagcaacggcggcggtgctcttcgctgtttctcggacatcgctcctgcaggcatacagggagccaggcatgctcagttcggtctaccactaacagaccgccagcttaacaagctgcacctcggtctgttccaaggcggcggttttaagcggcggcttgacgctatcactccaccatgccctatatccaggggctttgtgatcggcagtgcaccggtcgacgagagcgtctcttgcgtgctgacgatcggcacgccacgggccgcagagagatctgacgacaggaagaaaccacatctaatgctgttcggaaagcctatccttaccgagcagcagatgagctctagagggtcaagggaaacactctcccctgaggccactgggaacagttccgatggcagtgttcagaaaacgggaaacgtatccgatggctccggctcgtcgatctgcatcggttcctcgtcccgaggccgcgaggcttctaggctcgggttcgaatttgaagccgggcactgcaaggtatttgtggagtcggaggatgtcggtcgcaccatcgacctgtccgtctttggctcgtacgaagagctgtacggtcagttggccgacatgtttggaatcgagaaggcagaggtaatgagccacctttgttaccgtgatgctgctggcgctgtcaagcgtactggcgacgagccgttctgtgacttcatgaaagtggcacggaggctcaccatagtagagagcaccgaggggaggctgcagaaacctctcgtcgagtacatggcttgattgcatgactgttcgataaggcactctgaagcttgaggaagactgaagcttggagcgaatatgttttcgtttgcgtttgtctgccgtgaagcggaatcgcgatgtctgtctcgtcgtgtgaaagaaactcgtgtatcggattttcgtctgtcgtgacttggtcgttagaactctgtcgtggtcagttgtgttgcgcttgcgcttgggtcgaagttgatagatggcctctttgatgaactagcttggaataaagttcgagttgtggttaagaacaggtaccacaggatgaggcgcttggaggatgctgcgatgtgttcgtgagaggtctaggccgtcgtctcc

SEQ ID NO: 211954 - DNA, 2888 bp, Zea Mays
aagatcccccacgcaacaaggagaggtgtccgaggcctcccacctcataattccaacccactgtgtgtgccgctgtagcagcgcgcgccaccaccgtcaacttctccccacctcgccgccgtctagatttcgtctcctgggctcgagcaaccgaagcaggcttggggtgttctcggagagaatcgttgcctcggccgatgccggccctgatgtaggtttctgctctgctttgcccggtgccaacgtctctcccggagtagcggttccgccgccccatgatctgccagttggaacacatgggcgttcacggaggaggttgctctgctggacagtgaccgcatttggtagcggtggaggaagacgacgaagaggaggaggagtaggccatgaaggaggtggccgaggaaaggtgccttgacccgcagctgtggcacgcgtgcgctggcggcatggtgcagatgccgcccgtgcgctcccgtgtctactacttcccgcagggtcacgcggagcacgcgcatggcggcggggccgcggacctcgccggggcgcgagcgctcccgtcgctcgtgctctgcagcgtcaccggggtgcgcttcctggccgatccggagaccgacgaggtcttcgccaagatccgcctggtgccggtcgcgcccggcgaggtggagttccgagagcccgatgagttcagcgtcgaccccgcggacgcccgggagaagctttcttccttcgccaagacgctgacgcagtccgacgccaacaacggtggcggcttctcggtgccgcgctactgcgccgagaccatcttccccaagctcgactaccgggccgacccgccggtgcagacggtgcttgccaaggacgtgcacggggaggtctggaagttccgccacatttaccggggcacgccgcgccggcatttgctcaccacgggatggagcacgttcgtcaaccagaagaagctcgtcgccggggactccatcgtcttcctgcgcactgagcatggcgagctgtgcgtcgggatacggcgtgtcaagcgggtgtcctgtggtggcatggagtgcatgtctgggtggaacgccccggggtatggggccttgtcggcattcttgaaggatgaggagggtaagatgatgaagagtcatggtgggtacatgagaggtagggggaaggtgaagatcacggatgttgtcaacgccgcaagtctagcagcgagcggacaaccatttgaagttgtgtactacccgagagctagcacaccggagtttgttgtgaaggctgcatcggtacagaacgcgatgaggaaccagtggtgcccggggatgaggttcaagatggcatttgagacagaggattcgtcaaggatcagttggtttatggggacgatagcttctgctcaggttgctgacccaatcagatggccaaattcaccgtggaggcttcttcaggtggcatgggatgaaccggacttgctgcagaacgtgaaatgtgtgaacccatggctcgtggagatcgtatcaagcattccaccgatccacctgggaccattttctccacctaggaagaagctgcgggtgccccaccatccggacttcccgttcgacggccagctgttgaatccgattttccacggcaacccactcggtccgagcaacggcggcggtgctcttcgctgtttctcggacatcgctcctgcaggcatacagggagccaggcatgctcagttcggtctaccactaacagaccgccagcttaacaagctgcacctcggtctgttccaaggcggcggttttaagcggcggcttgacgctatcactccaccatgccctatatccaggggctttgtgatcggcagtgcaccggtcgacgagagcgtctcttgcgtgctgacgatcggcacgccacgggccgcagagagatctgacgacaggaagaaaccacatctaatgctgttcggaaagcctatccttaccgagcagcagatgagctctagagggtcaagggaaacactctcccctgaggccactgggaacagttccgatggcagtgttcagaaaacgggaaacgtatccgatggctccggctcgtcgatctgcatcggttcctcgtcccgaggccgcgaggcttctaggctcgggttcgaatttgaagccgggcactgcaaggtatttgtggagtcggaggatgtcggtcgcaccatcgacctgtccgtctttggctcgtacgaagagctgtacggtcagttggccgacatgtttggaatcgagaaggcagaggtaatgagccacctttgttaccgtgatgctgctggcgctgtcaagcgtactggcgacgagccgttctgtgacttcatgaaagtggcacggaggctcaccatagtagagagcaccgaggggaggctgcagaaacctctcgtcgagtacatggcttgattgcatgactgttcgataaggcactctgaagcttgaggaagactgaagcttggagcgaatatgttttcgtttgcgtttgtctgccgtgaagcggaatcgcgatgtctgtctcgtcgtgtgaaagaaactcgtgtatcggattttcgtctgtcgtgacttggtcgttagaactctgtcgtggtcagttgtgttgcgcttgcgcttgggtcgaagttgatagatggcctctttgatgaactagcttggaataaagttcgagttgtggttagggaatgccagtgccatggcaattcagttgtcgttgtcgatttagttaaaatgcgtgtatttgttgctgcagtttgatagcacttgccaagatatgttgaacttatcgtggttaagaacaggtaccacaggatgaggcgcttggaggatgctgcgatgtgttcgtgagaggtctaggccgtcgtctcc

SEQ ID NO: 211955 - DNA, 1438 bp, Zea Mays
ccacctagccgtgtccttgaggtcaccatacaccagattgcattggatcagcatttaatgccaaaggggttatgcaatgccccaactgccgcaaaatcgagaaagggaattggctttatgcaaatggttctcgatctgcccatgatgttagcatggatgaatgggcccatgatgaagacctttatgatgttagctactcagatatgccatttcgcttccattggtgtccgtttgggcgcttaacccaacttccatctttatttgaggaaggagaatcatcacctccagttacatttcatgacttcatgggacaacatgtgtttacggagcaagtagctgtatctgctgcagcagggacaactaatccttgcccctatgtggcatacttgcatcctcttacaccattgacgtcattgtcaagctcccatgtccctgacagaactatggatcgtcctgcataccatgatcattggaaccccatggctgggccatcagatgttaggtccatgcaaacaatgcaacctgctgattttcatcatagccattgggcacatgtgccccattcttatggtcaacccaacagcaataacgagcagccaggaatcccttttggagcaagggctgtacgggtcgatggtgatagccaacgccgagcatctgttgtctctccatcttacttcagtaatggatctggttccagatctagacctcccaatgttcctcctctgatgcctcagttcatgagggctcatggcagcatcagcgaacagtaccaacagaattcatcatctagcttatttgctggggcccataggttcatctggccatagctcgatggagactgatgatgctgggggaagccggttctacgcctgggagggtgaccggtttgccccatacccgttgatgccggtagactgcgagacaagctggcggacctcacagcagcagtcccaccagagcacatcagagcctacatctgctccaaggaggctgtttgggcaatggctcgctgtcggcaggccatccccatcacccgaggggtcttcgtatcgtcaattgcactcaccgcggatgtagaccctcgccgctgaaagaaacgatgggaagcccattgtattaagttaagccgggctgtgccgtgaaactttgggacgatgctcgaggggacagaaactggaaacgatccggctgaggatatttcgatttggtttatgtgaattccatctcgtacatatttgaaatcaagttgggatgctgggagcttcgaatgtaacgtgatttcttatgctgcaattctgttgattgacggattttcaaacgcgattgaatttccgttgcaatggtacctgttgaaccgtaggcgtttcgtgttggtgttgtagcatgtgaaggcctacgttccatgcagtttccaacaaagtagaatagaaatttg

SEQ ID NO: 211956 - DNA, 942 bp, Zea Mays
cagccatcgatcaccggccccaacgctagctttagcttcgcctatttacatacccgagcggagaagagaagagaagagaagcgatcgggattgtgggcgagtgcgtgcgttcgtgcagccacagacaggcgtccgggcaccatgtctttcaccggcacgcaggacaagtgcacggcgtgcgacaagaccgtccacttcatcgacctcctcacggccgacggcgccatctaccataagacatgcttcaagtgcagccactgcaaaggggtcctctcgatgtgcagctactcctccatggacggtgtgctgtactgcaagacccacttcgagcagctcttcaaggagaccgggagcttctccaagaacttcacgccaggtggcaagtcatcagacaagggtgaactgacaagggccccaagcaagctgtcgtctgcattttctggtacccaggataagtgcgcagcatgccagaaaacagtgtacccgctggagaagttaactctggaaggcgagtcctaccacaagagctgcttcaagtgctcgcacggcggctgcatcctgaccacctcctcttatgccgcgctcaacggcgtcttgtactgcaagatccacttcgcgcagctgttcatggagaaggggagctacaaccacatgaacaagaagagcccgtcccaggaggttctgccggacgtggctgacgaggagcaaccgccggaaccagcgccaccgcaagatgagaaagaagaggacaactaggatcggagcgaccaacaaccacccatgcatatatatcacgcagactgaagtctacacgtttgccatatttctttacgacgacgacgcttctttattccctcctcccttttttttcctcttaatctctctgtgaacccggtttatcatcacgctgcaatcaagtgtgccagatgccttcgttacgta

SEQ ID NO: 211957 - DNA, 3229 bp, Zea Mays
gaggaaatatgcactttattatggtcaagtgggctgatgggaagaagtttgaggacaaatttgtggataccttgcttaaatatggatacaaaggtcaatatatgtcagagaattggctgaagcagccattgtttatacaatcctttgctcccacctccattgtacatgtatcagattttattgactctcccaaggtatttttgattgatgatatcagtgtgagaacacaagacacgaaccagtcatactgggaaattacttcagatgactaccttgcatacattagtaaatatgtcgttggccttggtccatggaaggacactattgttccagcttcaggaaactacttgatgccacctagtgatcttgtcgcacgggcacatgctcataatctccaggtacatccatacacgtacaggaacgagaaccagttcctgcacttcaacttttttcaagatccctacaatgaatacgacttctggataaacactgtgggggttgatggactgtttacagatttcaccggaacccttcacaggtaccaagaattgacatccccacaccggaaggatgagactgcaaatagcctcctagtaaaaattagccaaatgatctcagcatatgaaggtctctgatcagcacgacgttgctgaaaattgtttgtgcttttgttaatcgatctgcaagagcacacgatccattcatcacggacggtgcaacgtgacactgtgactttgcaaggttaaataaacgagttgtttctggttgggacttgttagcacgagccgtactctccattaaagctcttaaaccctgtgagaaatttctagtgtgggaataattgttttcacgatagaaaccgtatcatggtttagcgtgccaggatggacgagttggtctcgggtctttgcacagttggcctacaattgtacttgccggagtgttgaaatttctagtgtgggaataattgttttcacgatagataaacgctcttgtcactcttatcctcttttatgctgcttaagtaacacgctgtttgttggttcatcagtcactgcctaccagggccaggtgcccaacatgccaattgccatagcacgtttgtttaagtttgactctaacagactggagacagtaatgaaggattctcagacgaattttggaggaatatgattccagccttttgacgacatataagaaggatcaaaatgcccaagaaatggattgaatatgattccagcgttttgagttttgacgatgtataaaaggattaaaatgtccaagagataggtgaattaagatttatataaggggcgtccgactgcgcgtggtcaacggctgcactattgtcggacgttacaagtcgatggatgcccggagtcggacgtgaaggcaacactactatgagaagctaaggaccttagaccctggtcgagaagccaaacagcaggatgaactcactgtgtatacatatgacatttctgaaatggcaatggcaagacttgaagaggaatttgtttatcttcttacacattacaaacaggaggttctctcttttcgctctacagaggatggtagtgtggaagacttttcaagcaggagcagctcatttaatgaggaacaattggaagggaaggcaacaccaaataatatcagtggaggaccagaatattttgtgcctgatttaattcaacctggtgcactctctgctgtcaagttcattgctaaattcatgttcctgtatggctatgataaggagtgttgccaggcttatataaactcaagacagagtgcaacagatgagtactttgggtctcttggtctggaaaacctcagtatagaggagcttatgaacacaagttggaacagaatgaattcattaataaagagatggaactgggcaattatggtttttcttcgggtgtaccttgtaagtgagaaacgctttagcaaacatgtctttggtgaactttcagtttcaactgcagacttgtgcttctctgagatttcatttaactcagttatacaacttctgagcttttatgtatctgtagcaattggtcccccaaaaacagaaaaagctttttagattgcttgatatgtatgaagtccttgctgatcttctccctgaagctgaatccttgtttgaatcaggatacaatgatatgatcctgaatgagtaccatgaagcactactgcaactgggagaatctgcaaggaagacatttgcagaattcaagtatgccatccaatcatacacttcatccagtgcagtagctcgtggagaagtgcatccacttacaaagtatgttatgaactacataaaggctctcacagcatacaacaaaactctcgattcacttctcaaggacacggatcgaagatgcctggtttctgacattcagctgatggcaaacccatatcctaatttcaccgcaacagctttcaatctacaatctgttactgcagttctggaggcaaatcttgaagctgggtctagactgtacagagatgatcgattgcagtacatcttcatgatgaacaacatccactacatggttcagaaagtgaagaactcggatctcaaaagctttcttggcgatgaatggatccggatccataacaggaaacttcagcagcaagctacgagatatgagagggcgtcatggaataatgttctcttacctcagtgatgatggcctgtgtgctgctggtgatgctgcttctcgcaaaaccatcagggaggagataaaaaatttcaatctgtcctttgaagaggtttaccaagttcagacagcatggtctgtcccagatgaccaacttcgcgatgatgtccggatttcaatatcactgaaagttatacaggcctacaggacgttcgtgggaagatattcaggcttgcttgatagcacaaagcatcgttacatgaagtacaggccagaggatttggagacacttttaatagatctttttgaaggaactcaaaggacactgcagcattctgccaaactagcatgatttttgccttttcttcatgccctttcatgctgcctagctttcctttccttatgacattgtagaagtacatatgctgttagagatagcattctactgatttggtaacagggtgtatagcttccgaatgttttgatagtgatacagtgattcttcattcctgatccatttaatgatttgcctccatgaaaatggaggatatgtgttggtctac

SEQ ID NO: 211958 - DNA, 1188 bp, Zea Mays
cacacagctaggtagtcccccatcagctagagctcagcttccgcgtgcctgcactgcacatacgcacgcacagctccagacacagctacgactcgaccacaagccagccatgccggccttcgcggggggcgcagcggagccgccgctggcagacagctactacgcgctcctccgccgcggcaatgacgatgaaggcgcctacacgacgtcgacagcgccatgggacgacgtctcactgcccgtggcggagtgcgagctcccgatgatcgacgtcgggtgcctgacgaccgccgacgacggcagctccccggaggcggaggcggagcgggcggcgtgcgcggccgccatcgcgcgcgccgccgaggagtggggcttcttccaggtgcgcaaccacggcgtgccgcaggagctcctggaggagatgcgccgggagcaggcgcgcctgttccgcctgccgttcgagaccaaggccacggccggcctgctcaacgactcctaccgctggggcaccccgaccgcgacgtctccgcgccagctgtcctggtccgaggccttccacgtcccgctcgccggcgtctccggctccggcaccacctgcgacttcggcgacctcaccaccctcagggatgtgactcgggaggtggcgggcgcgatgtcaaagctggccggcacgctggcgcgcgtcctggcggaggccctcctgggtcggcggcccgccggcgagcgcttcccggaggggtgcgacgagacgacgtgcttcctgcggctgaaccggtacccggcgtgccccatctccccaggcgccttgggcctggtcccgcacacggacagcgacttcctcaccgtgctctgccaggaccagcaggtcggcggcctgcagctcatgaagggggacagttgggtggccgtcaagccaatccccggcaccctcgtcgtcaacatcggggacctcttccaggcgtggagcaacaacagatacaagagcgtggagcacaaggtgatgacgaacgccaggacggagcgctactccgtcgcctactttctctgcccgtcctacgactcgccgatcggcacgtgcgaggagccttctctctacaggacgttcaccttcggggagtacaggagaaaggtgcaggaagacgtcaagaggaccgggaagaagtgcttgtggatgtatggttaattgag

SEQ ID NO: 211959 - DNA, 190 bp, Zea Mays
gtatccgcgaggatccccccacaccttgcgacctgcgttgtcacccacccatcaaggttggggccgccagcaggttcagccgttcctgttcttgataaaacgagagaaggatggcggcagtgtctcagggagctgtcctattcttgtttctcctcctcgtcgcagcagggcttcagatgcaggccgtgca

SEQ ID NO: 211960 - DNA, 1076 bp, Zea Mays
attgctcaccttcgggatccctcttcctcgtttgcccccttctcttctcacatgtggaccaggaataagacgcaagcttgtcccccaccatggttcatcgttgcgtgagtatatcgtgtcgtctatttccgatctgtggacgaggcagaaaaggctttccacggatcatctagcttgcaaactgaagcagaaatgcaaggattgctcttggcgtttccatggacggcgacaagtctaagcagcttctctgtccatgggttgcgatcagatgaggggcgcagcaaggcgtctggtgcagagcgcaaccaaaaccaggcaaatcaatcctgtcaatggactagcaaggatgccggcgatcactactcctcagaggcatgggaacgagaatacttccagtgaatctgtcgtcacgaaagacgaaaacgttgagccccttgtcgccttcagcaggccacctcctttgccgcctgttctgggtccgctcgtcgtgctctcggttttcgagatgtcgtccggtggcggcgacgaagacaccgaatgaggcagcaaatgggcacccatggaaattagcttttgtgttgtctgttaagtttgctccgttctacccctgtggacatgaggttcgcacgagggggctgatcttccctgagcagctccgaattaggccttgtagaactacagactacagactaagatgtactgttagctatcaactaggtggcgtttggataatgtgatgtgcaaggtgggatagggaagtggagggtggtagtacaaatgatttaccacgttgtggttggcggaatagataaggagatgagctggagtgaggaaagggaaccgtctgtctcactcgagaggtggatgcattatggcgtcggcgacgtactaatcgtgagtaaccaaggtagccgcagccgccaactcgcgcgtcgccactgcgcaccgggggtgcgagcctgggctgcattcgttgcttacctctcgcctaggcctccgctggaccgaattttttgtattttagcccttaaacagaagtaaatttacgtttagacctaaaaaaattttaaatgcag

SEQ ID NO: 211961 - DNA, 982 bp, Zea Mays
gctgcttgcccatcccatcgactacaactcaacgacccgagaactttccagagcactcgccactcgcacatcgactacaactcaacgatccaagccaagcgacgcgtgtgttctcttcttctccgaggccatcatccttcgcgcgaattagccgctcagcgaccgggattcaagatgaggggcgcagcaaggcgtctggtgcagagcgcaaccaaaaccaggcaaatcaatcctgtcaatggactagcaaggatgccggcgatcactactcctcagaggcatgggaacgagaatacttccagtgaatctgtcgtcacgaaagacgaaaacgttgagccccttgtcgccttcagcaggccacctcctttgccgcctgttctgggtccgctcgtcgtgctctcggttttcgagatgtcgtccggtggcggcgacgaagacaccgaatgaggcagcaaatgggcacccatggaaattagcttttgtgttgtctgttaagtttgctccgttctacccctgtggacatgaggttcgcacgagggggctgatcttccctgagcagctccgaattaggccttgtagaactacagactacagactaagatgtactgttagctatcaactaggtggcgtttggataatgtgatgtgcaaggtgggatagggaagtggagggtggtagtacaaatgatttaccacgttgtggttggcggaatagataaggagatgagctggagtgaggaaagggaaccgtctgtctcactcgagaggtggatgcattatggcgtcggcgacgtactaatcgtgagtaaccaaggtagccgcagccgccaactcgcgcgtcgccactgcgcaccgggggtgcgagcctgggctgcattcgttgcttacctctcgcctaggcctccgctggaccgaattttttgtattttagcccttaaacagaagtaaatttacgtttagacctaaaaaaattttaaatgcag

SEQ ID NO: 211962 - DNA, 1291 bp, Zea Mays
gtttaattgatgtatatctaaaatactaatattagaagaatagaaatctcttaaaaaataggttcccaaactatcccttaacacttaaatccttccaccaccagcttagttatatttatagaaaattcctaacaaaccacgtattgtgggattcgagatgacaatgacatgctagtgctagcaagctaaaatcgaattggcccctctaggggcaacggcccacggacttccggtgctcgtcccgagagatttccagagcgctcgctagcaatattccaaatctctcgtggagtcgtggctgcttgcccatcccatcgactacaactcaacgacccgagaactttccagagcactcgccactcgcacatcgactacaactcaacgatccaagccaagcgacgcgtgtgttctcttcttctccgaggccatcatccttcgcgcgaattagccgctcagcgaccgggattcaagggttgcgatcagatgaggggcgcagcaaggcgtctggtgcagagcgcaaccaaaaccaggcaaatcaatcctgtcaatggactagcaaggatgccggcgatcactactcctcagaggcatgggaacgagaatacttccagtgaatctgtcgtcacgaaagacgaaaacgttgagccccttgtcgccttcagcaggccacctcctttgccgcctgttctgggtccgctcgtcgtgctctcggttttcgagatgtcgtccggtggcggcgacgaagacaccgaatgaggcagcaaatgggcacccatggaaattagcttttgtgttgtctgttaagtttgctccgttctacccctgtggacatgaggttcgcacgagggggctgatcttccctgagcagctccgaattaggccttgtagaactacagactacagactaagatgtactgttagctatcaactaggtggcgtttggataatgtgatgtgcaaggtgggatagggaagtggagggtggtagtacaaatgatttaccacgttgtggttggcggaatagataaggagatgagctggagtgaggaaagggaaccgtctgtctcactcgagaggtggatgcattatggcgtcggcgacgtactaatcgtgagtaaccaaggtagccgcagccgccaactcgcgcgtcgccactgcgcaccgggggtgcgagcctgggctgcattcgttgcttacctctcgcctaggcctccgctggaccgaattttttgtattttagcccttaaacagaagtaaatttacgtttagacctaaaaaaattttaaatgcag

SEQ ID NO: 211963 - DNA, 1084 bp, Zea Mays
gtgtggcggaggtccgaacctctggaggcccagctgggcgagcccgagtgctagcccaattcacccccaggtcacaccaaattgccaaccgccctcattccaaaccctagccgtcgccagccttggagctctcggacacggcggctcctcctccactccccctcgactcctcctccatccccgacgcgacggctccatccccgacgctgagctccatgtcttccctcacctcggtcctagactcccaggtgaaaacttcagactctgaccctgtccccataacgtgtgcctcctgccctcctcgcagatctgcttgtccgccggcggcggctaccactcgccagcaagccatctcctggagctggaggggtctgcttcctccttgactgcccatcgacatcttcgccctcgtggccttcgcgtcggtgcccctcgcctgtgatgcaggggtctcatccatgtggtgccacactactggttgccaacgaccgggaaggaaggtggtgtggatgccgtgctcgtgtcttcctctacagggatgctcagattccccttcctcactgggctccttagattcgccaacacgaaggtatatgtgacagaggtagcagcaaggatgggagctaataatatgatttgacttctctggtgtctctatatatgagtaataggagctaataatatccaaccatcaatccagcagaatttaataggatatgagttgatatcaaatgcagagtttacattttcaccgtggacaccttttcctaccaagaggttcaaattttactgcaaaatcaacgagttcttggtggtgttggtatggcatccgatccaatggtggcacgtagaagtaaaatctgaaacatttgttttgatggttagcttgcattttatgctataattacctcaaatcacgtgttgcctttttcaccaatttatgacatctattgacatgttttactttaatttacgacatttattgatgtgttttgcgacaacctcatgtggggccacatttgccattatgaaatagatcgatgatttatgctaaaattcatacccatttacactgtgttgtttt

SEQ ID NO: 211964 - DNA, 934 bp, Zea Mays
ctggctcacctgtgtgtggcggaggtccgaacctctggaggcccagctgggcgagcccgagtgctagcccaattcacccccaggtcacaccaaattgccaaccgccctcattccaaaccctagccgtcgccagccttggagctctcggacacggcggctcctcctccactccccctcgactcctcctccatccccgacgcgacggctccatccccgacgctgagctccatatctgcttgtccgccggcggcggctaccactcgccagcaagccatctcctggagctggaggggtctgcttcctccttgactgcccatcgacatcttcgccctcgtggccttcgcgtcggtgcccctcgcctgtgatgcaggggtctcatccatgtggtgccacactactggttgccaacgaccgggaaggaaggtggtgtggatgccgtgctcgtgtcttcctctacagggatgctcagattccccttcctcactgggctccttagattcgccaacacgaaggagtaataggagctaataatatccaaccatcaatccagcagaatttaataggatatgagttgatatcaaatgcagagtttacattttcaccgtggacaccttttcctaccaagaggttcaaattttactgcaaaatcaacgagttcttggtggtgttggtatggcatccgatccaatggtggcacgtagaagtaaaatctgaaacatttgttttgatggttagcttgcattttatgctataattacctcaaatcacgtgttgcctttttcaccaatttatgacatctattgacatgttttactttaatttacgacatttattgatgtgttttgcgacaacctcatgtggggccacatttgccattatgaaatagatcgatgatttatgctaaaattcatacccatttacactgtgttgtttt

SEQ ID NO: 211965 - DNA, 2829 bp, Zea Mays
atcagtcggatttggaggagccgaataaataaccaaggatactgcgaagggactcctcccggccccaaaagcactttccttgcgtccccgtcagggagggagggagggaggggagcattgctgtgcgggatggcgaggaggaggatgaggaggggaggcggtggcggtggcggtggcggtggcggggtggtggatgtggtgcgggtgcggcggctgctgctgctgtccctgacctgctgcagcagcatttggccaggcggacggatcttcgctgctgcggacactgaccccaacgatcttaacgtcctcaacacgctcttcaccagtctgaattctcctgggcagctcacaggttggcaggcgaatgggggtgatccttgtggccagtcatggaagggcattacttgctcaggatcaggggtcactaaaatccaattaccaaacttgtcactcactggaaatttggcctacaacatgaataacttgggttcattagttgagcttgacatgagccaaaataaccttggcggtggaggtcaaatacagtacaatcttcccaatatgaagcttgagaaactcaatcttgcaggaaatcaatttggtggaaatttaccctactcaatttcgacgatgcctaatcttaagtatttaaaccttaatcataaccaactacaaggaaacatcagtgatgtattttccaacctttacagtttgtcagaactggatctgtcctttaattcccttactggtgatctaccacaaagtttcactggattgtcaagcctgaaaaaagtgtatttgcagaacaaccaatttactggtaatatcaatgtcttagccaatctcccccttgaaactttgaatgttgcgaacaaccatttcactggttggattcctagtcagcttaagaagataaacagtctacagactgatggaaattcttggagcacaggaccagcgccacctccacctccatacacagcgccgcctcctcctccaaaccattggaatgctgatggttcatcaagttcatcaagttctggtggaagatctgggataggtggtggaggtgtagcaggaatcattatatcgttgctggttgttggatcagttgttgcatttcttgtgatcaaaagaagaaaacgcaaagctgctatgaaagaacattttgaacagcaccagccattcacttccttcccttcaaatgaagttaaagacatgaagcctgtctacgaggccaccacagtagacatagagtctttggcttcacctgcttcagttaatctgaaaccacctccgaagatagaacgaaacaaatcatttgatgatgacgatgatttttcaaacaagcttgttgcaaagaaaagtaatataacacctataaatgcaactgtttattcagttgcagatctacagatggcaacagatagctttagcttcgacaaccttgttggagagggtacttttggacgtgtttacagggcacaattcaatgatggaaaggttctggcgatcaagaaattagatagtactgtgatgccatttcaatcatctgatgactttgctgaactggtctcgaacatttcaaaattgcaccatccgaatctgaatgagcttgtgggctattgcatggaacatggccagcacttgcttgtgtatgatttccacaggaatggatcacttcatgatctactccacctttcagatgagtacagcaagccacttagctggaacactcgtatcaagatcgcactcggctctgcccgtgcactggattgcacaagcaactaattattagttggacatcaaatcactaggtcgcgggttcgaaaccgtctttccgtatttgagaaaggtaccttcatgaaatatgttctccatccatcatccataagaatttcaagtcgtcaaacattttgctggactcagaattcaatccacacctttcagatgctggacttgcaagctttattcctgatgctgaattccaggcagcagaacaaagtgccggatacactgccccagaagtggacatgaccggtcagtacaccctcaagagtgatgtctacagctttggagttgtcatgcttgaactattgacaggacgtagaccatttgacagctctagacccaggtcagagcagtcacttgtgcggtgggcaacaccccagctgcatgacatcgacgcattggacaggatggtcgatcctgcactcaagggtctatacccagccaaatctctatcccgatttgctgatgtccttgccctgtgtgtccagcctgaaccagaattcaggccaccaatgtcagaggtggtgcaagcattggttcgacttgtgcagagggccaacatgacgaagaggatgcttgatggggatacttctcggcgaccagatgacctggaccaagatttcatatgacaagctgaactcttgtcagattgtatttatttcgttcgactagcggcccagcagagacataatcacacaagaggaagaaacagaactctgtcagcttcgccagtacataatcacaagtttttcttggtagcaaagttgtgctatatggttgtactgtgtctacaaaatagtaccttgatcttacgctaatggcatattgttataattctttggtaacttatatgcaaatgccccagataaacaaaactatggtgaagtgtgccgaatgttaaaataactgattagtccagtactgctgcatcaactgaaacaagttgcacagtggaaatatttatcttggtccctcaactatccccttgaggcttattttcgaccttgaactttcaacatgactttcagacttcatcgg

SEQ ID NO: 211966 - DNA, 2677 bp, Zea Mays
atcagtcggatttggaggagccgaataaataaccaaggatactgcgaagggactcctcccggccccaaaagcactttccttgcgtccccgtcagggagggagggagggaggggagcattgctgtgcgggatggcgaggaggaggatgaggaggggaggcggtggcggtggcggtggcggtggcggggtggtggatgtggtgcgggtgcggcggctgctgctgctgtccctgacctgctgcagcagcatttggccaggcggacggatcttcgctgctgcggacactgaccccaacgatcttaacgtcctcaacacgctcttcaccagtctgaattctcctgggcagctcacaggttggcaggcgaatgggggtgatccttgtggccagtcatggaagggcattacttgctcaggatcaggggtcactaaaattgacatgagccaaaataaccttggcggtggaggtcaaatacagtacaatcttcccaatatgaagcttgagaaactcaatcttgcaggaaatcaatttggtggaaatttaccctactcaatttcgacgatgcctaatcttaagtatttaaaccttaatcataaccaactacaaggaaacatcagtgatgtattttccaacctttacagtttgtcagaactggatctgtcctttaattcccttactggtgatctaccacaaagtttcactggattgtcaagcctgaaaaaagtgtatttgcagaacaaccaatttactggtaatatcaatgtcttagccaatctcccccttgaaactttgaatgttgcgaacaaccatttcactggttggattcctagtcagcttaagaagataaacagtctacagactgatggaaattcttggagcacaggaccagcgccacctccacctccatacacagcgccgcctcctcctccaaaccattggaatgctgatggttcatcaagttcatcaagttctggtggaagatctgggataggtggtggaggtgtagcaggaatcattatatcgttgctggttgttggatcagttgttgcatttcttgtgatcaaaagaagaaaacgcaaagctgctatgaaagaacattttgaacagcaccagccattcacttccttcccttcaaatgaagttaaagacatgaagcctgtctacgaggccaccacagtagacatagagtctttggcttcacctgcttcagttaatctgaaaccacctccgaagatagaacgaaacaaatcatttgatgatgacgatgatttttcaaacaagcttgttgcaaagaaaagtaatataacacctataaatgcaactgtttattcagttgcagatctacagatggcaacagatagctttagcttcgacaaccttgttggagagggtacttttggacgtgtttacagggcacaattcaatgatggaaaggttctggcgatcaagaaattagatagtactgtgatgccatttcaatcatctgatgactttgctgaactggtctcgaacatttcaaaattgcaccatccgaatctgaatgagcttgtgggctattgcatggaacatggccagcacttgcttgtgtatgatttccacaggaatggatcacttcatgatctactccacctttcagatgagtacagcaagccacttagctggaacactcgtatcaagatcgcactcggctctgcccgtgcactggagtaccttcatgaaatatgttctccatccatcatccataagaatttcaagtcgtcaaacattttgctggactcagaattcaatccacacctttcagatgctggacttgcaagctttattcctgatgctgaattccaggcagcagaacaaagtgccggatacactgccccagaagtggacatgaccggtcagtacaccctcaagagtgatgtctacagctttggagttgtcatgcttgaactattgacaggacgtagaccatttgacagctctagacccaggtcagagcagtcacttgtgcggtgggcaacaccccagctgcatgacatcgacgcattggacaggatggtcgatcctgcactcaagggtctatacccagccaaatctctatcccgatttgctgatgtccttgccctgtgtgtccagcctgaaccagaattcaggccaccaatgtcagaggtggtgcaagcattggttcgacttgtgcagagggccaacatgacgaagaggatgcttgatggggatacttctcggcgaccagatgacctggaccaagatttcatatgacaagctgaactcttgtcagattgtatttatttcgttcgactagcggcccagcagagacataatcacacaagaggaagaaacagaactctgtcagcttcgccagtacataatcacaagtttttcttggtagcaaagttgtgctatatggttgtactgtgtctacaaaatagtaccttgatcttacgctaatggcatattgttataattctttggtaacttatatgcaaatgccccagataaacaaaactatggtgaagtgtgccgaatgttaaaataactgattagtccagtactgctgcatcaactgaaacaagttgcacagtggaaatatttatcttggtccctcaactatccccttgaggcttattttcgaccttgaactttcaacatgactttcagacttcatcgg

SEQ ID NO: 211967 - DNA, 2738 bp, Zea Mays
atcagtcggatttggaggagccgaataaataaccaaggatactgcgaagggactcctcccggccccaaaagcactttccttgcgtccccgtcagggagggagggagggaggggagcattgctgtgcgggatggcgaggaggaggatgaggaggggaggcggtggcggtggcggtggcggtggcggggtggtggatgtggtgcgggtgcggcggctgctgctgctgtccctgacctgctgcagcagcatttggccaggcggacggatcttcgctgctgcggacactgaccccaacgatcttaacgtcctcaacacgctcttcaccagtctgaattctcctgggcagctcacaggttggcaggcgaatgggggtgatccttgtggccagtcatggaagggcattacttgctcaggatcaggggtcactaaaatccaattaccaaacttgtcactcactggaaatttggcctacaacatgaataacttgggttcattagttgagcttgacatgagccaaaataaccttggcggtggaggtcaaatacagtacaatcttcccaatatgaagcttgagaaactgaaatcaatttggtggaaatttaccctactcaatttcgacgatgcctaatcttaagtatttaaaccttaatcataaccaactacaaggaaacatcagtgatgtattttccaacctttacagtttgtcagaactggatctgtcctttaattcccttactggtgatctaccacaaagtttcactggattgtcaagcctgaaaaaagtgtatttgcagaacaaccaatttactggtaatatcaatgtcttagccaatctcccccttgaaactttgaatgttgcgaacaaccatttcactggttggattcctagtcagcttaagaagataaacagtctacagactgatggaaattcttggagcacaggaccagcgccacctccacctccatacacagcgccgcctcctcctccaaaccattggaatgctgatggttcatcaagttcatcaagttctggtggaagatctgggataggtggtggaggtgtagcaggaatcattatatcgttgctggttgttggatcagttgttgcatttcttgtgatcaaaagaagaaaacgcaaagctgctatgaaagaacattttgaacagcaccagccattcacttccttcccttcaaatgaagttaaagacatgaagcctgtctacgaggccaccacagtagacatagagtctttggcttcacctgcttcagttaatctgaaaccacctccgaagatagaacgaaacaaatcatttgatgatgacgatgatttttcaaacaagcttgttgcaaagaaaagtaatataacacctataaatgcaactgtttattcagttgcagatctacagatggcaacagatagctttagcttcgacaaccttgttggagagggtacttttggacgtgtttacagggcacaattcaatgatggaaaggttctggcgatcaagaaattagatagtactgtgatgccatttcaatcatctgatgactttgctgaactggtctcgaacatttcaaaattgcaccatccgaatctgaatgagcttgtgggctattgcatggaacatggccagcacttgcttgtgtatgatttccacaggaatggatcacttcatgatctactccacctttcagatgagtacagcaagccacttagctggaacactcgtatcaagatcgcactcggctctgcccgtgcactggagtaccttcatgaaatatgttctccatccatcatccataagaatttcaagtcgtcaaacattttgctggactcagaattcaatccacacctttcagatgctggacttgcaagctttattcctgatgctgaattccaggcagcagaacaaagtgccggatacactgccccagaagtggacatgaccggtcagtacaccctcaagagtgatgtctacagctttggagttgtcatgcttgaactattgacaggacgtagaccatttgacagctctagacccaggtcagagcagtcacttgtgcggtgggcaacaccccagctgcatgacatcgacgcattggacaggatggtcgatcctgcactcaagggtctatacccagccaaatctctatcccgatttgctgatgtccttgccctgtgtgtccagcctgaaccagaattcaggccaccaatgtcagaggtggtgcaagcattggttcgacttgtgcagagggccaacatgacgaagaggatgcttgatggggatacttctcggcgaccagatgacctggaccaagatttcatatgacaagctgaactcttgtcagattgtatttatttcgttcgactagcggcccagcagagacataatcacacaagaggaagaaacagaactctgtcagcttcgccagtacataatcacaagtttttcttggtagcaaagttgtgctatatggttgtactgtgtctacaaaatagtaccttgatcttacgctaatggcatattgttataattctttggtaacttatatgcaaatgccccagataaacaaaactatggtgaagtgtgccgaatgttaaaataactgattagtccagtactgctgcatcaactgaaacaagttgcacagtggaaatatttatcttggtccctcaactatccccttgaggcttattttcgaccttgaactttcaacatgactttcagacttcatcgg

SEQ ID NO: 211968 - DNA, 1288 bp, Zea Mays
tcttcaccgctgctacctttgtcttcatggctcctgacagtggttctggcgatcaagaaattagatagtactgtgatgccatttcaatcatctgatgactttgctgaactggtctcgaacatttcaaaattgcaccatccgaatctgaatgagcttgtgggctattgcatggaacatggccagcacttgcttgtgtatgatttccacaggaatggatcacttcatgatctactccacctttcagatgagtacagcaagccacttagctggaacactcgtatcaagatcgcactcggctctgcccgtgcactggagtaccttcatgaaatatgttctccatccatcatccataagaatttcaagtcgtcaaacattttgctggactcagaattcaatccacacctttcagatgctggacttgcaagctttattcctgatgctgaattccaggcagcagaacaaagtgccggatacactgccccagaagtggacatgaccggtcagtacaccctcaagagtgatgtctacagctttggagttgtcatgcttgaactattgacaggacgtagaccatttgacagctctagacccaggtcagagcagtcacttgtgcggtgggcaacaccccagctgcatgacatcgacgcattggacaggatggtcgatcctgcactcaagggtctatacccagccaaatctctatcccgatttgctgatgtccttgccctgtgtgtccagcctgaaccagaattcaggccaccaatgtcagaggtggtgcaagcattggttcgacttgtgcagagggccaacatgacgaagaggatgcttgatggggatacttctcggcgaccagatgacctggaccaagatttcatatgacaagctgaactcttgtcagattgtatttatttcgttcgactagcggcccagcagagacataatcacacaagaggaagaaacagaactctgtcagcttcgccagtacataatcacaagtttttcttggtagcaaagttgtgctatatggttgtactgtgtctacaaaatagtaccttgatcttacgctaatggcatattgttataattctttggtaacttatatgcaaatgccccagataaacaaaactatggtgaagtgtgccgaatgttaaaataactgattagtccagtactgctgcatcaactgaaacaagttgcacagtggaaatatttatcttggtccctcaactatccccttgaggcttattttcgaccttgaactttcaacatgactttcagacttcatcgg

SEQ ID NO: 211969 - DNA, 1315 bp, Zea Mays
acccataggaaattttggtccccatattgcagctttcccaaccaaccatgaactcacccgcaccacgccgttaacgggtccagaacctcgcttccaatctgccctcccgtgtccccctccctgtccgattccccacagtagcgcctcgccctcgtcctcctcctccagtccggatcgccatttcccaccgatccgtcccggcatcggcatggctgcgcccaagccaaaggcgccggcgcccagtgcttcggcagcctagcgtttgtttgcctccgaggatttccgcctatcgcgttaccggatcttcggtgggccggcgaccctctacgccactatgagctccgacgggcgcctccgccgcgcgctggccgcgttcggcggcgacgtgtgggacctcgtggacgcggcgctcgccgccgccgcgcgggacagccccggcgacctgcgcgcgcgccgcgacggcatcgtccagcgcctctacgcaggggcagcccgctgccgcaactgcgacgccgacgcaaccccggcgcctgctcagccgaggaaggcgaatgacgccgtcgctgctgctgcttctcctgcggcggcggcgtcggcgtttccggcctcgcctgaacaggaggtcgacgcggacggcctcgacgacgtcgacgacgcggccgacgctggcatggagagcaagattctggcgatcagggatttcctggaggacccggaccagtctgaggacgacatagtgagcctactgcagaacctagcagacatggatatcacttacaaggctctccaggacacggacatcggccgccatgtgaatggcctgcgtaagcacccatccagcgaggtccggcaactggtgaagctgctcgttaggaaatggaaggaaatagtggatgattgggtgaggctgcacaactcatgtggtgatggtagtggctccatcataagcgatggtgactcacctgacaaagttcaatccaagtaccatcaaaatactcatgcttcagacttcaagtatccccccagcccacagaggcataatgttttgagctcagagagatctagcaaccacaatttggtggagtcaacaatggagaagcgtagaacgagccctgctcctgcatacaataacaccaagcagaacaacagcaacaactattccagtatttcatcgtcagcaccagctagagcaatacgggagcaaaagaacactcttttggattctgagaagctagactcagctaggaagaggcttcaggaaaactaccaggaagcgcaaaacgtgaacttgtcaaaatgacgtgctaaattcagg

SEQ ID NO: 211970 - DNA, 1020 bp, Zea Mays
atttgtgatcccgtggtgtgctatttgccgaagcttgcaccggtgcacggacaccaccacctgctcccccatccggcggcacccgggccgccgcgcccgcgcgctctatccaccactcaaataaacgcgatatgctctgccttgctggcctgctattgaaaatcacacgacttccaccgcaatcgcacgcaaaaatcccgctcgagcttccaccgtctccctccgcttccccgtgcggcggtgccgggtcgcgccgtgccatggcgcccgccttctcggtctcgtgcgcgcccggatcctcgcgcccgctggccgccagccccggccccagcgtcgtcgtcgtcgcctcctcccaacttcccgcgtcgtcgcggagcagcgaacgcaggagagcaccaggcctcgcgctcgccgcggccccgggtgtcggcggtagggatggcggtggcaggtggagagcaggcatctcgtccttccccttcctgccgccgttcttcacagggaacaagggggagaaggacgctgagaaggcgatgaggctcaaggaggagctcctcgacgccattgcaccgctggaccgtggcgccgaggccacgcccgaggacaaggagcgcgtcgagcagattgttcagcaactggaggcggtgaaccaggtgaaggagccgctcaagtccgatctcctaaacggcaaatgggagcttctctataccacctccacaagtatactgcagccacagaggccaaagtatctgaggccgtttgggaagatttaccaatcaatcaacgccgacaatttgagagcccaaaacatggaaacttggccctactttaatcaggttactgccaacttggtacctctgaattctagaagagtggcagttaaatttgactacttcaagatatttggtttgataccgatcaaagcacccggaagtggtaaaggtgaacttgagattacttatcttgatgaagagctcagcaatgcatgggccttgttgatagggttcgctaagttgtaag

SEQ ID NO: 211971 - DNA, 1011 bp, Zea Mays
ttgccgaagcttgcaccggtgcacggacaccaccacctgctcccccatccggcggcacccgggccgccgcgcccgcgcgctctatccaccactcaaataaacgcgatatgctctgccttgctggcctgctattgaaaatcacacgacttccaccgcaatcgcacgcaaaaatcccgctcgagcttccaccgtctccctccgcttccccgtgcggcggtgccgggtcgcgccgtgccatggcgcccgccttctcggtctcgtgcgcgcccggatcctcgcgcccgctggccgccagccccggccccagcgtcgtcgtcgtcgcctcctcccaacttcccgcgtcgtcgcggagcagcgaacgcaggagagcaccaggcctcgcgctcgccgcggccccgggtgtcggcggtagggatggcggtggcaggtggagagcaggcatctcgtccttccccttcctgccgccgttcttcacagggaacaagggggagaaggacgctgagaaggcgatgaggctcaaggaggagctcctcgacgccattgcaccgctggaccgtggcgccgaggccacgcccgaggacaaggagcgcgtcgagcagattgttcagcaactggaggcggtgaaccaggtgaaggagccgctcaagtccgatctcctaaacggcaaatgggagcttctctataccacctccacaagtatactgcagccacagaggccaaagtatctgaggccgtttgggaagatttaccaatcaatcaacgccgacaatttgagagcccaaaacatggaaacttggccctactttaatcaggttactgccaacttggtacctctgaattctagaagagtggcagttaaatttgactacttcaagatatttggtttgtttctctattattagataccgatcaaagcacccggaagtggtaaaggtgaacttgagattacttatcttgatgaagagctcagcaatgcatgggccttgttgatagggttcgctaagttgtaag

SEQ ID NO: 211972 - DNA, 972 bp, Zea Mays
ttgccgaagcttgcaccggtgcacggacaccaccacctgctcccccatccggcggcacccgggccgccgcgcccgcgcgctctatccaccactcaaataaacgcgatatgctctgccttgctggcctgctattgaaaatcacacgacttccaccgcaatcgcacgcaaaaatcccgctcgagcttccaccgtctccctccgcttccccgtgcggcggtgccgggtcgcgccgtgccatggcgcccgccttctcggtctcgtgcgcgcccggatcctcgcgcccgctggccgccagccccggccccagcgtcgtcgtcgtcgcctcctcccaacttcccgcgtcgtcgcggagcagcgaacgcaggagagcaccaggcctcgcgctcgccgcggccccgggtgtcggcggtagggatggcggtggcaggtggagagcaggcatctcgtccttccccttcctgccgccgttcttcacagggaacaagggggagaaggacgctgagaaggcgatgaggctcaaggaggagctcctcgacgccattgcaccgctggaccgtggcgccgaggccacgcccgaggacaaggagcgcgtcgagcagattgttcagcaactggaggcggtgaaccaggtgaaggagccgctcaagtccgatctcctaaacggcaaatgggagcttctctataccacctccacaagtatactgcagccacagaggccaaagtatctgaggccgtttgggaagatttaccaatcaatcaacgccgacaatttgagagcccaaaacatggaaacttggccctactttaatcaggttactgccaacttggtacctctgaattctagaagagtggcagttaaatttgactacttcaagatatttggtttgataccgatcaaagcacccggaagtggtaaaggtgaacttgagattacttatcttgatgaagagctcagaaaccacaccttgcttg

SEQ ID NO: 211973 - DNA, 1361 bp, Zea Mays
ttgccgaagcttgcaccggtgcacggacaccaccacctgctcccccatccggcggcacccgggccgccgcgcccgcgcgctctatccaccactcaaataaacgcgatatgctctgccttgctggcctgctattgaaaatcacacgacttccaccgcaatcgcacgcaaaaatcccgctcgagcttccaccgtctccctccgcttccccgtgcggcggtgccgggtcgcgccgtgccatggcgcccgccttctcggtctcgtgcgcgcccggatcctcgcgcccgctggccgccagccccggccccagcgtcgtcgtcgtcgcctcctcccaacttcccgcgtcgtcgcggagcagcgaacgcaggagagcaccaggcctcgcgctcgccgcggccccgggtgtcggcggtagggatggcggtggcaggtggagagcaggcatctcgtccttccccttcctgccgccgttcttcacagggaacaagggggagaaggacgctgagaaggcgatgaggctcaaggaggagctcctcgacgccattgcaccgctggaccgtggcgccgaggccacgcccgaggacaaggagcgcgtcgagcagattgttcagcaactggaggcggtgaaccaggtgaaggagccgctcaagtccgatctcctaaacggcaaatgggagcttctctataccacctccacaagtatactgcagccacagaggccaaagtatctgaggccgtttgggaagatttaccaatcaatcaacgccgacaatttgagagcccaaaacatggaaacttggccctactttaatcaggttactgccaacttggtacctctgaattctagaagagtggcagttaaatttgactacttcaagatatttggtttgtttctctattattagataccgatcaaagcacccggaagtggtaaaggtgaacttgagattacttatcttgatgaagagctcagggtttcgagaggcgacaagggaaacttgttcgtactgaagatggtcgacccagcatacagggttccattataataatgttatgataacatttaggagtcagctatgtgtaacattcttcttcctcgcatgaagactgaggtaatgtaaggcgtgtaaatattaaatatcacatctgaaagataaattttttggggggaagctgtacattttctgagaaaccagtaagacttccgcgtccaaaatgaggcccaagatttaagcatagacgatagagaacatgtcgtgtgaagactaacacacatcaatgtatagaaaatgcaatgataatccattttgatccaactacatcgtcactctgaaaaatatcagtagctgcttttggattctcat

SEQ ID NO: 211974 - DNA, 1869 bp, Zea Mays
cccatatatatggtgcggagcatcggcgcagcccctttctccgccccccaccgcgcaccgcccgaccagcgacgggaacccacgccgccccctctccgccccgtgcagtcgctccccagctcccgcgccgccgttccctgctaaccccatccccttcgcctcgcctcgtgctaagagagcgcggaccactgcggtgccacgccgacgccttctgccggccccaggtggattctgtccgcagactcctggaggtgctgctatctagccccttgatctgagctgaaattaggagctgaacctgccgggcgagccgatgtacggctcgccggtgtccaaggacctcaacctcccggtgcagccgcccatggcctcgtccgggctgctgagcagcagcagcagatgatgttccactcccagcagcagcaggagatggtgagcgccaagtccggcctttaccgcaccgtgaactcaggcgtagaaaccgcggccgctgctggtgccggcggggccagctccagtgacaacgctagcaacctgattcgacagagcagctcccccgccggattcctcgatcatttgaacatggagaacggatacggggccatgctgagggcgggcatggccacggcggactccctcgcaggcggcggcagcaggctaaaagggcaactgagcttctcgtcacggcaggggtcattgatgtcccagatctcagagatggacagcgaggaggtcggagggagcagcccagaggcttccggcggcggcggcagggggtacatccctgggtacccaatgggctctgggtgggaggactcgtcggctctcttgtcagacaatttgtctggcgtcaaacgcccccgggactcgtcggagcctggccagagcggccttacgcaccagttcagcgtgcccaagacgtcgtccgagatggcaactattgagaaattcctccagttccaggacgccgtgccttgtaagatccgtgccaagcgggggtgcgccactcatccacgcagcatcgctgagagggtgaggagaacaaagatcagtgagcgaatccgaaagctgcaagaactcgttccaaatatggacaagcaaaccaacacatctgacatgctggatttggctgtcgactacatcaaggatctccagaagcaggttaaggtactaaaggagagccaagataactgcacctgctcagcaagcaagaaccagcagcactcctgctgaaaccgtaatgctcactgtacatgaatgacctcgaaagcatgtccactcgggaaagaaaaagatgcagtgtagcttttgtatgagcgaagggggatgaagcaatggcatcatcaagcattcaagtgattgggagaagggtaaaaaaagtggggagagatatatatacaggagaaacaactgtatagtttggctgtagctttgctatatatacacacacgcactaccctttcggtagaaagtggttaatttacctctgtttactagtagcaccagctgtaaatgtgccgcagataaacagtggagaagcttggaggtgttcagtgcgagcgatagtgtttcaactctatgaacatatcatcgttgggttaatgggcatcatctactggggtctggggatagccctgcttcctctcggacctcaggcctgaagcttgtatgttgttcagctatctgacattctgactatatcgatgcttaacatagctctagtgcgacaccaagagaacattcaggctctggacatggcatttatattgttccatcgccttggtcttaggctatggccagcggattgtgatatgaccaaaacattatttatagagtggagtttgaaacgagagatgtggatgagtaaac

SEQ ID NO: 211975 - DNA, 1823 bp, Zea Mays
accgcgcaccgcccgaccagcgacgggaacccacgccgccccctctccgccccgtgcagtcgctccccagctcccgcgccgccgttccctgctaaccccatccccttcgcctcgcctcgtgctaagagagcgcggaccactgcggtgccacgccgacgccttctgccggccccaggtggattctgtccgcagactcctggaggtgctgctatctagccccttgatctgagctgaaattaggagctgaacctgccgggcgagccgatgtacggctcgccggtgtccaaggacctcaacctcccggtgcagccgcccatggcctcgtccgggctgctgagcagcagcagcagcagatgatgttccactcccagcagcagcaggagatggtgagcgccaagtccggcctttaccgcaccgtgaactcaggcgtagaaaccgcggccgctgctggtgccggcggggccagctccagtgacaacgctagcaacctgattcgacagagcagctcccccgccggattcctcgatcatttgaacatggagaacggatacggggccatgctgagggcgggcatggccacggcggactccctcgcaggcggcggcagcaggctaaaagggcaactgagcttctcgtcacggcaggggtcattgatgtcccagatctcagagatggacagcgaggaggtcggagggagcagcccagaggcttccggcggcggcggcagggggtacatccctgggtacccaatgggctctgggtgggaggactcgtcggctctcttgtcagacaatttgtctggcgtcaaacgcccccgggactcgtcggagcctggccagagcggccttacgcaccagttcagcgtgcccaagacgtcgtccgagatggcaactattgagaaattcctccagttccaggacgccgtgccttgtaagatccgtgccaagcgggggtgcgccactcatccacgcagcatcgctgagagggtgaggagaacaaagatcagtgagcgaatccgaaagctgcaagaactcgttccaaatatggacaagcaaaccaacacatctgacatgctggatttggctgtcgactacatcaaggatctccagaagcaggttaaggtactaaaggagagccaagataactgcacctgctcagcaagcaagaaccagcagcactcctgctgaaaccgtaatgctcactgtacatgaatgacctcgaaagcatgtccactcgggaaagaaaaagatgcagtgtagcttttgtatgagcgaagggggatgaagcaatggcatcatcaagcattcaagtgattgggagaagggtaaaaaaagtggggagagatatatatacaggagaaacaactgtatagtttggctgtagctttgctatatatacacacacgcactaccctttcggtagaaagtggttaatttacctctgtttactagtagcaccagctgtaaatgtgccgcagataaacagtggagaagcttggaggtgttcagtgcgagcgatagtgtttcaactctatgaacatatcatcgttgggttaatgggcatcatctactggggtctggggatagccctgcttcctctcggacctcaggcctgaagcttgtatgttgttcagctatctgacattctgactatatcgatgcttaacatagctctagtgcgacaccaagagaacattcaggctctggacatggcatttatattgttccatcgccttggtcttaggctatggccagcggattgtgatatgaccaaaacattatttatagagtggagtttgaaacgagagatgtggatgagtaaac

SEQ ID NO: 211976 - DNA, 1600 bp, Zea Mays
gacacgaggagaacttcatttctattacttttataacaaaaatatattattgttcgtcgaaactaaagttttgcagtcagaagcatgaagcaaactgtcagacgacctcgtagaccgaccccctgattcagagagccagcacacaggaaagcccaccaacagaacaattaaccagaggtccagagctactacccaaaagccctgttttcataatgatataaatccatatttgtcccagcgaaggcacacagccgccgccatttcttcatcctcccatctcctgatctccatctccatcttcttcgcagcgccggcgatccatcttccgctgcctcccttcctcgcgctcgggctctcagtgacggcatcagcggtttcccctcccgcctctcgccagtcgcatcacgcccccgcctccggtccaccgcacaccggccggtgaccctacatggccgtttcttttgcaaatgtcaacgccgaggcagggctgaaaaagcttgatgagtaccttctcactcgcagctacatcactggctaccaagcttccaaggatgacctggctgtctactcttcatttttggctgatccctcatccaagtatatcaatgtagcaaggtggtttaatcacattgatgcactcctgaggctgagtggagttaccgcagagggcctaggtgttaaggttgagccatcagcggttccttcagcttcaattcttgatgttgctgatggacaggccccagctgctgacgaggatgacgatgatgatgttgacctttttggcgaggagactgaagaggagaagaaggctgctgaagaacgtgctgcggctgccaaggcttctggcaagaagaaagaatctgggaaatcgtcagttttacttgatgtgaagccatgggacgatgagactgacatggccaagctcgaggaagctgttaggagtgtccagatggaaggactgctttggggcgcatccaagcttgtcccagttggatatggcatcaagaagctgcaaatcatgatgaccattgtcgatgaccttgtctctgttgacactctcatcgaggaccatctctgcgctgagccagtgagcgaatacgtccagagctgcgacattgtcgccttcaacaagatctaaatttccttgtgatggtggcaatggtggttggtgggcactgtaccagcctaatttataattttccatgagcatcttcaagagtttttctaaattatcatttggagtcatttacataaaaagcactttctatatctttttaatctcaacaacttttctatatcttgtttgcaccctggagagctatttacgttttctatctttagctagcgagaaacctggatggctggaatagaagataactatatttagacaatactttaaataagctgttggaagatagtaattcttgtgtgatcggatgcataatgccttggtctggctggttggaggtgtatcactctggagcatgttcggttctgtttatttcagctttttttagcttatgcctatcaaaatctgccacagaatgtcaaacgttgagctttttcaggtaggtactataaaaatagatttagtaaagag

SEQ ID NO: 211977 - DNA, 1355 bp, Zea Mays
gacacgaggagaacttcatttctattacttttataacaaaaatatattattgttcgtcgaaactaaagttttgcagtcagaagcatgaagcaaactgtcagacgacctcgtagaccgaccccctgattcagagagccagcacacaggaaagcccaccaacagaacaattaaccagaggtccagagctactacccaaaagccctatggccgtttcttttgcaaatgtcaacgccgaggcagggctgaaaaagcttgatgagtaccttctcactcgcagctacatcactggctaccaagcttccaaggatgacctggctgtctactcttcatttttggctgatccctcatccaagtatatcaatgtagcaaggtggtttaatcacattgatgcactcctgaggctgagtggagttaccgcagagggcctaggtgttaaggttgagccatcagcggttccttcagcttcaattcttgatgttgctgatggacaggccccagctgctgacgaggatgacgatgatgatgttgacctttttggcgaggagactgaagaggagaagaaggctgctgaagaacgtgctgcggctgccaaggcttctggcaagaagaaagaatctgggaaatcgtcagttttacttgatgtgaagccatgggacgatgagactgacatggccaagctcgaggaagctgttaggagtgtccagatggaaggactgctttggggcgcatccaagcttgtcccagttggatatggcatcaagaagctgcaaatcatgatgaccattgtcgatgaccttgtctctgttgacactctcatcgaggaccatctctgcgctgagccagtgagcgaatacgtccagagctgcgacattgtcgccttcaacaagatctaaatttccttgtgatggtggcaatggtggttggtgggcactgtaccagcctaatttataattttccatgagcatcttcaagagtttttctaaattatcatttggagtcatttacataaaaagcactttctatatctttttaatctcaacaacttttctatatcttgtttgcaccctggagagctatttacgttttctatctttagctagcgagaaacctggatggctggaatagaagataactatatttagacaatactttaaataagctgttggaagatagtaattcttgtgtgatcggatgcataatgccttggtctggctggttggaggtgtatcactctggagcatgttcggttctgtttatttcagctttttttagcttatgcctatcaaaatctgccacagaatgtcaaacgttgagctttttcaggtaggtactataaaaatagatttagtaaagag

SEQ ID NO: 211978 - DNA, 1072 bp, Zea Mays
ggcatttccactattccagcctcatggatgctgctaaatacagagatgaattaaagattttggctccacactccctcctcaaatgttctagtgatgcaactactttggggataagagttcaagtcaggagcgtctatattgaaagccggagccagccattgaaagggcaattcttttttgcttatagaattagaattacgaatagttctcagcgccctgttcagcttctcaaaaggcactggattgttacagatggaaatggaaggacagaaaacatttggggagttggagtagtgggagaacaacctgtcatattcccgaagactggttttgagtactcttctgcatgcccattgagcactccaaatgggagaatggaaggtgactttgagatgaagcacatcgacaaggctggatcatcaacattcaatgttgcaattgcgccattctctctgtcaattcttggtgacgataatgatgttctgctatgaactacactgaggacttgcttgggagcaaatggattgaagggaattaagggggctacaatcccttactattcaattttgaatagtaagggattttagctcacaatccccttctgcaaacaagccctgagatttaaactagacacacaaacacaaatatttattgtaagtgatgtaattgagcgcaaggttcaggtggaactactatggttgacttatggctggagccaagtgccctggtgcaaggtcaggtagagttctctgggatgttgaatctggaccatgcgagtatcaattgtgaggcacaataggacatcctaccaattgtacttctaaatgtacagcatggaacttagagcttgctacatgtattatacagtacctttttatttttcccatcacggtatcaccttagttatcgcggcctttgattatattgtatatcagctcagcaaaatatggtgttttttgttggaactgcaatgtaagatgtttgatatgaccgttggtgcttcaaatggacacagtgacggtgcattgcattgcattttgcactcggcctggtcaccaagtgctactttcgt

SEQ ID NO: 211979 - DNA, 3922 bp, Zea Mays
attgaagctacttctagcctatcaaatatcgagcagatactgaaggaagctcaacaccgatggttacgccctgctgaaatatgtgaaatactgaaaaactacaggaatttccgtattgctccagaaccaccaaacagaccaccaagtggctcactttttttatttgatcggaaagtattgagatacttcaggaaggatggtcataattggaggaagaaaaatgatcagaagactgtcaaggaagcccatgaaaggttgaagtctggaagtattgatgtgcttcactgttactatgctcatggggaagagaatataaacttccaaaggaggacttactggatgttggaagaggactatatgcacattgtacttgtgcattatcttgagacaaagggtggcaagtcatctcgtgctagaggaaataacattattcaagaagctgctgtgggtagtccttcacagattatggaggtagaaagctcacttagtggacaggcctcagaatacgaagaggcagaatcagaatatctaaagcaaaattcggtgcagcagatatttattcaggaggagctggatacgactctttcacttggatgcaacagcatgaaaatggaactggacccgtgatagattcttctctcttcagctcttacacacctgcttcgtccataggtaattaccaggggcagcatgccacacaaaataaaagcttctatcctgttaaccaacataatggtcctctcattcttaatggatcaagtgacatgcttggaacaaatggccgtgcaaatcaaactgatcttccatcatggaattctgtgatagaactggacgagcctggtcaaatgccccatctccagtttcctgtcccttctgatcaaggtgctaccacggaaggcctgggagttgattacttaacatttgatgaagtatattctgatggcctcagtctcaacgatattggtgcagcaggaactcatgggaagtcatatctgcagttctctagtgctactggtgatttgtctgcaacagagaacagcctccctcaacaaaatgatggttctctggaggaggcagccattggctatccatttttgaagactcagtcatctaatctatctgatatcctaaaagacagctttaagaaaactgacagttttacaagatggatgagcaaagagcttcctgaagtggaagattctcaaattcattctagttctggggggttctggagcactggagaagcaaatgatatcatcgaagcatcaagccatgagccgctggatcagtttactgtttccccgatgctctcgcaggagcagctctttagtatagtagattttgctccaaactggacatatgtgggttcaaagactaagattttagttgctggtaacatcctgaatgacagtcaaatcaccgagagatgcaagtggtcatgtatgtttggagaagttgaagttccagcaaagattttagcagatggtactctcatctgttattcgccccagcataaactcggtcgagttcctttttacattacctgctccaacaggttggcctgcagtgaagtgcgggagtttgaatttcgaccaactgtttcccaatacatggatgctcctagtccacatggtgaaacaaacaaagtttatttccagatacgccttgacaagttgttgtcccttgaaccagatgagtaccaggcaactgtatctaaccccagcctggagatgattgacttaagtaagaagataagttcactgatggcgagtaatgatgagtggtccaacttgctaaagttggctgttgataatgagccttctactgctgatcaccatgatcagtttgttgaaaaattgattaaggaaaaattgcatgtctggcttctaaataaagttggtatgggtggcaagggacccagtgtgttagatgatgaagggcagggcgtgcttcacttagcagctgcccttggatatgattgggctataaggccgacacttgctgctggcgtgaatattaatttcagagatgttcatgggtggactgcactccattgggctgcgatttgtggccgagagcggactgtagttgcgcttattgctctaggagcagctcctggagctttgacagacccgactcctgatttccctggaagtacaccagcagatatcgcatcagctaatggccaaaagggaatatctggtttcttggcagagtcttctctgaccagtcatcttcaggccctcaatctgaaggaagctaatatggctcaaatatctggtctacctggtattggagatgttactgagagagattcactgcatcctccaagcggagattcattaggtcctgttcgaaatgctgctcaagctgctgcgcggatatatcaagttttcagggtgcaatccttccagagaaagcaagcggctcaatctgaggatgataaaggtggaatgtctgatgagcgtgccctctcactcctttctgtcaagccacccaagtcagggcagcttgatcctctgcattctgctgcaactcgcatacagaataagttcagaggatggaaggggagaaaggagtttcttcttattaggcagcgaattgtgaagatccaggctcatgtgcgaggtcaacaagtgaggaagcattatcggaaaatagtttggtctgttggcatcgtggagaaagttatattgcgttggaggcgtagaggggctggcttacgtgggtttcggtctacagaaggttcagtggagagcagcaatggcggaacgagtagcagttcaatccaagataagccttctggggatgattatgattttctgcaagaaggacgaaaacagactgaagaacggctccagaaagctcttgcgagagtgaagtccatggctcaatacccagaagcaagagatcagtaccataggattttgactgttgtgtcaaaaatgcaggagtctcaggctatggaagaaaagatgctggaggagtcagcagggatggacttcatgagtgaattcaaggaattgtgggatgacgacacacctatacctggttatatttagttttcaaacctactttgttggatttctctgtagattgcctcctttgtcttgagtgctactgaattgatggcgcacatagctgataacccgaagtagcgttgctggagcagtggagcatgacctgacatgcttgaatttggacttagatgtagtatttcatttgccttatgtacagtagaatgttctctacatttgaggaagccttgtatttactgtgtgaaatcggtgtaaagagtttgacattagagatcttaccagatgacttaacggttgcatgtgtggcgtgcagtccagaagttaggaatttgacccgtcgtggctttctgaaccgatcaaaggctgtggccgtgctcatcatctactaccaccatcgcctcggccagaaccacgccgctcgcctagctagctggggtttgaatgactttcgacgccatggactcccttcggctctaggagccatcctcttgctcttctctgcgtctgcatgttaacagcactagcctcttgaactcaactaataacagcaaggtactagaatggaagagaatctgggtacaagagagataaagctggggaagatgaacagactagagaatggaggaagatgaacagactagagaacagaggaagatgaacagtaaagaggttctctgttgattccttgatatccatcgcctgtgcagcttctccattttatagcacagaatacccccacttgcctcctttcaagggcccacatgacagtgtactgacattccccaacgcttaaaatgcggcttgcccccaagccgctgacccttatcgtcaagttgccggaggccctgcacaaatccaatcgctcaactccataggtggaggcc

SEQ ID NO: 211980 - DNA, 4192 bp, Zea Mays
gcctctttcagtttcaggcgttcaatcactagcgcggttatgctctgagctaaacccttgtagcagagcgaacgaggaaaagttctccgtttccactttcctcctttctccacgccccgaacctgcagaaatcaccctttccaccccaccccccgccgctcggatccccaggccagcacggcctcccctcctccccggcccggtccagcgggttgcatggtccgcggccgccgcttgtgagcccgatcgatggccacgacggaggcgcgccgcctcgcggtcgtgccgcagctagatatcgagcagatactgaaggaagctcaacaccgatggttacgccctgctgaaatatgtgaaatactgaaaaactacaggaatttccgtattgctccagaaccaccaaacagaccaccaagtggctcactttttttatttgatcggaaagtattgagatacttcaggaaggatggtcataattggaggaagaaaaatgatcagaagactgtcaaggaagcccatgaaaggttgaagtctggaagtattgatgtgcttcactgttactatgctcatggggaagagaatataaacttccaaaggaggacttactggatgttggaagaggactatatgcacattgtacttgtgcattatcttgagacaaagggtggcaagtcatctcgtgctagaggaaataacattattcaagaagctgctgtgggtagtccttcacagattatggaggtagaaagctcacttagtggacaggcctcagaatacgaagaggcagaatcagaatatctaaagcaaaattcggtgcagcagatatttattcaggaggagctggatacgactctttcacttggatgcaacagcatgaaaatggaactggacccgtgatagattcttctctcttcagctcttacacacctgcttcgtccataggtaattaccaggggcagcatgccacacaaaataaaagcttctatcctgttaaccaacataatggtcctctcattcttaatggatcaagtgacatgcttggaacaaatggccgtgcaaatcaaactgatcttccatcatggaattctgtgatagaactggacgagcctggtcaaatgccccatctccagtttcctgtcccttctgatcaaggtgctaccacggaaggcctgggagttgattacttaacatttgatgaagtatattctgatggcctcagtctcaacgatattggtgcagcaggaactcatgggaagtcatatctgcagttctctagtgctactggtgatttgtctgcaacagagaacagcctccctcaacaaaatgatggttctctggaggaggcagccattggctatccatttttgaagactcagtcatctaatctatctgatatcctaaaagacagctttaagaaaactgacagttttacaagatggatgagcaaagagcttcctgaagtggaagattctcaaattcattctagttctggggggttctggagcactggagaagcaaatgatatcatcgaagcatcaagccatgagccgctggatcagtttactgtttccccgatgctctcgcaggagcagctctttagtatagtagattttgctccaaactggacatatgtgggttcaaagactaagattttagttgctggtaacatcctgaatgacagtcaaatcaccgagagatgcaagtggtcatgtatgtttggagaagttgaagttccagcaaagattttagcagatggtactctcatctgttattcgccccagcataaactcggtcgagttcctttttacattacctgctccaacaggttggcctgcagtgaagtgcgggagtttgaatttcgaccaactgtttcccaatacatggatgctcctagtccacatggtgaaacaaacaaagtttatttccagatacgccttgacaagttgttgtcccttgaaccagatgagtaccaggcaactgtatctaaccccagcctggagatgattgacttaagtaagaagataagttcactgatggcgagtaatgatgagtggtccaacttgctaaagttggctgttgataatgagccttctactgctgatcaccatgatcagtttgttgaaaaattgattaaggaaaaattgcatgtctggcttctaaataaagttggtatgggtggcaagggacccagtgtgttagatgatgaagggcagggcgtgcttcacttagcagctgcccttggatatgattgggctataaggccgacacttgctgctggcgtgaatattaatttcagagatgttcatgggtggactgcactccattgggctgcgatttgtggccgagagcggactgtagttgcgcttattgctctaggagcagctcctggagctttgacagacccgactcctgatttccctggaagtacaccagcagatatcgcatcagctaatggccaaaagggaatatctggtttcttggcagagtcttctctgaccagtcatcttcaggccctcaatctgaaggaagctaatatggctcaaatatctggtctacctggtattggagatgttactgagagagattcactgcatcctccaagcggagattcattaggtcctgttcgaaatgctgctcaagctgctgcgcggatatatcaagttttcagggtgcaatccttccagagaaagcaagcggctcaatctgaggatgataaaggtggaatgtctgatgagcgtgccctctcactcctttctgtcaagccacccaagtcagggcagcttgatcctctgcattctgctgcaactcgcatacagaataagttcagaggatggaaggggagaaaggagtttcttcttattaggcagcgaattgtgaagatccaggctcatgtgcgaggtcaacaagtgaggaagcattatcggaaaatagtttggtctgttggcatcgtggagaaagttatattgcgttggaggcgtagaggggctggcttacgtgggtttcggtctacagaaggttcagtggagagcagcaatggcggaacgagtagcagttcaatccaagataagccttctggggatgattatgattttctgcaagaaggacgaaaacagactgaagaacggctccagaaagctcttgcgagagtgaagtccatggctcaatacccagaagcaagagatcagtaccataggattttgactgttgtgtcaaaaatgcaggagtctcaggctatggaagaaaagatgctggaggagtcagcagggatggacttcatgagtgaattcaaggaattgtgggatgacgacacacctatacctggttatatttagttttcaaacctactttgttggatttctctgtagattgcctcctttgtcttgagtgctactgaattgatggcgcacatagctgataacccgaagtagcgttgctggagcagtggagcatgacctgacatgcttgaatttggacttagatgtagtatttcatttgccttatgtacagtagaatgttctctacatttgaggaagccttgtatttactgtgtgaaatcggtgtaaagagtttgacattagagatcttaccagatgacttaacggttgcatgtgtggcgtgcagtccagaagttaggaatttgacccgtcgtggctttctgaaccgatcaaaggctgtggccgtgctcatcatctactaccaccatcgcctcggccagaaccacgccgctcgcctagctagctggggtttgaatgactttcgacgccatggactcccttcggctctaggagccatcctcttgctcttctctgcgtctgcatgttaacagcactagcctcttgaactcaactaataacagcaaggtactagaatggaagagaatctgggtacaagagagataaagctggggaagatgaacagactagagaatggaggaagatgaacagactagagaacagaggaagatgaacagtaaagaggttctctgttgattccttgatatccatcgcctgtgcagcttctccattttatagcacagaatacccccacttgcctcctttcaagggcccacatgacagtgtactgacattccccaacgcttaaaatgcggcttgcccccaagccgctgacccttatcgtcaagttgccggaggccctgcacaaatccaatcgctcaactccataggtggaggcc

SEQ ID NO: 211981 - DNA, 2005 bp, Zea Mays
aatttaaaaactaaaataaaataaaatagatggattaaaaattcgtcaataaaaatcaaacacgctgacatgtggtaccaacctttaatgggctatgccttagtgggccctcggtcaaccacctacgggcacatcacatgactcaacacgcacgcctgaggctgcctccagcagtccagccgcgtctcccgctctcgtcttttctttcggcgacgagccgcagactaggcaaccgctgccgccctaggtcaggtgcccaggtatccatcggacgacccttccccgtcgacagcaagcaccaggtgtgggcaatatcaaatcaaactgtgcacttatggaggcttcaattccaagttttgaaagcatgccaatattatgtggcatgaaagagatggaaaccagtcagacggccaacttggggattcatcaggagctgggaccagagatcagtcaaaatcccatgggaaatcatgttaacccagaaaaggaaactaatgaaattccaggatctgaggttaaccaagagcttgtggaaatatgccagggcgcagtggtggaaactgatacgatccaagaaaatcaagctgttccagaggcaggcttagaggttaatgaagagactgtggaaacatgccaggaaacagctgcagaatctgatgttaacctagagaagcaaacttctgatccaggtgttatttaccgctgcagaaaatgccggagaatgcttgcaacacaagaatttgttgttacccatgaagtaggtgcaggtggcaaaagcttcagagcaggcaaacggtctaatgtgcatgaggatgatgagaaaccagaatgtccatgcatcttcgtggagcccatgaagtggatgcaaactgtggaagaaggatatgttgcgaaaaagctcttttgcatgggatgtaaagctcgtctgggacagttcaattgggctggtatgcagtgcagctgcggagcctgggtgattccagcatttcagctgaccaaaagtaagatcgaccaatgctcaatgtaacaccagtgcaattaggcgaagttttgacccccttagcagtgtcgttacaacatatatatgtgactaggaaacagtatcatgtagacatgtataggcactgtggtcatttggtctgctgtttagtctgctgctgctgattggcacgtgggttccaccaagctgcaacaactgatactaggaagcattaggtgggctttcagtttgctggtttgttttgccatgctactttagagcaactctaatagattagctaaaaaggctagtcaaatttatagatttagctactctctcaaatcgtttttacagaaaaaagtgtaggttaatccaacagcatcggtaaacctaatggagataaacctaatggagagtgaagcagtctatccaaaaacaaaaacagagagcgaagatgtagggatagagagctactaaatttaaagagccatttacagagtctattggatacacttttcttctaatattagctaaatttacctttagaaaaccatatacctagtctcttggagttgtgaggtgatctattgttctagtctcttggagttgtgaggtgatctattgttcggagggagatgggtatgatatgatcaatctaatgagtgggtctatttcctcgagatggataatgcaattctgatctgctggtaagttgttatgaggttaccttccataatgctggcccgctgttgtatgaattatgagcatacgcatgttatgctgacgtcagcttcttcttcttctttccctgtcagctttgacttagttgtctccgacagtcttcctatctcaatctccattctataaacattcctatctcaatctccattctataaacagtacaatttatagtgtaaaataatgttttgtatggttatgtttatgctccgccgagcacgactttagagtgacatggacgtctggtatcttgaaataagcctgttttggtggcagtggagatcacag

SEQ ID NO: 211982 - DNA, 1546 bp, Zea Mays
cccgtcgtcctctccatttccttctgtctgcttgccctcaaaccctagcccgtaccggcgtccaccttcgcgcaccctcgcctcaccaaacacccacggcgcattggcgcttccacctcttatcgtacgaaggcgagcggctttcacggtgtctctctgtcgcatgcaatggcaccgctgtttgaggggcgcccaacagctgcctgcccacggcatgctcaggggcgctggggtcccttgccgctgtccctgaagtctagcctgggttgttgatcttgccgcagatgcggtactccattacttctccgcccgcgccatcatttcggccacacctcagtctgttggtcggtcgcagatcccttgccccgtcgagcttaatatgcaatccgttgcttgtgaaggttgtggcttccttgggtgatgcttatttgagaacatagctgttgtgctctgagcatgtcctgtgtgcctgtcatggcggcttcttttggcgacatcataccaacatattcaatgtcaggctttaaaggagtgagctggtttctatattttaactgatgcaccttgatgctttattgagcggtgtctatgaaatgatttggatggaaggctatcctatgctgctgatcagtacttaatggatgggagaagggtcagacctcagataagtacctaacttgctatttcctatttttttatcacttttattgatgcccaattgcatctaaagtgttgtccacttctattgcagcagtgcttgaggattcagtgatcagcagatctgcaaggacaaaaggaccaaaggagtgagctggtttttatattttaactgatgcacctggatgctttattgagcggtgtctatgaaatgagttggatggaagattgtcgtgttttggacaatgccaacctttgtttccgctgtgcctgccaaggttgtggcttccttgggtgatgcttatttgagaacatagctgttgtgctctgagcatgtcctgtgtgcctgtcatggcggcttcttttggcgacatcataccaacatattcaatgtcaggctttaaaggagtgagctggtttttatattttaactgatgcacctggatgctttattgagcggtgtctatgaaatgatttggatggaagattggagaaacgcccatgggcctggcaaactgtggcatgtggctttgaactttgccaattggagacctgatgtggatcattttgggacgcgagttaagccccctgtttggagtgccagaaacaaaacagatggagaagggaaaaaggtgtcaggggataagagccagcgcctgatcaccgttttattcgtttttgagtaaactgtagcgagcaacaggtagcctataattgagacaatgctgaatggattgtagaaaaggatctgctttaatttccgttaatttagcgccttcagtgatgttcctagttgctggagtacatgttaagtatatttaccatttaaatcctcccaccactctcgcgtagctttataaaaaagctcttaataaaccatgattacata

SEQ ID NO: 211983 - DNA, 1348 bp, Zea Mays
cccgtcgtcctctccatttccttctgtctgcttgccctcaaaccctagcccgtaccggcgtccaccttcgcgcaccctcgcctcaccaaacacccacggcgcattggcgcttccacctcttatcgtacgaaggcgagcggctttcacggtgtctctctgtcgcatgcaatggcaccgctgtttgaggggcgcccaacagctgcctgcccacggcatgctcaggggcgctggggtcccttgccgctgtccctgaagtctagcctgggttgttgatcttgccgcagatgcggtactccattacttctccgcccgcgccatcatttcggccacacctcagtctgttgtgttcaggactgtcagggttgtgctacctggatgtcggttgcctcattgataggaatcatcgtgcagattgtcgtgttttggacaatgccaacctttgtttccgctgtgcctgccaaggttgtggcttccttgggtgatgcttatttgagaacatagctgttgtgctctgagcatgtcctgtgtgcctgtcatggcggcttcttttggcgacatcataccaacatattcaatgtcaggctttaaaggagtgagctggtttctatattttaactgatgcaccttgatgctttattgagcggtgtctatgaaatgatttggatggaaggctatcctatgctgctgatcagtacttaatggatgggagaagggtcagacctcagataagtacctaacttgctatttcctatttttttatcacttttattgatgcccaattgcatctaaagtgttgtccacttctattgcagcagtgcttgaggattcagtgatcagcagatctgcaaggacaaaaggaccaaaggagtgagctggtttttatattttaactgatgcacctggatgctttattgagcggtgtctatgaaatgagttggatggaagattggagaaacgcccatgggcctggcaaactgtggcatgtggctttgaactttgccaattggagacctgatgtggatcattttgggacgcgagttaagccccctgtttggagtgccagaaacaaaacagatggagaagggaaaaaggtgtcaggggataagagccagcgcctgatcaccgttttattcgtttttgagtaaactgtagcgagcaacaggtagcctataattgagacaatgctgaatggattgtagaaaaggatctgctttaatttccgttaatttagcgccttcagtgatgttcctagttgctggagtacatgttaagtatatttaccatttaaatcctcccaccactctcgcgtagctttataaaaaagctcttaataaaccatgattacata

SEQ ID NO: 211984 - DNA, 1517 bp, Zea Mays
cccgtcgtcctctccatttccttctgtctgcttgccctcaaaccctagcccgtaccggcgtccaccttcgcgcaccctcgcctcaccaaacacccacggcgcattggcgcttccacctcttatcgtacgaaggcgagcggctttcacggtgtctctctgtcgcatgcaatggcaccgctgtttgaggggcgcccaacagctgcctgcccacggcatgctcaggggcgctggggtcccttgccgctgtccctgaagtctagcctgggttgttgatcttgccgcagatgcggtactccattacttctccgcccgcgccatcatttcggccacacctcagtctgttggtcggtcgcagatcccttgccccgtcgagcttaatatgcaatccgttgcttgtgaagattgtcgtgttttggacaatgccaacctttgtttccgctgtgcctgccaaggttgtggcttccttgggtgatgcttatttgagaacatagctgttgtgctctgagcatgtcctgtgtgcctgtcatggcggcttcttttggcgacatcataccaacatattcaatgtcaggctttaaaggagtgagctggtttctatattttaactgatgcaccttgatgctttattgagcggtgtctatgaaatgatttggatggaaggctatcctatgctgctgatcagtacttaatggatgggagaagggtcagacctcagataagtacctaacttgctatttcctatttttttatcacttttattgatgcccaattgcatctaaagtgttgtccacttctattgcagcagtgcttgaggattcagtgatcagcagatctgcaaggacaaaaggaccaaaggagtgagctggtttttatattttaactgatgcacctggatgctttattgagcggtgtctatgaaatgagttggatggaagattgtcgtgttttggacaatgccaacctttgtttccgctgtgcctgccaaggttgtggcttccttgggtgatgcttatttgagaacatagctgttgtgctctgagcatgtcctgtgtgcctgtcatggcggcttcttttggcgacatcataccaacatattcaatgtcaggctttaaagattggagaaacgcccatgggcctggcaaactgtggcatgtggctttgaactttgccaattggagacctgatgtggatcattttgggacgcgagttaagccccctgtttggagtgccagaaacaaaacagatggagaagggaaaaaggtgtcaggggataagagccagcgcctgatcaccgttttattcgtttttgagtaaactgtagcgagcaacaggtagcctataattgagacaatgctgaatggattgtagaaaaggatctgctttaatttccgttaatttagcgccttcagtgatgttcctagttgctggagtacatgttaagtatatttaccatttaaatcctcccaccactctcgcgtagctttataaaaaagctcttaataaaccatgattacata

SEQ ID NO: 211985 - DNA, 983 bp, Zea Mays
cccgtcgtcctctccatttccttctgtctgcttgccctcaaaccctagcccgtaccggcgtccaccttcgcgcaccctcgcctcaccaaacacccacggcgcattggcgcttccacctcttatcgtacgaaggcgagcggctttcacggtgtctctctgtcgcatgcaatggcaccgctgtttgaggggcgcccaacagctgcctgcccacggcatgctcaggggcgctggggtcccttgccgctgtccctgaagtctagcctgggttgttgatcttgccgcagatgcggtactccattacttctccgcccgcgccatcatttcggccacacctcagtctgttggtcggtcgcagatcccttgccccgtcgagcttaatatgcaatccgttgcttgtgaagattgtcgtgttttggacaatgccaacctttgtttccgctgtgcctgccaaggttgtggcttccttgggtgatgcttatttgagaacatagctgttgtgctctgagcatgtcctgtgtgcctgtcatggcggcttcttttggcgacatcataccaacatattcaatgtcaggctttaaagattggagaaacgcccatgggcctggcaaactgtggcatgtggctttgaactttgccaattggagacctgatgtggatcattttgggacgcgagttaagccccctgtttggagtgccagaaacaaaacagatggagaagggaaaaaggtgtcaggggataagagccagcgcctgatcaccgttttattcgtttttgagtaaactgtagcgagcaacaggtagcctataattgagacaatgctgaatggattgtagaaaaggatctgctttaatttccgttaatttagcgccttcagtgatgttcctagttgctggagtacatgttaagtatatttaccatttaaatcctcccaccactctcgcgtagctttataaaaaagctcttaataaaccatgattacata

SEQ ID NO: 211986 - DNA, 1287 bp, Zea Mays
cccgtcgtcctctccatttccttctgtctgcttgccctcaaaccctagcccgtaccggcgtccaccttcgcgcaccctcgcctcaccaaacacccacggcgcattggcgcttccacctcttatcgtacgaaggcgagcggctttcacggtgtctctctgtcgcatgcaatggcaccgctgtttgaggggcgcccaacagctgcctgcccacggcatgctcaggggcgctggggtcccttgccgctgtccctgaagtctagcctgggttgttgatcttgccgcagatgcggtactccattacttctccgcccgcgccatcatttcggccacacctcagtctgttggtcggtcgcagatcccttgccccgtcgagcttaatatgcaatccgttgcttgtgaaggttgtggcttccttgggtgatgcttatttgagaacatagctgttgtgctctgagcatgtcctgtgtgcctgtcatggcggcttcttttggcgacatcataccaacatattcaatgtcaggctttaaaggagtgagctggtttctatattttaactgatgcaccttgatgctttattgagcggtgtctatgaaatgatttggatggaaggctatcctatgctgctgatcagtacttaatggatgggagaagggtcagacctcagataagtacctaacttgctatttcctatttttttatcacttttattgatgcccaattgcatctaaagtgttgtccacttctattgcagcagtgcttgaggattcagtgatcagcagatctgcaaggacaaaaggaccaaaggagtgagctggtttttatattttaactgatgcacctggatgctttattgagcggtgtctatgaaatgagttggatggaagattggagaaacgcccatgggcctggcaaactgtggcatgtggctttgaactttgccaattggagacctgatgtggatcattttgggacgcgagttaagccccctgtttggagtgccagaaacaaaacagatggagaagggaaaaaggtgtcaggggataagagccagcgcctgatcaccgttttattcgtttttgagtaaactgtagcgagcaacaggtagcctataattgagacaatgctgaatggattgtagaaaaggatctgctttaatttccgttaatttagcgccttcagtgatgttcctagttgctggagtacatgttaagtatatttaccatttaaatcctcccaccactctcgcgtagctttataaaaaagctcttaataaaccatgattacata

SEQ ID NO: 211987 - DNA, 1063 bp, Zea Mays
cccgtcgtcctctccatttccttctgtctgcttgccctcaaaccctagcccgtaccggcgtccaccttcgcgcaccctcgcctcaccaaacacccacggcgcattggcgcttccacctcttatcgtacgaaggcgagcggctttcacggtgtctctctgtcgcatgcaatggcaccgctgtttgaggggcgcccaacagctgcctgcccacggcatgctcaggggcgctggggtcccttgccgctgtccctgaagtctagcctgggttgttgatcttgccgcagatgcggtactccattacttctccgcccgcgccatcatttcggccacacctcagtctgttggtcggtcgcagatcccttgccccgtcgagcttaatatgcaatccgttgcttgtgaagattgtcgtgttttggacaatgccaacctttgtttccgctgtgcctgccaaggttgtggcttccttgggtgatgcttatttgagaacatagctgttgtgctctgagcatgtcctgtgtgcctgtcatggcggcttcttttggcgacatcataccaacatattcaatgtcaggctttaaaggagtgagctggtttttatattttaactgatgcacctggatgctttattgagcggtgtctatgaaatgatttggatggaagattggagaaacgcccatgggcctggcaaactgtggcatgtggctttgaactttgccaattggagacctgatgtggatcattttgggacgcgagttaagccccctgtttggagtgccagaaacaaaacagatggagaagggaaaaaggtgtcaggggataagagccagcgcctgatcaccgttttattcgtttttgagtaaactgtagcgagcaacaggtagcctataattgagacaatgctgaatggattgtagaaaaggatctgctttaatttccgttaatttagcgccttcagtgatgttcctagttgctggagtacatgttaagtatatttaccatttaaatcctcccaccactctcgcgtagctttataaaaaagctcttaataaaccatgattacata

SEQ ID NO: 211988 - DNA, 1548 bp, Zea Mays
cccgtcgtcctctccatttccttctgtctgcttgccctcaaaccctagcccgtaccggcgtccaccttcgcgcaccctcgcctcaccaaacacccacggcgcattggcgcttccacctcttatcgtacgaaggcgagcggctttcacggtgtctctctgtcgcatgcaatggcaccgctgtttgaggggcgcccaacagctgcctgcccacggcatgctcaggggcgctggggtcccttgccgctgtccctgaagtctagcctgggttgttgatcttgccgcagatgcggtactccattacttctccgcccgcgccatcatttcggccacacctcagtctgttggtcggtcgcagatcccttgccccgtcgagcttaatatgcaatccgttgcttgtgaaggttgtggcttccttgggtgatgcttatttgagaacatagctgttgtgctctgagcatgtcctgtgtgcctgtcatggcggcttcttttggcgacatcataccaacatattcaatgtcaggctttaaaggagtgagctggtttctatattttaactgatgcaccttgatgctttattgagcggtgtctatgaaatgatttggatggaagtaaataactaagtgacaatggaaagcgatagatgacatccatgggcaaataactgaagacaacaccaacgtagaacttatcatagttttggaacttctgcgggtactcctttggaacatcatgacttgagaaacggttgcatctcagcaagtgtcccatttaggttaaagtggattgaccatttaggttaaagtggattgactcatacatttccaatatgtgttgctgcctgctgtcccttcatgtttgtgatttcaaaaggctatcctatgctgctgatcagtacttaatggatgggagaagggtcagacctcagataagtacctaacttgctatttcctatttttttatcacttttattgatgcccaattgcatctaaagtgttgtccacttctattgcagcagtgcttgaggattcagtgatcagcagatctgcaaggacaaaaggaccaaaggagtgagctggtttttatattttaactgatgcacctggatgctttattgagcggtgtctatgaaatgagttggatggaagattggagaaacgcccatgggcctggcaaactgtggcatgtggctttgaactttgccaattggagacctgatgtggatcattttgggacgcgagttaagccccctgtttggagtgccagaaacaaaacagatggagaagggaaaaaggtgtcaggggataagagccagcgcctgatcaccgttttattcgtttttgagtaaactgtagcgagcaacaggtagcctataattgagacaatgctgaatggattgtagaaaaggatctgctttaatttccgttaatttagcgccttcagtgatgttcctagttgctggagtacatgttaagtatatttaccatttaaatcctcccaccactctcgcgtagctttataaaaaagctcttaataaaccatgattacata

SEQ ID NO: 211989 - DNA, 1338 bp, Zea Mays
cccgtcgtcctctccatttccttctgtctgcttgccctcaaaccctagcccgtaccggcgtccaccttcgcgcaccctcgcctcaccaaacacccacggcgcattggcgcttccacctcttatcgtacgaaggcgagcggctttcacggtgtctctctgtcgcatgcaatggcaccgctgtttgaggggcgcccaacagctgcctgcccacggcatgctcaggggcgctggggtcccttgccgctgtccctgaagtctagcctgggttgttgatcttgccgcagatgcggtactccattacttctccgcccgcgccatcatttcggccacacctcagtctgttggtcggtcgcagatcccttgccccgtcgagcttaatatgcaatccgttgcttgtgaagattgtcgtgttttggacaatgccaacctttgtttccgctgtgcctgccaaggttgtggcttccttgggtgatgcttatttgagaacatagctgttgtgctctgagcatgtcctgtgtgcctgtcatggcggcttcttttggcgacatcataccaacatattcaatgtcaggctttaaaggagtgagctggtttctatattttaactgatgcaccttgatgctttattgagcggtgtctatgaaatgatttggatggaaggctatcctatgctgctgatcagtacttaatggatgggagaagggtcagacctcagataagtacctaacttgctatttcctatttttttatcacttttattgatgcccaattgcatctaaagtgttgtccacttctattgcagcagtgcttgaggattcagtgatcagcagatctgcaaggacaaaaggaccaaaggagtgagctggtttttatattttaactgatgcacctggatgctttattgagcggtgtctatgaaatgagttggatggaagattggagaaacgcccatgggcctggcaaactgtggcatgtggctttgaactttgccaattggagacctgatgtggatcattttgggacgcgagttaagccccctgtttggagtgccagaaacaaaacagatggagaagggaaaaaggtgtcaggggataagagccagcgcctgatcaccgttttattcgtttttgagtaaactgtagcgagcaacaggtagcctataattgagacaatgctgaatggattgtagaaaaggatctgctttaatttccgttaatttagcgccttcagtgatgttcctagttgctggagtacatgttaagtatatttaccatttaaatcctcccaccactctcgcgtagctttataaaaaagctcttaataaaccatgattacata

SEQ ID NO: 211990 - DNA, 1814 bp, Zea Mays
atcacatccacaggctttttcaccattgatttccaggaaatccttctacttctttcaaggagtgagctggtttctatattttaactgatgcaccttgatgctttattgagcggtgtctatgaaatgatttggatggaaggctatcctatgctgctgatcagtacttaatggatgggagaagggtcagacctcagataagtacctaacttgctatttcctatttttttatcacttttattgatgcccaattgcatctaaagtgttgtccacttctattgcagcagtgcttgaggattcagtgatcagcagatctgcaaggacaaaaggaccaaaggagtgagctggtttttatattttaactgatgcacctggatgctttattgagcggtgtctatgaaatgagttggatggaagggagacttcaacttgtcaactctgtcctctcgtctctgccaacatacgccatgtgcaccttacaagttccagcagcggtcttggagtacattgacacagccagacgacactgtttgtggcgtaattctgatagcaatgcaaaatttaagcctctggtggcttggaataaatgcacacgaccgaagaaaaaaggtggtctgggggtcatcaacctaagaagccagaactcgtatctccgaatgaaatttcttgacaagctctacaacaggaaacaaatcccttgggttaacctggtttggaatacatactactctgacggcaagacccctcatgcatccaagttcatgggctcgttttggtggagagacgcccttaaactttgtgatctcttcagaggaatctccaactgtaaggttggagatggtaaaactgttctattttggcatgatttatggaatgacaacatccgcagaaacaaatttccaaggcttttcaccttcgcaaaaaatcaaagcatttcggttgcttcctttttgactcaggagaacttgacagacaatttccacttaccccttactgagcaagcaaacactgagctgcaacaactcccggatgaagtgcaacaaattcgagaatcagtgattgaacctgaagagaaagactcttggagttatatttgggggaatagcacctactcgtcaactaaactttaccactacactttcaaaaatgtgaatcctccaaaaccatttctctggatcttggagtccagatgttcaaacaagcttaaagtcttcgcctggctgctgttgatggacaggctgaacaccagaaacatcctaaagagaaagaactttaaggttcaaggcgacaactacagctgtgctctttgtcaacttcaaagagaagaaactgccttccatttgttcttcaattgccctttcagccaagactgttggagacatctgaatattcagtggaaccaccaaattgacttctttgcgacctttcaacaagccagggacttgcacggttcaccattctttatggaggtctttatcatagcagcttggcaaatctggaagcaaagaaacaattttatctttgacaggggacgaccatctttcattggctagaaaaaagaattccgcgccgaagctcttctgcaagctaaccgcttttctgaagagaaatcaactcttttctcctcgcttgtgaattcctatagatagcagatagttttttccctgtgctttagttagtttccttctggtttatgtcttgggagcgactgctaatgctctttgtccgtcttcttctttatattaatatatatctaccacagcacagcaggggcttcccttgctgtacattttcaaaaaaaaaagtactggaacaga

SEQ ID NO: 211991 - DNA, 1929 bp, Zea Mays
cccgtcgtcctctccatttccttctgtctgcttgccctcaaaccctagcccgtaccggcgtccaccttcgcgcaccctcgcctcaccaaacacccacggcgcattggcgcttccacctcttatcgtacgaaggcgagcggctttcacggtgtctctctgtcgcatgcaatggcaccgctgtttgaggggcgcccaacagctgcctgcccacggcatgctcaggggcgctggggtcccttgccgctgtccctgaagtctagcctgggttgttgatcttgccgcagatgcggtactccattacttctccgcccgcgccatcatttcggccacacctcagtctgttggtcggtcgcagatcccttgccccgtcgagcttaatatgcaatccgttgcttgtgaaggttgtggcttccttgggtgatgcttatttgagaacatagctgttgtgctctgagcatgtcctgtgtgcctgtcatggcggcttcttttggcgacatcataccaacatattcaatgtcaggctttaaagggagacttcaacttgtcaactctgtcctctcgtctctgccaacatacgccatgtgcaccttacaagttccagcagcggtcttggagtacattgacacagccagacgacactgtttgtggcgtaattctgatagcaatgcaaaatttaagcctctggtggcttggaataaatgcacacgaccgaagaaaaaaggtggtctgggggtcatcaacctaagaagccagaactcgtatctccgaatgaaatttcttgacaagctctacaacaggaaacaaatcccttgggttaacctggtttggaatacatactactctgacggcaagacccctcatgcatccaagttcatgggctcgttttggtggagagacgcccttaaactttgtgatctcttcagaggaatctccaactgtaaggttggagatggtaaaactgttctattttggcatgatttatggaatgacaacatccgcagaaacaaatttccaaggcttttcaccttcgcaaaaaatcaaagcatttcggttgcttcctttttgactcaggagaacttgacagacaatttccacttaccccttactgagcaagcaaacactgagctgcaacaactcccggatgaagtgcaacaaattcgagaatcagtgattgaacctgaagagaaagactcttggagttatatttgggggaatagcacctactcgtcaactaaactttaccactacactttcaaaaatgtgaatcctccaaaaccatttctctggatcttggagtccagatgttcaaacaagcttaaagtcttcgcctggctgctgttgatggacaggctgaacaccagaaacatcctaaagagaaagaactttaaggttcaaggcgacaactacagctgtgctctttgtcaacttcaaagagaagaaactgccttccatttgttcttcaattgccctttcagccaagactgttggagacatctgaatattcagtggaaccaccaaattgacttctttgcgacctttcaacaagccagggacttgcacggttcaccattctttatggaggtctttatcatagcagcttggcaaatctggaagcaaagaaacaattttatctttgacaggggacgaccatctttcattggctagaaaaaagaattccgcgccgaagctcttctgcaagctaaccgcttttctgaagagaaatcaactcttttctcctcgcttgtgaattcctatagatagcagatagttttttccctgtgctttagttagtttccttctggtttatgtcttgggagcgactgctaatgctctttgtccgtcttcttctttatattaatatatatctaccacagcacagcaggggcttcccttgctgtacattttcaaaaaaaaaagtactggaacaga

SEQ ID NO: 211992 - DNA, 3119 bp, Zea Mays
cccgtcgtcctctccatttccttctgtctgcttgccctcaaaccctagcccgtaccggcgtccaccttcgcgcaccctcgcctcaccaaacacccacggcgcattggcgcttccacctcttatcgtacgaaggcgagcggctttcacggtgtctctctgtcgcatgcaatggcaccgctgtttgaggggcgcccaacagctgcctgcccacggcatgctcaggggcgctggggtcccttgccgctgtccctgaagtctagcctgggttgttgatcttgccgcagatgcggtactccattacttctccgcccgcgccatcatttcggccacacctcagtctgttgtgttcaggactgtcagggttgtgctacctggatgtcggttgcctcattgataggaatcatcgtgcagattgtcgtgttttggacaatgccaacctttgtttccgctgtgcctgccaaggttgtggcttccttgggtgatgcttatttgagaacatagctgttgtgctctgagcatgtcctgtgtgcctgtcatggcggcttcttttggcgacatcataccaacatattcaatgtcaggctttaaaggagtgagctggtttctatattttaactgatgcaccttgatgctttattgagcggtgtctatgaaatgatttggatggaaggatggtaggtgtactgaaacagatgatgacaaactttctgaattgcatgaaagtgaaccaggatatgctaattggattttccaaaagattggatcttttgagtggaatatcacaaattctcttactacaaaaaataggtcccactgggactcgaacccaggttgccagattcaaagtctggagtgataaccactacaccatggaaccatttatgtgtgttctccctagataatatatttatggtaacatgtttccatagcattattttgtttttttgtgtgcttttgctagccattccaaaaaatcatgttaggagtgagctagtgtcacacctggttttggaaaaagtaacctagtgcataccatatacgtgccaaggtcaaatttcacgtacacagtcacataagtgaattacatagcataacgctcgaaatacacataaacgtaactgttatattacagactcagtcttcaccataacagttaaactcatactatatttttttgacatagtaaataactaagtgacaatggaaagcgatagatgacatccatgggcaaataactgaagacaacaccaacgtagaacttatcatagttttggaacttctgcgggtactcctttggaacatcatgacttgagaaacggttgcatctcagcaagtgtcccatttaggttaaagtggattgaccatttaggttaaagtggattgactcatacatttccaatatgtgttgctgcctgctgtcccttcatgtttgtgatttcaaaaggctatcctatgctgctgatcagtacttaatggatgggagaagggtcagacctcagataagtacctaacttgctatttcctatttttttatcacttttattgatgcccaattgcatctaaagtgttgtccacttctattgcagcagtgcttgaggattcagtgatcagcagatctgcaaggacaaaaggaccaaaggagtgagctggtttttatattttaactgatgcacctggatgctttattgagcggtgtctatgaaatgagttggatggaagggagacttcaacttgtcaactctgtcctctcgtctctgccaacatacgccatgtgcaccttacaagttccagcagcggtcttggagtacattgacacagccagacgacactgtttgtggcgtaattctgatagcaatgcaaaatttaagcctctggtggcttggaataaatgcacacgaccgaagaaaaaaggtggtctgggggtcatcaacctaagaagccagaactcgtatctccgaatgaaatttcttgacaagctctacaacaggaaacaaatcccttgggttaacctggtttggaatacatactactctgacggcaagacccctcatgcatccaagttcatgggctcgttttggtggagagacgcccttaaactttgtgatctcttcagaggaatctccaactgtaaggttggagatggtaaaactgttctattttggcatgatttatggaatgacaacatccgcagaaacaaatttccaaggcttttcaccttcgcaaaaaatcaaagcatttcggttgcttcctttttgactcaggagaacttgacagacaatttccacttaccccttactgagcaagcaaacactgagctgcaacaactcccggatgaagtgcaacaaattcgagaatcagtgattgaacctgaagagaaagactcttggagttatatttgggggaatagcacctactcgtcaactaaactttaccactacactttcaaaaatgtgaatcctccaaaaccatttctctggatcttggagtccagatgttcaaacaagcttaaagtcttcgcctggctgctgttgatggacaggctgaacaccagaaacatcctaaagagaaagaactttaaggttcaaggcgacaactacagctgtgctctttgtcaacttcaaagagaagaaactgccttccatttgttcttcaattgccctttcagccaagactgttggagacatctgaatattcagtggaaccaccaaattgacttctttgcgacctttcaacaagccagggacttgcacggttcaccattctttatggaggtctttatcatagcagcttggcaaatctggaagcaaagaaacaattttatctttgacaggggacgaccatctttcattggctagaaaaaagaattccgcgccgaagctcttctgcaagctaaccgcttttctgaagagaaatcaactcttttctcctcgcttgtgaattcctatagatagcagatagttttttccctgtgctttagttagtttccttctggtttatgtcttgggagcgactgctaatgctctttgtccgtcttcttctttatattaatatatatctaccacagcacagcaggggcttcccttgctgtacattttcaaaaaaaaaagtactggaacaga

SEQ ID NO: 211993 - DNA, 3662 bp, Zea Mays
cccgtcgtcctctccatttccttctgtctgcttgccctcaaaccctagcccgtaccggcgtccaccttcgcgcaccctcgcctcaccaaacacccacggcgcattggcgcttccacctcttatcgtacgaaggcgagcggctttcacggtgtctctctgtcgcatgcaatggcaccgctgtttgaggggcgcccaacagctgcctgcccacggcatgctcaggggcgctggggtcccttgccgctgtccctgaagtctagcctgggttgttgatcttgccgcagatgcggtactccattacttctccgcccgcgccatcatttcggccacacctcagtctgttgtgttcaggactgtcagggttgtgctacctggatgtcggttgcctcattgataggaatcatcgtgcagattgtcgtgttttggacaatgccaacctttgtttccgctgtgcctgccaaggttgtggcttccttgggtgatgcttatttgagaacatagctgttgtgctctgagcatgtcctgtgtgcctgtcatggcggcttcttttggcgacatcataccaacatattcaatgtcaggctttaaaggagtgagctggtttctatattttaactgatgcaccttgatgctttattgagcggtgtctatgaaatgatttggatggaaggtaaatttcccaccaatttaattttagatattttaaataattccttgccatatctgcattcagcctgttattgtgtttatgttcacccttttttagtagggaaatcaaaacatagttaatccagtactactgggttttattatgcctgattttgtttctgcttttgagtctatcatgattatagggctgttaatgacacatgacattgtcaattggaaataccatgtcaacggactgattaagaaatacaaaatctttgcttagatgggacatatttggaaaataccccttatattaaaaaacacatggtgtgtcaagcattttttttacaaactgtagcaaactgaaaactagttgcattggtcatgcggaaatgtctcatctatctcatgtatgttgcttatattttgtctcttgaagatcacaagcgaatgcacttttctcttgtctctcttgtttgttgtttctctccagatgagctgtcctattcttgttgcattttgtccgcaactcctatcacccctatcttaatccttcctgtaggatggtaggtgtactgaaacagatgatgacaaactttctgaattgcatgaaagtgaaccaggatatgctaattggattttccaaaagattggatcttttgagtggaatatcacaaattctcttactacaaaaaataggtcccactgggactcgaacccaggttgccagattcaaagtctggagtgataaccactacaccatggaaccatttatgtgtgttctccctagataatatatttatggtaacatgtttccatagcattattttgtttttttgtgtgcttttgctagccattccaaaaaatcatgttaggagtgagctagtgtcacacctggttttggaaaaagtaacctagtgcataccatatacgtgccaaggtcaaatttcacgtacacagtcacataagtgaattacatagcataacgctcgaaatacacataaacgtaactgttatattacagactcagtcttcaccataacagttaaactcatactatatttttttgacatagtaaataactaagtgacaatggaaagcgatagatgacatccatgggcaaataactgaagacaacaccaacgtagaacttatcatagttttggaacttctgcgggtactcctttggaacatcatgacttgagaaacggttgcatctcagcaagtgtcccatttaggttaaagtggattgaccatttaggttaaagtggattgactcatacatttccaatatgtgttgctgcctgctgtcccttcatgtttgtgatttcaaaaggctatcctatgctgctgatcagtacttaatggatgggagaagggtcagacctcagataagtacctaacttgctatttcctatttttttatcacttttattgatgcccaattgcatctaaagtgttgtccacttctattgcagcagtgcttgaggattcagtgatcagcagatctgcaaggacaaaaggaccaaaggagtgagctggtttttatattttaactgatgcacctggatgctttattgagcggtgtctatgaaatgagttggatggaagggagacttcaacttgtcaactctgtcctctcgtctctgccaacatacgccatgtgcaccttacaagttccagcagcggtcttggagtacattgacacagccagacgacactgtttgtggcgtaattctgatagcaatgcaaaatttaagcctctggtggcttggaataaatgcacacgaccgaagaaaaaaggtggtctgggggtcatcaacctaagaagccagaactcgtatctccgaatgaaatttcttgacaagctctacaacaggaaacaaatcccttgggttaacctggtttggaatacatactactctgacggcaagacccctcatgcatccaagttcatgggctcgttttggtggagagacgcccttaaactttgtgatctcttcagaggaatctccaactgtaaggttggagatggtaaaactgttctattttggcatgatttatggaatgacaacatccgcagaaacaaatttccaaggcttttcaccttcgcaaaaaatcaaagcatttcggttgcttcctttttgactcaggagaacttgacagacaatttccacttaccccttactgagcaagcaaacactgagctgcaacaactcccggatgaagtgcaacaaattcgagaatcagtgattgaacctgaagagaaagactcttggagttatatttgggggaatagcacctactcgtcaactaaactttaccactacactttcaaaaatgtgaatcctccaaaaccatttctctggatcttggagtccagatgttcaaacaagcttaaagtcttcgcctggctgctgttgatggacaggctgaacaccagaaacatcctaaagagaaagaactttaaggttcaaggcgacaactacagctgtgctctttgtcaacttcaaagagaagaaactgccttccatttgttcttcaattgccctttcagccaagactgttggagacatctgaatattcagtggaaccaccaaattgacttctttgcgacctttcaacaagccagggacttgcacggttcaccattctttatggaggtctttatcatagcagcttggcaaatctggaagcaaagaaacaattttatctttgacaggggacgaccatctttcattggctagaaaaaagaattccgcgccgaagctcttctgcaagctaaccgcttttctgaagagaaatcaactcttttctcctcgcttgtgaattcctatagatagcagatagttttttccctgtgctttagttagtttccttctggtttatgtcttgggagcgactgctaatgctctttgtccgtcttcttctttatattaatatatatctaccacagcacagcaggggcttcccttgctgtacattttcaaaaaaaaaagtactggaacaga

SEQ ID NO: 211994 - DNA, 1880 bp, Zea Mays
acaagttctccatccgtcctataagtaggaggagcttcatgacaatttgcccaccgcttcgaggacaggacggagggagctcacgcgcgagcaaagcaaagcacaagcagcaatggggatctgctgcggcaaggccaaggcggcggcaggggagcccgacgacgacgagggcctgggcttcccatggatgcacgacgacctgttccacagccacctgtgggccagcgccggcgtctccgtgcacaccaagcagggatggaagggcgccaaccaggacgccatgaccgtctgccaggacttcgccggccagaaaggccacatcctctgcggagtgttcgatggccacggccctcgtggccgggaagtcgctcgccacgtccgcgacaccctcccggtggaactagccgccgctctgaagccgagaaccggggacgaagatccctccgcctcgagcgacgcttcgaagcctaaacctgacgaagatggctcaggcgagaatggagaagatggctcaggcaagaatggagatgcttcgagcaacgccgatttggattccttcgacaagtcaggaggtagcggctcgtccagcgacgttacgagcgacgagagccagcagcagcagctgctgctgtccacttggaagaacgtgttcgtgagggcttttgagcaggtggacgaggagctgaggcggctttcaggaatcgactgcatctgtagcggcacaactgcagtcgctgctgttaggcagggcgatcacttgatcgttgccaatctgggcgattcacgcgccgtcctctgcacccgggacagcaaggaccgtctgatccctgtccagctcaccactgacctgaagccggatctgccaagtgagctcgcgaggattctgagctgcaaggggagagtgttcgccatggacgacgagccggacgtgccccggatgtggctgccggaccaggacgcgccgggcctcgccatggcgagggcgttcggtgacttctgcctcaagagccatggccttatctgcgaacctcaagtctactgcaggaaactgtccgagaaagacgagttcttggtgcttgctactgacgggatttgggacgtgctgtcgaacaaggaggtggtgaagctcgtgtcatcggcgcctgacccgtccaaggcggcgaggcagctgatcgaccgggcggtccgagcgtggcggcgcaagtacccgacgtccatggtggacgactgcgccgtcgtgtgcctgtacctgaaccggcgggcctcacctgctcccgtcgagagcagcagcggcctgctcccagttcccgacgacgtgaggccggccgcgcctttcacaggcagcagcttccgcagggctctgacgagcaacggccaggcggtgtcggaggaggggacgacggcggtgtggagagcgctggagggggtggcgcgggccaactccgtgatcaggctgccgcgcgtgggccgcgtgctgagctggcggaggcggtcgacctcgctggacgaagacgacggcggcgagcgggattgatggactcgggcggggagggcatcggaggtcgtcgttttcatggccggtacacgtagacgtagctagattcgttcgtgcatgggccgatggacgcgaggtgtaggatttgattggcctgtcgcattctggtgtggctgttgcaatggatgatgcgacatggacaggagtagcatttctttatccctggctgatgaatcagtgagtgcttttcatcctgctcgtctatgtactgctactgcacttgctgtaactgaaatttgtgggtgagattagcatctgacaacataagaagtgaagaacgtgactgcagtacatgactgatccaatagtgctaatttcatctagg

SEQ ID NO: 211995 - DNA, 2112 bp, Zea Mays
gtgtgaaattcgtacacacattccagcgaaattcctgcgttgaaagaagtccggccccatccgctgcttaactatcggatcttgcgaaggaacaatcaccaccgttattaagaagatgatgcgctgcgctgcaacgggcggcgggtgcgtcgcttcgtggagcggcgatcggagattgccggcggtcaacccctgcagcgtgcggatgccgacgggcaacgatgggtggtgcgccggcctgaggtcgcgggcggcggatctcgccggcctcgagatggccaacctgcgcggcggcgtcggggggctcttccgcgcgagcccgcgctacgggcgcttgcaagccacggcggcagttgaccctgaagatattccattggagaaggttcaagttaaatcctcaggacatgttctgccatatgttggcgttgcttgtttgggggctattctgtttggttaccatcttggtgtggtcaatggcgcacttgaatatctcgcgaaggatcttgggattgctgaaaatgctgtcttgcagggtatgggtgggtggttagcacatccttggctggtgcaacactaggttcttttactgggggttctttggcagataaatttgggcggacaagaacattcatcctggatgcagtcccacttgctctaggtgcattcttgagtgcaacagctcaagatatccgcacaatgattattggccgattgcttgctggaattggtatcggggtctcatctgctcttgtacccctttacatatctgagatctcaccaactgaaattcgtggaacacttggtaccgttaatcaactttttatttgcattggaattcttgcagctttgttagctggattgcctctggcaggaaatcctgcctggtggaggacaatgtttggaattgctgtagttccatccattctgctggctgtaggaatggccttttcgcctgaaagccctcgttggctattccagcaaggaaaggttactcaagcagaattagctgtaaaaagactgtatggaaaagaaatggttaccgaaattatgtttgatctgagagctagtggccaaagttcttcggagtccgaagccggctggtttgatcttttcagcaagcgttactggaaagttgtgagtgtgggggcagcactgtttttgttccagcagcttgctggtataaacgctgttgtatattactctacatcggtgttccgtagtgcaggcattgcatctgatgttgctgctagtgctcttgttggagcagccaatgtttttggtactatggttgcatcttctctaatggacaaacaaggaaggaaaagccttctgataacaagcttttctggaatgggtgcttcaatgctactcctagcattgtccttcacctggaaagctctggcaccttattctggtactcttgctgttgttggcactgttctgtacgtgctgtcatttgctctaggagcgggccctgttccagcgctacttcttcctgaaatatttgcctcgagaataagggccaaggctgtcgcattatctctaggcatgcactgggtatctaactttttcattggcctgtacttcctgagtgtcgtgagcaagtttgggatcagcaacgtgtatctgggatttgcatcagtatgtgcccttgcagttctgtacatagctgggaatgtggtcgagaccaaggggagatcacttgaagagattgaaagggagctaagtgtagcagaatgatgtacttttgctagtcatgctgtggcgccgttttggttatcgagaatgcaaccaagcgctcaaccgagcatccttggacctggagactctttctagtttcatgtagttttagaaataagcgaacggcaagagtaccaatcttaggtgacttggtgtgggttgtgtctgaaataagtgaattggattgtagaatttcagaaataagtgaattggattgtagaatttcagaaaaagtaacaaaaaaaaatacaaaaggatgatccttttgcatgtactggttcttctatttcttatcatattcagcctgcagatctcgtcgattcctttccaaaaaggttattagttgttacacttacacatcatcatcatgac

SEQ ID NO: 211996 - DNA, 1895 bp, Zea Mays
gtgtgaaattcgtacacacattccagcgaaattcctgcgttgaaagaagtccggccccatccgctgcttaactatcggatcttgcgaaggaacaatcaccaccgttattaagaagatgatgcgctgcgctgcaacgggcggcgggtgcgtcgcttcgtggagcggcgatcggagattgccggcggtcaacccctgcagcgtgcggatgccgacgggcaacactaggttcttttactgggggttctttggcagataaatttgggcggacaagaacattcatcctggatgcagtcccacttgctctaggtgcattcttgagtgcaacagctcaagatatccgcacaatgattattggccgattgcttgctggaattggtatcggggtctcatctgctcttgtacccctttacatatctgagatctcaccaactgaaattcgtggaacacttggtaccgttaatcaactttttatttgcattggaattcttgcagctttgttagctggattgcctctggcaggaaatcctgcctggtggaggacaatgtttggaattgctgtagttccatccattctgctggctgtaggaatggccttttcgcctgaaagccctcgttggctattccagcaaggaaaggttactcaagcagaattagctgtaaaaagactgtatggaaaagaaatggttaccgaaattatgtttgatctgagagctagtggccaaagttcttcggagtccgaagccggctggtttgatcttttcagcaagcgttactggaaagttgtgagtgtgggggcagcactgtttttgttccagcagcttgctggtataaacgctgttgtatattactctacatcggtgttccgtagtgcaggcattgcatctgatgttgctgctagtgctcttgttggagcagccaatgtttttggtactatggttgcatcttctctaatggacaaacaaggaaggaaaagccttctgataacaagcttttctggaatgggtgcttcaatgctactcctagcattgtccttcacctggaaagctctggcaccttattctggtacgtgctgtcatttgctctaggagcgggccctgttccagcgctacttcttcctgaaatatttgcctcgagaataagggccaaggctgtcgcattatctctaggcatgcactgggtatctaactttttcattggcctgtacttcctgagtgtcgtgagcaagtttgggatcagcaacgtgtatctgggatttgcatcagtatgtgcccttgcagttctgtacatagctgggaatgtggtcgagaccaaggggagatcacttgaagagattgaaagggagctaagtgtagcagaatgatgtacttttgctagtcatgctgtggcgccgttttggttatcgagaatgcaaccaagcgctcaaccgagcatccttggacctggagactctttctagtttcatgtagttttagaaataagcgaacggcaagagtaccaatcttaggtgacttggtgtgggttgtgtctgaaataagtgaattggattgtagaatttcagaaataagtgaattggattgtagaatttcagaaagtgtgttccccttattttttcgctgcagttccttccatgctagacctatattactgacagttttcttcatgcgcccttatttccttttggcctcaagatttgcccgcagctttatgaggaaaggattagtgcgtcattatttctgtatatcacagcacagtagaagtaacaaaaaaaaatacaaaaggatgatccttttgcatgtactggttcttctatttcttatcatattcagcctgcagatctcgtcgattcctttccaaaaaggttattagttgttacacttacacatcatcatcatgac

SEQ ID NO: 211997 - DNA, 1781 bp, Zea Mays
tgtgacccataacggaaggtgatgtggttgaccctgaagatattccattggagaaggttcaagttaaatcctcaggacatgttctgccatatgttggcgttgcttgtttgggggctattctgtttggttaccatcttggtgtggtcaatggcgcacttgaatatctcgcgaaggatcttgggattgctgaaaatgctgtcttgcaggggtgggtggttagcacatccttggctggtgcaacactaggttcttttactgggggttctttggcagataaatttgggcggacaagaacattcatcctggatgcagtcccacttgctctaggtgcattcttgagtgcaacagctcaagatatccgcacaatgattattggccgattgcttgctggaattggtatcggggtctcatctgctcttgtacccctttacatatctgagatctcaccaactgaaattcgtggaacacttggtaccgttaatcaactttttatttgcattggaattcttgcagctttgttagctggattgcctctggcaggaaatcctgcctggtggaggacaatgtttggaattgctgtagttccatccattctgctggctgtaggaatggccttttcgcctgaaagccctcgttggctattccagcaaggaaaggttactcaagcagaattagctgtaaaaagactgtatggaaaagaaatggttaccgaaattatgtttgatctgagagctagtggccaaagttcttcggagtccgaagccggctggtttgatcttttcagcaagcgttactggaaagttgtgagtgtgggggcagcactgtttttgttccagcagcttgctggtataaacgctgttgtatattactctacatcggtgttccgtagtgcaggcattgcatctgatgttgctgctagtgctcttgttggagcagccaatgtttttggtactatggttgcatcttctctaatggacaaacaaggaaggaaaagccttctgataacaagcttttctggaatgggtgcttcaatgctactcctagcattgtccttcacctggaaagctctggcaccttattctggtactcttgctgttgttggcactgttctgtacgtgctgtcatttgctctaggagcgggccctgttccagcgctacttcttcctgaaatatttgcctcgagaataagggccaaggctgtcgcattatctctaggcatgcactgggtatctaactttttcattggcctgtacttcctgagtgtcgtgagcaagtttgggatcagcaacgtgtatctgggatttgcatcagtatgtgcccttgcagttctgtacatagctgggaatgtggtcgagaccaaggggagatcacttgaagagattgaaagggagctaagtgtagcagaatgatgtacttttgctagtcatgctgtggcgccgttttggttatcgagaatgcaaccaagcgctcaaccgagcatccttggacctggagactctttctagtttcatgtagttttagaaataagcgaacggcaagagtaccaatcttaggtgacttggtgtgggttgtgtctgaaataagtgaattggattgtagaatttcagaaataagtgaattggattgtagaatttcagaaaaagtaacaaaaaaaaatacaaaaggatgatccttttgcatgtactggttcttctatttcttatcatattcagcctgcagatctcgtcgattcctttccaaaaaggttattagttgttacacttacacatcatcatcatgac

SEQ ID NO: 211998 - DNA, 968 bp, Zea Mays
gaaaaaaaaacaaaaaagccgaacaaaaaacacgacgcggcacagaacatagcaccgcaccaccgcaccgggcctcctccgagtctccgacctcctcctgtcttcggtgtcgtcgcccgcctccccatgaggccgccctcgagacatgcctcgtagcctcggcgtcagtagcagcagcagcaccaggcgctccctccgcgtcgcgccccccgcctcacccccgctgcggcggccgccgtcgccggcatggccatgccgttcgcgcgccgcgacatcgaggcggcgggcgccggcgccagcagcgacgactctcctgccgctaagaagggcaagcccgagctcgcaggggcgcgcccggctttgacgaggtccgaggcgttcgcgttcgcggccgtgctcgcgctcttcaccgccgggatcttctgcgtcttcctcaccgcgccacgcggcgagtttgggcagatcctccgcctcccgcgcagccttgccgacgtccgccttctcaaagacaatcttgctgtttacgcgagagattaccaaacgaattttatattgggttattgctcaatatacatcttcatgcaaacattcatgatccctgggacaatattcatgtctttacttgctggggctctttttggagtgattaaaggtggcattttggtagttttcactgccacagccggtggatcttcttgctattttgtctccaagctgattggcaggcccttggttagttggttgtggcctgaaaaactgagatatttccaatcagagattgctaagaggaaagaaaagctgctgaattatatgctttttctgagaataactccaactttgcccaatacattcataaatatggcgtcaccgattgttgacatacctttccatattttctttgctgcaacactagttggtcttattccagcatcttatattactgtaaagtttgatcagtgaagatgaaa

SEQ ID NO: 211999 - DNA, 530 bp, Zea Mays
agcagcagccatctgcataacgaaaaaagaaggtgaagccgaggctcgacgacgggggcgtcgggtttccgccgttccggttcgggggaggcggaggaggaggcggcggcggcggcagcagctcgtccggcgggttcatcctcttcgtggtcgtcctgctcctggattacctcaaggagttcgagaggaacctgcagaacgggccacggaggagcggcggtggctacgacgacgggctggcgccacagtagattcctctctctttctcggtgtgtggtttgaattttggaagagaacgtgtgctacgactctacacgaccatgtgttgcagagatgcttcggtgttcgttggtgtgatctctctctctcttttttttttttcctacaaaagacagtttttctcgagggctcatgtgaggactagaaattttagccagtcgaacgaatgccttgagatcacacaatgaaactcattggcgcttcgaaagtttgaataaatttcaaagaatctcctcagtccctgtttggat

SEQ ID NO: 212000 - DNA, 1709 bp, Zea Mays
agtatatttgttccactgattcctctctttgcctggcagacaaatagcacacaatcaaccgtcgtctccttcctcgccttcataggcttctccaaattccaaatcgttgctagagaaaccaccaaaccggccggcagcccggcacctctcactcagtctctcaccccttgccaccactctcccgtggcgccttctagaagcttccggaaccagacaaccactgtgcgccgagttttctgaaggcggctttggtctttcgagatctcgttgtcggtgccatggcgggtcagtactgagtgcgcgggcgggagcaggtgaaggtctgccagctcgagatcccgatgcagatccgggagggcccggcgcggcggcaggcgccgtcggccgcgggggcgctgcggtcgccgttgtccgccatgatgctcgccatgttcgctaccatggcctccttctacgtcgccggacggcagcaagggaagcggttggcatcgcttgagatggagctggctgcagcaaagcatgaaggttttgttggcaaatatactcccgagacaaatggaactcattctgggaaaaagccactggttgttattggaataatgactagctttgggaggaaaaactaccgtgatgctgtcaggaaatcatggcttccgacaggttcaatgttgaagaaactagaagaagaaaaaggcattgtagtacgttttgttgttggaagaagtgcaaatcgaggagatacttttgatagggagatcgatgacgaaaataggagcaccaaggatttcttgatattggatgatcatatagagtcagatgaagagcttcctaagaagacaaaaagtttctttgctaatgcagcaaatacattcgatgctgcattttatgctaaggtcaatgatgatatatacataaacgttgacactttaagtgcaatgctcgaaactcactgggacaagccccgtgtatatataggttgcatgaaatcgggcgaggttttctctgactcaacccacaagtggtatgaaccagactggtggaaatttggtgatgggaaatcgtacttccggcacgcttctagtgaaatgtttgtcatatcaagggccattgctcagttcatttctataaacaagtctgttctccggacatatgcccatgatgatgttagtgtaggatcgtggatgattggccttgctgtgaagcatgtaaatgaagcaaagctgtgctgttcatcgtggccctcaggtgcaatgtgttcagcgctataacgagcaacaatgcatgctgaggagttttgcaaacatcgtgcctggtggataatacatgcaatatgaggtcgaatacctgaggaaattttgttttcttctgccattttctgtaacgtcttttggaggaagcttttgcgagccagttcataccgaatcagatatcttgttttttttctttgcaaggccactacactagaatcgtggcttctaacaaaaagccttctgcagattttatcctgttccgtgtgccatttgtagatgccccacccttaccattctttttctgacagacactaccattgttggagtgacagaaatcaatagcaattcaggaaattattttggtccagaatatatatgtatgcgtaatgcgtgtcttcagacctgttgtcatggtggtgaagttggcacatacataaggatgtccttttgaagtcaaga

SEQ ID NO: 212001 - DNA, 983 bp, Zea Mays
atggacgatcaggataggccagcccaccagcagccagccagcaacaggggccagagcccagctgccaatgggcagcggcggcccaaggggactaggttcagcggcggcccaagccgatggcgtgggggtgcggcccaggcgacgcaggctcccagcagcggcgactctttggcacggatgctggatgctgccaatgcccaatgccatgctggttggcgactctttggcgcagcggcagccaggtcgaagcggcacccacccgcaatgagcaaagcaggcggcggccccggctcggccccgggcccgacggccgcggccgcggcggccgcggtgcagaagcagaagtcgctgctgcagaaggcggacgccgacgtctccagcctcgtcgacaatttctcctccctcatcaacatcgcccgagtcaacgatccgccagtgcgcaactcgcaggaggccttccagatggagatgcgcgccgcccgcatggtacattcagcagactctctgttgaaattagtgtcggaacttaagaggacagccatcttttctgggcttgcttcattgaatgagaatgtggataggaggatcgaagtgctgggtcagcaagctgagggaactgagagaatgctggagaggattgggcaggaggcagcagcaagcctcaaggagctagaggcacactactactcatctgttgtgcggtcaccatcctatgattgagggttatcccaggttatctgttaggcggtttgctcttcagggttatctcagggaatcttcggaaatatggattaggcacaccgtcctgccatctggcaattcattagggtgccaattgatgtagctgtttggttcacatattgtaacgttgtaacgtgatgggtatattgtaacgttgtaacgtgatgggtgacaaataacattaaaccatatttatttaagtttaaccgtaatcagatactacattagagaatgatatcagc

SEQ ID NO: 212002 - DNA, 2259 bp, Zea Mays
gtttccctttccctgctcactccaaactttagagtatgcgatagagtggttggctgcgggatttttttactgcaaacgttactcatagggaatcattgacagtccgccgctgcgtatagcgtgaccacgttatttgacgacgtaggataataatggtaatgttataaaagtggagatgtttagatctcgagtttaattagacagaaatataaaaccctttttaagggacgatggccgaaaccaaactggtgctttttaccgtttcctttgttgcaaacgctaaatttctcacgaattcttccgtcgtcggcggcgcagattgaatgccaaaaccctagctcgccctccccaattccccatttcggccacaccctccttgcctccacggctccacccctgcttcaggttacctgtgccagcgacgccggtagaagccatggacagctctctcgcgagcgcggcggcgatagccgatcagcgccagaagatcgagcagtaccgccacatcctcgcctccgtcctctcgtcttccccaccggacatctctcaggccaagcgcttcctcgaccacatggtttcggacgaagttccgctcgtggtgtcgcgtcaattgctccagacgttcgcgcaggacctagggaagctggagtcggacgcgcagaaggaggttgcccactacgcgctcacgcagatccagccgcgtgtggtctccttcgaggagcaggtggtagtgattagagagaagcttgcagagctatatgagtctgaacaacaatggtcaaaagcagcacaaatgcttagtgggattgacttggattcaggaatcaggatgcttgatgacaccaacaaattatccaagtgtgttcaaattgcacgactctatttagaggatgatgatgcagtgaatgctgaggcttttataaacaaggcttcatttttggtcaccaacagccatcaggaggttctaaacttacagtacaaggtctgttatgcaaggattttggatctgaaaagaagatttctggaagctgcacttcgatattatgacatttctcaaattgaacaacgcaagattggagacgaagagattgatgaaaatgcactagaacaagctcttagtgctgctgtgacatgcacaatattggctggtgctggtccacaacgctcccgtgttcttgctactctgtacaaggtggtgcaacaaataccaattaatctggatgtttatggcttttctggtaaatatgggttgacagaaattatagcttctggcttgagctgggtggtttcagatcttgtccagtgccaaccagtgtgtatatatacatttttaaggtcttgtaacctagataattagtgtcaacttcgaggctgcgagtccacaccttatctaccgtgcttgtctctttttctttatttacacatgcatttattttgcctcttattgcattatgcccctttcaggatgaaagatgctcgaagttgaaaatatacccaatactgcagaaggtttaccttgaaagaattttgaggaaaccagaaattgatgcatttgcagaggagctgaggccgcatcaaaaagctttattaccagataagtcgactgtgcttgaccgagcaatgatcgagcataatctccttagtgccagtaaactttacacaaatatcagctttgatgagcttgggacattactggggattgatccaaggaaggctgagaagatagcatctcggatgatttatgaggatagaatgcggggctcaattgatcaggttgaggctgtgatacattttgatgatgacacggaagagctgcagcaatgggatcagcagattgctggactgtgccaagccctgaacgacatccttgacagcatgtcaagcaagggaataactattccggtgtgaataaatatctcatgctgtcggtcgatggtgcatggcagaactgcttccatgccccggaatccagaatcaacattttgtatagtttgcagctgcaaatgtgtatcttgtgattttggggggaggatgcttgtttaagtaacgctcactggataccttgtagcactactgtttcaagagcgctcgaatgattcagtaagggctttcggtttcatcagaatccatatgtggattggctgagtttcaatccatagcaagtcaaaattctttataatttttccaaactttttcaatccctgaggcataggaattaccgaacatagaattaagggaacaaggcctaaaccggcggga

SEQ ID NO: 212003 - DNA, 2334 bp, Zea Mays
gggaatcattgacagtccgccgctgcgtatagcgtgaccacgttatttgacgacgtaggataataatggtaatgttataaaagtggagatgtttagatctcgagtttaattagacagaaatataaaaccctttttaagggacgatggccgaaaccaaactggtgctttttaccgtttcctttgttgcaaacgctaaatttctcacgaattcttccgtcgtcggcggcgcagattgaatgccaaaaccctagctcgccctccccaattccccatttcggccacaccctccttgcctccacggctccacccctgcttcaggttacctgtgccagcgacgccggtagaagccatggacagctctctcgcgagcgcggcggcgatagccgatcagcgccagaagatcgagcagtaccgccacatcctcgcctccgtcctctcgtcttccccaccggacatctctcaggccaagcgcttcctcgaccacatggtttcggacgaagttccgctcgtggtgtcgcgtcaattgctccagacgttcgcgcaggacctagggaagctggagtcggacgcgcagaaggaggttgcccactacgcgctcacgcagatccagccgcgtgtggtctccttcgaggagcaggtggtagtgattagagagaagcttgcagagctatatgagtctgaacaacaatggtcaaaagcagcacaaatgcttagtgggattgacttggattcaggaatcaggatgcttgatgacaccaacaaattatccaagtgtgttcaaattgcacgactctatttagaggatgatgatgcagtgaatgctgaggcttttataaacaaggcttcatttttggtcaccaacagccatcaggaggttctaaacttacagtacaaggtctgttatgcaaggattttggatctgaaaagaagatttctggaagctgcacttcgatattatgacatttctcaaattgaacaacgcaagattggagacgaagagattgatgaaaatgcactagaacaagctcttagtgctgctgtgacatgcacaatattggctggtgctggtccacaacgctcccgtgttcttgctactctgtacaaggtaagattgttgtagttttatctcaatgtccttggattacgtgctggtagtacccattctcagctgtgttgctactctgtacaaggtaagatttttgtagttttatctcaatgtccttggattacgtgctggtagtacccattctcagctgtgttttgcaattgtgagcatcggaatacaactatctagatgcattacgtgttaaatgccttggatttgttcatgtcatctatataaaaacatgtttcatgtttagcttatcatagtttatagttgagactgtaatactcatctctcacttgttttctgtcaaggtggtgcaacaaataccaattaatctggatgtttatggcttttctggtaaatatgggttgacagaaattatagcttctggcttgagctgggtggtttcagatcttgtccagtgccaaccagatgaaagatgctcgaagttgaaaatatacccaatactgcagaaggtttaccttgaaagaattttgaggaaaccagaaattgatgcatttgcagaggagctgaggccgcatcaaaaagctttattaccagataagtcgactgtgcttgaccgagcaatgatcgagcataatctccttagtgccagtaaactttacacaaatatcagctttgatgagcttgggacattactggggattgatccaaggaaggctgagaagatagcatctcggatgatttatgaggatagaatgcggggctcaattgatcaggttgaggctgtgatacattttgatgatgacacggaagagctgcagcaatgggatcagcagattgctggactgtgccaagccctgaacgacatccttgacagcatgtcaagcaagggaataactattccggtgtgaataaatatctcatgctgtcggtcgatggtgcatggcagaactgcttccatgccccggaatccagaatcaacattttgtatagtttgcagctgcaaatgtgtatcttgtgattttggggggaggatgcttgtttaagtaacgctcactggataccttgtagcactactgtttcaagagcgctcgaatgattcagtaagggctttcggtttcatcagaatccatatgtggattggctgagtttcaatccatagcaagtcaaaattctttataatttttccaaactttttcaatccctgaggcataggaattaccgaacatagaattaagggaacaaggcctaaaccggcggga

SEQ ID NO: 212004 - DNA, 1605 bp, Zea Mays
ataaaaccctttttaagggacgatggccgaaaccaaactggtgctttttaccgtttcctttgttgcaaacgctaaatttctcacgaattcttccgtcgtcggcggcgcagattgaatgccaaaaccctagctcgccctccccaattccccatttcggccacaccctccttgcctccacggctccacccctgcttcaggttacctgtgccagcgacgccggtagaagccatggacagctctctcgcgagcgcggcggcgatagccgatcagcgccagaagatcgagcagtaccgccacatcctcgcctccgtcctctcgtcttccccaccggacatctctcaggccaagcgcttcctcgaccacatggtttcggacgaagttccgctcgtggtgtcgcgtcaattgctccagacgttcgcgcaggacctagggaagctggagtcggacgcgcagaaggaggttgcccactacgcgctcacgcagatccagccgcgtgtggtctccttcgaggagcaggtggtagtgattagagagaagcttgcagagctatatgagtctgaacaacaatggtcaaaagcagcacaaatgcttagtgggattgacttggattcaggaatcaggatgcttgatgacaccaacaaattatccaagtgtgttcaaattgcacgactctatttagaggatgatgatgcagtgaatgctgaggcttttataaacaaggcttcatttttggtcaccaacagccatcaggaggttctaaacttacagtacaaggtctgttatgcaaggattttggatctgaaaagaagatttctggaagctgcacttcgatattatgacatttctcaaattgaacaacgcaagattggagacgaagagattgatgaaaatgcactagaacaagctcttagtgctgctgtgacatgcacaatattggctggtgctggtccacaacgctcccgtgttcttgctactctgtacaaggtggtgcaacaaataccaattaatctggatgtttatggcttttctggtaaatatgggttgacagaaattatagcttctggcttgagctgggtggtttcagatcttgtccagtgccaaccagtgtgtatatatacatttttaaggtcttgtaacctagataattagtgtcaacttcgaggctgcgagtccacaccttatctaccgtgcttgtctctttttctttatttacacatgcatttattttgcctcttattgcattatgcccctttcaggatgaaagatgctcgaagttgaaaatatacccaatactgcagaaggtttaccttgaaagaattttgaggaaaccagaaattgatgcatttgcagaggagctgaggccgcatcaaaaagctttattaccagataagtcgactgtgcttgaccgagcaatgatcgagcataatctccttagtgccagtaaactttacacaaatatcagctttgatgagcttgggacattactggggattgatccaaggaaggctgagaagatagcatctcggatgatttatgaggatagaatgcggggctcaattgatcagatttgcctttgtaagttgatagtgactggaaccatgtcca

SEQ ID NO: 212005 - DNA, 1307 bp, Zea Mays
ccgaaaccaaactggtgctttttaccgtttcctttgttgcaaacgctaaatttctcacgaattcttccgtcgtcggcggcgcagattgaatgccaaaaccctagctcgccctccccaattccccatttcggccacaccctccttgcctccacggctccacccctgcttcaggttacctgtgccagcgacgccggtagaagccatggacagctctctcgcgagcgcggcggcgatagccgatcagcgccagaagatcgagcagtaccgccacatcctcgcctccgtcctctcgtcttccccaccggacatctctcaggccaagcgcttcctcgaccacatggtttcggacgaagttccgctcgtggtgtcgcgtcaattgctccagacgttcgcgcaggacctagggaagctggagtcggacgcgcagaaggaggttgcccactacgcgctcacgcagatccagccgcgtgtggtctccttcgaggagcaggtggtagtgattagagagaagcttgcagagctatatgagtctgaacaacaatggtcaaaagcagcacaaatgcttagtgggattgacttggattcaggaatcaggatgcttgatgacaccaacaaattatccaagtgtgttcaaattgcacgactctatttagaggatgatgatgcagtgaatgctgaggcttttataaacaaggcttcatttttggtcaccaacagccatcaggaggttctaaacttacagtacaaggtctgttatgcaaggattttggatctgaaaagaagatttctggaagctgcacttcgatattatgacatttctcaaattgaacaacgcaagattggagacgaagagattgatgaaaatgcactagaacaagctcttagtgctgctgtgacatgcacaatattggctggtgctggtccacaacgctcccgtgttcttgctactctgtacaaggatgaaagatgctcgaagttgaaaatatacccaatactgcagaaggtttaccttgaaagaattttgaggaaaccagaaattgatgcatttgcagaggagctgaggccgcatcaaaaagctttattaccagataagtcgactgtgcttgaccgagcaatgatcgagcataatctccttagtgccagtaaactttacacaaatatcagctttgatgagcttgggacattactggggattgatccaaggaaggctgagaagatagcatctcggatgatttatgaggatagaatgcggggctcaattgatcagatttgcctttgtaagttgatagtgactggaaccatgtcca

SEQ ID NO: 212006 - DNA, 1880 bp, Zea Mays
ggtgctttttaccgtttcctttgttgcaaacgctaaatttctcacgaattcttccgtcgtcggcggcgcagattgaatgccaaaaccctagctcgccctccccaattccccatttcggccacaccctccttgcctccacggctccacccctgcttcaggttacctgtgccagcgacgccggtagaagccatggacagctctctcgcgagcgcggcggcgatagccgatcagcgccagaagatcgagcagtaccgccacatcctcgcctccgtcctctcgtcttccccaccggacatctctcaggccaagcgcttcctcgaccacatggtttcggacgaagttccgctcgtggtgtcgcgtcaattgctccagacgttcgcgcaggacctagggaagctggagtcggacgcgcagaaggaggttgcccactacgcgctcacgcagatccagccgcgtgtggtctccttcgaggagcaggtggtagtgattagagagaagcttgcagagctatatgagtctgaacaacaatggtcaaaagcagcacaaatgcttagtgggattgacttggattcaggaatcaggatgcttgatgacaccaacaaattatccaagtgtgttcaaattgcacgactctatttagaggatgatgatgcagtgaatgctgaggcttttataaacaaggcttcatttttggtcaccaacagccatcaggaggttctaaacttacagtacaaggtctgttatgcaaggattttggatctgaaaagaagatttctggaagctgcacttcgatattatgacatttctcaaattgaacaacgcaagattggagacgaagagattgatgaaaatgcactagaacaagctcttagtgctgctgtgacatgcacaatattggctggtgctggtccacaacgctcccgtgttcttgctactctgtacaaggtaagattgttgtagttttatctcaatgtccttggattacgtgctggtagtacccattctcagctgtgttgctactctgtacaaggtaagatttttgtagttttatctcaatgtccttggattacgtgctggtagtacccattctcagctgtgttttgcaattgtgagcatcggaatacaactatctagatgcattacgtgttaaatgccttggatttgttcatgtcatctatataaaaacatgtttcatgtttagcttatcatagtttatagttgagactgtaatactcatctctcacttgttttctgtcaaggtggtgcaacaaataccaattaatctggatgtttatggcttttctggtaaatatgggttgacagaaattatagcttctggcttgagctgggtggtttcagatcttgtccagtgccaaccagtgtgtatatatacatttttaaggtcttgtaacctagataattagtgtcaacttcgaggctgcgagtccacaccttatctaccgtgcttgtctctttttctttatttacacatgcatttattttgcctcttattgcattatgcccctttcaggatgaaagatgctcgaagttgaaaatatacccaatactgcagaaggtttaccttgaaagaattttgaggaaaccagaaattgatgcatttgcagaggagctgaggccgcatcaaaaagctttattaccagataagtcgactgtgcttgaccgagcaatgatcgagcataatctccttagtgccagtaaactttacacaaatatcagctttgatgagcttgggacattactggggattgatccaaggaaggctgagaagatagcatctcggatgatttatgaggatagaatgcggggctcaattgatcagatttgcctttgtaagttgatagtgactggaaccatgtcca

SEQ ID NO: 212007 - DNA, 805 bp, Zea Mays
ggcttttctggatgaaagatgctcgaagttgaaaatatacccaatactgcagaaggtttaccttgaaagaattttgaggaaaccagaaattgatgcatttgcagaggagctgaggccgcatcaaaaagctttattaccagataagtcgactgtgcttgaccgagcaatgatcgagcataatctccttagtgccagtaaactttacacaaatatcagctttgatgagcttgggacattactggggattgatccaaggaaggctgagaagatagcatctcggatgatttatgaggatagaatgcggggctcaattgatcaggttgaggctgtgatacattttgatgatgacacggaagagctgcagcaatgggatcagcagattgctggactgtgccaagccctgaacgacatccttgacagcatgtcaagcaagggaataactattccggtgtgaataaatatctcatgctgtcggtcgatggtgcatggcagaactgcttccatgccccggaatccagaatcaacattttgtatagtttgcagctgcaaatgtgtatcttgtgattttggggggaggatgcttgtttaagtaacgctcactggataccttgtagcactactgtttcaagagcgctcgaatgattcagtaagggctttcggtttcatcagaatccatatgtggattggctgagtttcaatccatagcaagtcaaaattctttataatttttccaaactttttcaatccctgaggcataggaattaccgaacatagaattaagggaacaaggcctaaaccggcggga

SEQ ID NO: 212008 - DNA, 5107 bp, Zea Mays
tgcctttatggagctcatgtgccagatttctgtttgtgtgattcagtcacatctacacgttgcacttttgagactgttgagatgttaaccatttcttttttaggaaccggccttataagcaatattgtgatactctttacatgaatgtaggggtgtcagtataatcatgatgctttgtgtaattaggtatccaagcggcctcgttctgaattaacagaagtctcttctcatactggcaaagatgtttgtgaaaacatacaagacccgaatggtcaggttggacactcttggggctgggacgatgagggtgtcgttatggacatcaatatacttctgtcagagtttggagattttagtgacttctttcaacaagaggagttagattttggtgagcctccaggtactgctgaatcacatgctctagtaattcctgcttcagactgtggagatgtcacattcacagatagtccatcaacagcaatggatatccctgaacaaagactttctcctgttggtttcacaactttggatgcatttgaccatcaaattatggccccagctcaagatgttgttgctaaagttcaagaacctcataatgatactgcaacacctgcacagtcccactcgcaagttttatcatctggaagatttgattatcttaccaaagctgaagcaaagctcacatttgctccagaatatgcagctgttgaaattttgattgctgaggccccaacaccattgtttacaaatccatactttcctagatcaaagaaaccaggcagttctagttttagtgcaagagtttattcatatgatgttgcacaaagctctcaaattgaatccacaggagacaagccagataagacttctaaactaatatctggtaatcatttacatgatattagttcatcaaacttgtacacacttgtccaaggtgggaataaagggagtgataagatcttaaagagtactgatacacagccctctaagggagaattgtcaccacctatttctggtgtgacttcatttaatttttctcttgtttcacaaaagaagagtggcaacatgttcaatgctggctattttctgctgtctatgaagactgctttggcaactgaaattgaatgcatcacgttccaggctgccatgtgcagaattaggcatacactattgtctctgagaagcaaagcatctgccgagtttaacagtgcaacatccagcttcatacagacaaatgtcagcaacaaatcagatctcacccccagatccttaatggacaatgtgggagtttggaggcctgttgttacacctaaagggcctaaatctcttgagtctttgtctgctaacacattaactggtgcaagcccaagtctgtctatacaaagacaacctgttgtagatcttctctgtgccatgactctgcttgttcaacaatctacttcgtttgttgatatgtcacttgatatggatgacggggacggttcttttttctggctttccctggatgagcaaaagagacgtggattttcttgtgatccttctatggttcatgctggctgtggtggcctattaggaacatgccattcaaaggattgcgctggtgttgatttagtcgatccactttctgcagaggtttcagagccatccatgattagcttgttgcagtcagatataagagtagctcttaaagctgcctttgcaaacatggatggcccgttatcagtaattgattggtgcaggggtcgaggcaatgctgctgagtctgcaggtacgggagatgcatactcttttcagtactccagtggtgatatcctggagccgtcaagttcgttgtccattggtggagattcaatgagcccaccccagccaaccagtagcaatcgaggcatttcagaattagagttccaaaagggatatcaccgtgtcagaccaaccattgctgtcctcccttcaccttctatgctagtcggttaccaggatgattggttgaaggcctcggtgaatagtcttaaaacatgggagaaagctccttttgaaccttatgccttgccgaagcctgttacttactatgcactttgccctgatattgatatgttgacttcggcggtagctgattttttcatgcagcttggaacagtttatgaagtttgcaaactgggaactcattcgccccaaaacaatggaggacaaatggaactatctcctggaaaatatttgccttcaggacttgttctagttgattgtcctgagcagttgaagaaggttcgctgtggccacttaggtcccatcagttcaacaagtgactgtcttcaagctttttcaaaacattggagcgtgaaaagttttgtaacatctatttcaaggatacttaaggatataaagctgacttcaaacatatctacaaatcagaaagagagcagtagtggaccttgcacagtaatttatgtagtttgcccatttccagaaccttgtgcaattctacagacgctagtagaatgttctgttgctcttgggtatgttatttcatccccggaaagggaaagaaagttactatattcacaggttgccaaagccctaaacagcagtgcttctgtagatgaagcatcagcatcaaatgtcgttatgctatccgggttcagtatacccaagctcgtcttgcagattgttactattgaaactgtactgagaatggataagccaaacaaggagcttgctgttttgaaggacatagcattcacagtgtacaacaaggcacgacgaatcccacgggctgtctccacaagcgatatgttccagtcaccaacttatttgggtagatctcagtccacaatgatgcatgttacatctcctgctcctactctttggaaggaatgtttagttcctcgaatgtctgggccaactctctctcgagaaaccgattttgatgcatccatgaggtcggcaacatgggataactcatggcagcctgctcgttcgggaggacttctggacccaagtaagctgcctgatttatgtgctcaggatgataggaaatatgcctttgagccacttttcatactagcagaccctgggtctgccgatcttaatgctttaatggaaccatcaaaatctggagcagatgcatctggcagcagggtatatggctcaatttcaggaagtaactctgatagtggagtgagccctctactcgacgtatctgagagtgacagtgcagcaagtcttcattgctgttatggttggactgaggactggcgatggctagtgtgcatttggacagatgctagaggagaattattggacagcttaatatttccttttggtggtattagtagccgccaagacactaaagttctccaaagccttttcatccaaattctacagcaaggctgtcaaataatgtcgtcttcacctgaggctagcaatatgagaccacgagatgtcataataactcgtatcggaggtttccttgagcttgaaatccaagaatggcagaaggcaatatactcttatggtggcaatgaagtgaagaagtggcctgtgcagttacggcgatccatacctgagggtattccacctagttcaaatggtcctacgctccagcagcagcagcagcaagacatggccttaattcaagatagaaacatgccttcctcaccaaaccctctgtatagccctcatccaaaatcaagcttcatgaaaggtgcacttggacaatctggcaacaaaaaacagatccttgtggaacaaagtggaatggacacttcaaggggatcactgcacttagttcgtagcatcagtttggttgcagtttcccaagatcattcgttgcatctcacatgccaagcagatctactgagcagacctgcttcagctggcgaagggagtcaaggcagcagtggcccttggagttacctggaaggtttcactccagtgaagtccattgggtcaatgtcagcgtcacactcgtaccttctagttccttcgccaacaaagggactgcgattcctttagcgatgggctatgtcgtctcgaaagccgtcccacctgttaggagggactctgcacaactcaccaaggatgaacagccctctgttctctcagtcagcatcatcgatcactatggaggcagcagtgggactgttcaagagaagatgagccgaggcggcggcggcggcagcaaacaggcaaggaacttgagtcaggagacaacaggtcgtgagtgtgagatggagatgcatagtgtgctggaagctgtggccgcggagcttcactctctgtcttggttgacagtaagcccggtgtacacagaaaggcgcacagcactgccctttcactgtgacatggtcctaaggatgcggcggcttctacactacgcagataagtatctatctgaacctaagggagagacaactcactaattgtcatgtacaattaatatctagctaggtaggtatgtgagggcacatttgacgagctttgtagactgattttgcaataaccctgataacttacaggtggatgctgtaacctttttctctttttttaggtctgtattgtttgtcgacacaagatttgagatatgattccgtttgttgactgtattaatcagaattacaagtacagcgtttactgggattgccgtgccctactgcgacgacgtttttttttcctttaatcagaaatacttgtaaaatcaaaatcatctctccgctacggctattgctcacaccccctggctggaataggcagcttaaaacccaggtaaaactgacaggtccgcaatccccttgggcaaactctcaatcttcctcagcaacgttagccggttgttgcgaactctctcgtcttcctgcgcataatatacaccatcatcactctcactcatcagcacaagttaagtttttcaagggcctcacaaaactcaccgccatcacgaagacactattgaagaaatcttctaggggttgtatcaggataagagaagcatccacaaaggtcttaatatcaacacctacagaatgggtagttggaggaatcagacaaatgaacatttaaattgaaatgaaaaatggatatgaaaaacatgtaccaggatggatcttatcag

SEQ ID NO: 212009 - DNA, 1191 bp, Zea Mays
ttactatcgtttgatgtcgccatactgatgtgggggatgcgagcggcgacgatttcccccgggttttatttgaatttttcgggcaatgctacgtgaagcgtaactctatttcttgatcaacatcaacatgtcgcgggaggataatgtttacatggccaagctggctgagcaagcagaacggtacgaggaaatggttgagtacatggagaaggtggctaagaccgtagatgtggaagagctcaccgttgaggagcggaacctcttatctgttgcctacaagaacgtaattggggcccgccgtgcctcatggcgcattatctcctccatcgagcataaggaggagtcccagtcgaaggtgttttacctcaagatgaagggagattatcacaggtaccttgctgagtttaagactggtgctgagaggaaggaagctgcagagagtacaatgatagcttataaggcagctcaggatattgcgttggcggaactggcatctactcatcccataagacttggacttgcacttaacttctcagttttctattacgagattctgaactctccagacaaagcttgcaaccttgccaggcaggcgtttgatgaggctatttctcagttggatacgcttggcgaggattcatacaaagatagcaccttgatcatgcagctcctgagggacaacctaaccctatggaccgctgacagcacaacggaggacggcatcgaggagggcaatgaggcctcgaagggtgatgctggtgagggtcagtagtctggtaaaacctcgattgatggttcggcatgtttttgaagtctactgtgttggaaaccatgttctaatagaaggcgtctcccgctccatgcattccaagattctgtcctccccctccctccccccatgttgtaggctggtagtggtcaaattagttggccctgggtccatttggactgatgtattgtttactgctattgaagtcattcgttctcgttttgctcttgcagtggatcgctatagccttgtgttttcaatcttttagggcctgtttgggaatgcagtttcaaaatactgtaattttgagataccatagtttataattgtacatgacataaatactacggtattgctttaccacaataaaactatagtattgctcaaaaccgagatctgtttggttctattggaaaaacaaa

SEQ ID NO: 212010 - DNA, 1172 bp, Zea Mays
gtcagaggagattactcgggataatgtattgattacttttggtaactctatttcttgatcaacatcaacatgtcgcgggaggataatgtttacatggccaagctggctgagcaagcagaacggtacgaggaaatggttgagtacatggagaaggtggctaagaccgtagatgtggaagagctcaccgttgaggagcggaacctcttatctgttgcctacaagaacgtaattggggcccgccgtgcctcatggcgcattatctcctccatcgagcataaggaggagtcccgtaagaatgaggaacatgttattcagatcaaggagtaccagtcgaaggtgttttacctcaagatgaagggagattatcacaggtaccttgctgagtttaagactggtgctgagaggaaggaagctgcagagagtacaatgatagcttataaggcagctcaggatattgcgttggcggaactggcatctactcatcccataagacttggacttgcacttaacttctcagttttctattacgagattctgaactctccagacaaagcttgcaaccttgccaggcaggcgtttgatgaggctatttctcagttggatacgcttggcgaggattcatacaaagatagcaccttgatcatgcagctcctgagggacaacctaaccctatggaccgctgacagcacaacggaggacggcatcgaggagggcaatgaggcctcgaagggtgatgctggtgagggtcagtagtctggtaaaacctcgattgatggttcggcatgtttttgaagtctactgtgttggaaaccatgttctaatagaaggcgtctcccgctccatgcattccaagattctgtcctccccctccctccccccatgttgtaggctggtagtggtcaaattagttggccctgggtccatttggactgatgtattgtttactgctattgaagtcattcgttctcgttttgctcttgcagtggatcgctatagccttgtgttttcaatcttttagggcctgtttgggaatgcagtttcaaaatactgtaattttgagataccatagtttataattgtacatgacataaatactacggtattgctttaccacaataaaactatagtattgctcaaaaccgagatctgtttggttctattggaaaaacaaa

SEQ ID NO: 212011 - DNA, 488 bp, Zea Mays
tagatatccagaaagcaaacagaagtgcatataattctagtggtcttgattatctgcgtcacaaaaattgcaaaatcatctctggagaaggcattggctgagaatggagagctccatgtaggaacatcgcagcttccaggtgtaacctctcccttggatctgcaacaacctcttgtaatcaagattgacacatcaaatgaagaccacgagaagtaaaagtgttgtgtttacaatctcagatgtaaattctttggttgttgagtcggtagactgtatatacacccatactctggtgaggcccgtaaatgggtaaaaaagacatcatccccccttccaaaaaagggaatgaagtttagtttactgataggttatagtaatacgatatgcgctttgtttcactccacgtgctaccttatctttggtgaaaatactcgcacttaactgggttgagagctacagctcccaaaccgactacttacgaaaaaaag

SEQ ID NO: 212012 - DNA, 975 bp, Zea Mays
ttcagagtcaggagattttgaaggactttctggtttggatcaaggagaatttgggtccatggggtcctttggtgttggccctcgcttacatccctctgacagtcttagctgttccagcatcaattcttacacttggagggggctatctatttggcttgccagtggggtttgttgctgattccattggagcagcaattggtgcgactgctgcatttctgcttggcaggacgattgggaggtcttatgttctctccaaatgcaaagattaccctaagtttcaagcagtagctattgccatccaaagatctggcttcaagatcgtgttgctactaaggcttgtacctttacttccgttcaacatgttgaactacctgttatctgtcactcctgttggtgttggagaatacatgctggcttcttggttgggaatgatgccaatcactcttgctctggtgtacgttggaacaacactaaaagatctatcagatgtgacacatgggtggagtgagatctcgactactcgacggtggtcttgattatctgcgtcacaaaaattgcaaaatcatctctggagaaggcattggctgagaatggagagctccatgtaggaacatcgcagcttccaggtgtaacctctcccttggatctgcaacaacctcttgtaatcaagattgacacatcaaatgaagaccacgagaagtaaaagtgttgtgtttacaatctcagatgtaaattctttggttgttgagtcggtagactgtatatacacccatactctggtgaggcccgtaaatgggtaaaaaagacatcatccccccttccaaaaaagggaatgaagtttagtttactgataggttatagtaatacgatatgcgctttgtttcactccacgtgctaccttatctttggtgaaaatactcgcacttaactgggttgagagctacagctcccaaaccgactacttacgaaaaaaag

SEQ ID NO: 212013 - DNA, 1709 bp, Zea Mays
ccagagccgaccaggtcactcgcgtcacatctgtgtcggtgctgggcgcgctccccgccggggacggacggttggtgcaactggaaagcgaggcgttttgttttctcccgtgctccccctcccggggaaggggcaacgagaaatcgaacccacacgcaacgcgacgcctccacccgctcgcctagtccagaatccagatccagcgcccgcatctctctctctcgcgcgcgcgcgcgagcgcgatgagctgccgcgacgggcgatcgtgctagcggtaacagcgagcggtgcgcgagggcggagtgggagtgtggatccgaggggcggcaaatctggcaggcgccgcggtggggctgcgggcgcgggggagggcggggggctgggcggacggcggggagggaggggaggactgcggtaggctcaggccctggcgcaggaggctgctcgcgtccatggcgctctcgtggtcctcggccctccgcctcgccgtcgccgccgtcctgctcgtcgccgtcgtcgtcgcgctcttcactctccccatcgagaaggaactacttgcatccagctcacggcattacctgccctggtagctttcatcttgactgagagaatttttctctgtatacaatgtgctatgggagcatgggtctatgggaaatataagaaactattcagagtcaggagagtttgatctgatccaagttgagtgccatgtttattttgaaggactttctggtttggatcaaggagaatttgggtccatggggtcctttggtgttggccctcgcttacatccctctgacagtcttagctgttccagcatcaattcttacacttggagggggctatctatttggcttgccagtggggtttgttgctgattccattggagcagcaattggtgcgactgctgcatttctgcttggcaggacgattgggaggtcttatgttctctccaaatgcaaagattaccctaagtttcaagcagtagctattgccatccaaagatctggcttcaagatcgtgttgctactaaggcttgtacctttacttccgttcaacatgttgaactacctgttatctgtcactcctgttggtgttggagaatacatgctggcttcttggttgggaatgatgccaatcactcttgctctggtgtacgttggaacaacactaaaagatctatcagatgtgacacatgggtggagtgagatctcgactactcgacggattctgataatatctggttttgtattatctgtggtcttgattatctgcgtcacaaaaattgcaaaatcatctctggagaaggcattggctgagaatggagagctccatgtaggaacatcgcagcttccaggtgtaacctctcccttggatctgcaacaacctcttgtaatcaagattgacacatcaaatgaagaccacgagaagtaaaagtgttgtgtttacaatctcagatgtaaattctttggttgttgagtcggtagactgtatatacacccatactctggtgaggcccgtaaatgggtaaaaaagacatcatccccccttccaaaaaagggaatgaagtttagtttactgataggttatagtaatacgatatgcgctttgtttcactccacgtgctaccttatctttggtgaaaatactcgcacttaactgggttgagagctacagctcccaaaccgactacttacgaaaaaaag

SEQ ID NO: 212014 - DNA, 6367 bp, Zea Mays
cgcctccccacccaccccagtctgccagaaatggaggaggatcactcggtgatactaatatctgaaggtgctattaaaagcatcaaacttagcctctctaccggagaagagatatgcacatactccataaacgagtgcccagtgacccatcctagccagcttggaaatccgttccttgggttgccacttgaagctgggaagtgtgaatcctgtggtgcctctgaaaatgacaaatgcgaaggccattttgggtacattgaactacctgtacccatataccatccatgtcatgtcactgaactgaggcaactattgagcttgatatgtctgaagtgccttcgaatcaagaaagggaaggtgaaacaaagtaatggaaaaggaaacgcggcaccaactttgtgctcttattgcagggatattccagccctgtctttgaaggaaatcaagacaacagatggtgcaattcgtttagagttgagagcacctcataataaacacatgacagaacgttcatggaactttcttgataaatatggatttcatcatggtggatgttctcaccataggacactgcttccagaagaggctctaaatatattgaagaaggttcctgatgatactaggagaaagctagctgcacggggatacattgttcagactgggtatgtgatgaagtaccttccagtacctccgaactgtctatatattccagagttcaccgatgggcagagcattatgtcatatgacatttcaatagctctgttgaagaaggttcttcagaaaatagaacagattaaaagatcaagatctggttccccaaactttgaatcacatgatgctgaatcatgtgatttgcagcttgcgattggccagtacatacgtctaaggggcactacaaggggccctcaagacaacaccaagcggtttactgttggcagtgctgattcagctgcattgtcaacaaaacagtggttagaaaagatgcggacactgtttatcagcaaagggtcaggtttttcatctcgcagcgttctgacaggagatccatatattgggctaggtgttgtagggcttccttctgaagttgcaaagagaatgacattcgaagagcaggtaactgacataaacattaacagattgcaagacgtggtagacaagggactctgtttgacctacagagatggtcaagctacatatgccatcactgttggatcaaaagggtacacaacacttaaagttggtcagactatcagtcggaggatagttgatggggatgttgtgtttcttaacaggccacccagcacacataagcattctctccaagctttctacgcatatgtgcatgatgaccatacagtcaaaatcaatcctctcatgtgtggccccttttctgctgactttgacggggattgcgtacacatatattatccacaatcgcttgctgcaaaagctgaagccttggagctttttagtgttgagaggcaactcattagttcgcacagtgggaaggttaatctccagctaggtaacgactccttggtagctatgaaggctatgtctcatacaaccatgttacacaaggaattagcaaaccagttggcaatgtttgtgccattttcacttcttgctcctgctgtaatcaagccagttccatcttggacaatatcacagatagtgcaaggtgcatttccagctaacctgacttgccaaggggacacacacttggttagggacagcacaatcataaggctggaccttggcaaagaatctgttcaggactcattccctgatttggtgtcctccatccttcgtgagaagggtccaaaagaagctctgcaatttctgaatgtgttggagccattgttgatggagtttttacttcttgacggtttgagtataagtctgcgggattttaatgttcccaaggctttattggaggaagcacaaaaggacattcgaaatcagtcccttattcttgagcagtctaggtgctctacaagtcaattcgtagaattccgagtcgaaaacaatttgaaaaatgtcaaacagcagatttcagattctgttgggaaattctctgaccttggtctgctgattgatccgaaaaaggaagcctcaatgtcaaaagtagttcaacaagttggttttgttggcttgcaactgtatcgtgaaggcaagttgtattcaagacgcttggtagaggactgcttcacaaactttgttaataaacacttggccattggagatgagtatcctccagaagcgtatggtcttgtccaaagttcatattttcatggtctcaatccttatgaagagttgatacatgctatatccactagagaagctatgatccgctcctctagaggtctgtcagaacctggaactttgttcaagaatttaatggccatcttgagggatgtagttatatgttatgatggaactgtgagaaacatttgtagcaattctatcattcaacttaagtatggggaagatgatgaaactgattcttcaagtgttgtacctcctggtgaacctgtgggtgtcttagccgccacagctatctcgaaccctgcatacaaggctgtcttggattcctcccaaagtaacaatgcttcatgggagtcaatgaaggaaattcttcagacaagaacttcctataaaaatgatgtgaaagatcggaaagtggtcctattcctgaatgattgctcttgcgcaaaaaaattctgcaaggaaagggctgcacttgcagtacaaagttgtcttaagagagtcacacttggggattgtgctactgatatctgcattgagcatcagaagcaaataaatttagatggaacatctgaagctgccccaactcttgtaggacatattcaccttgacaaggggcatttagaaaggataaacattagtactcaagacattctccaaaaatgtcaagaagtttctgggagatttggaaagaagaaaggacacctttgccacatctttaaaaaaattacttttgctacttgtgattgttcattcactcagatgccaatcgatggaaagctacataaggttccatgtgtgcagtttgctttttctgatgacattgtactatccgagtctattgagagagcagtgaatgtgatagctgactctgtctgctcagtgcttttagatacaattattaaaggtgatcctcgaattcaagcggcaaaagttatctgggttgaatcagatgcagcatcttgggtaaaacacacacggaaggtatcaaagggcgagtcagcattagaaatcattgttgaaaaagatgatgctgtaagcaatggtgatgcctggagaacagcaattgatgcctgcttacctgtacttaacctcattgacacacggaggtctattccatatggcattcaacaagtgagggaacttattggcatctcatgtgccttcgatcaagtggtgcagcggctttcaacgactgtaaaaatggttaataaaggagttcttaaagaccatttgatacttgtggcaaacagcatgacatgcactggaaatttgattgggttcaacattgctggctacaaggcaactttccgttcattaaaagttcaagtgcctttcaccgagtccactttgtttacccctatgaaatgctttgagaaggctgcagaaaaatgtgattctgattcattgggatgtgtggtctcatcgtccgcatggggcaagcatgcagcagttggtactgggtcatcttttcaaattctctggaatgaaaatcagctgaaaagcaacaaggagtatggggatgggttgtacgatttcttagcattggtcaggactgaccaagaaaagacagactacatgttcttggacgatgttgactatcttgtagaggagaatgcagcagatgacatgtgcttatctcctgagccagatgggacccttggtaagcctacctttgaggataattttgaagagcaaaatattcagaaaggcagctcatgggaaattggcataacaacgaactcaagttgggaacagaatgctagtgttgcgaatgattctggtgactggggaggctggagtagtggaggtggagctgctgcaaagccagcagatcaagataattcatgggaagtgcatgctaaggtgcaggacaattccaccactgattggggaggctggagcgttgagaagccaacaggtgaggcaactgtatctggagaaccagctgaaacagatacttgggctgataagggtgctaaaatggaatcagatgcaggtgatggtaattgggaaaagtccagcactcctgaggcatcaaagaaaaatgactcatcagaaaatacatgggacaaaagaaaaggagatggaggtgatggtgcgtgggggaacaggtctgatgatggccatggcaattgggagcatcccagcaattggaatgggcagagtttggatgtagatcaggacacatggggaaacgccaggggaaaaaagaaggcagatggtaactactgtcaatgggaggagcagccaagcaattacaaacagaagaagacaaatgctgatcatgattcctcctataacaatgtgatgccgtcatcagaaattgcttggaatgctggagatggaactggaagaccaaatgccaagtctaatgcagaatccagttggggtgaggaagataagatggagtctgacgatcatccgaaagtcccaaaagaatcagacacatggaatacagggagatcaaatgaaagtccatgggataacactgatgcactgcaggattcctgggttaagagcgcagctcgcaataacaacactcaggatggttcatgggataaagtagtatctatgaaggatcttgattcactccaagattcatggagtaaggcgacaatccagacgaatgatgcacagaatgattcttgggacaatgtggcaaaaaatgccccggattctgccgcagaagactcctggggggctgcaacaccagcggagacaactgattctggtaacaaggagtggaaatcagatggatggggggcaaagtctggtaactggagcagccaaagaaataatcctgggagacccccaaggagaccagatgagaggggtccacctccaccaagacaacggttcgaactaacagttgcggagaagaacattcttctagaagttgaacctattaaattacgtgtgagaagcatcttccgtgaagcatgtgacggtgttagacttaatccagaagacgagaagtttatcctggagaaagttcttgagcaccacccggaaaagcaatccaaggtgtctggtgaaatcgactacctaacggtcaacaagcaccagactttccaggacactcggtgctttttcgtggtctccacagatggatcccaggcagatttctcctacctgaagtgcctggagaactttgtgaggaagagctacacggaggacgccgacacattctgcatgaagtacttaaggccccgtcgcaggcaggcaccaccagctgatgttgggacagcatcaggcgccccggatgaggttccaccgtcaaccgcagctgagacagagcaaggcactcctccagcccctcaggcagaggttccacaagagacttggggttctcccgcagtgcctctggaaggaggaactcacatcgccggaccagactcaacaggcgacgctgtgatcctaggggagcagcacgatctgactccggcttctccagctgtggcaccacaagtggcttctgagccagacacaaccgacggcacggggcttctaggaaaggctccgcaagctgactggggacccagattcgacgctgactgatatttaggctgtgtgaagctgccgcatgtaaaagccagacctgtgctctgagcaagggagcattcccttgctaagtcgtcagttaactccccttgacttcatctggagaggtggacaggtagtagcggcaaacattctagcccttagcggccgcttgctcgtcctcgtccgtttcgtctcgccctgatgggaaccatgtaaatccttgggaacaaagctaccccctgctgcctttaccgtatctagttggaccttccccactgttggaatctgtgagtccgtctgctgttaaatttttgatggtttctgggctgtggcttgccagcggtgatgccaaactctggaaacctagggatttgtttggtgcggtcgtttggttgtcaggtcgatcagcaaatgtatgcctttgtcctccagatatgtgcttgttgagctagtagatagtgttacattgcgtgcctttgttcaatggaagcccagtttgagatggagcacgtgttcgaaaatactcggtatcacttatgagcgtaaatgcgaa

SEQ ID NO: 212015 - DNA, 6695 bp, Zea Mays
ggaactcgcagcgttctccacgccagtcgcgcagtggggtcactaccctttaccattacctgctcacgggcacggcgcctctcatttcgtgacggagcaccggtgcgcctcgtcctcggctgaccggtcgtcgtccagttccacctccctgtcctgtctcctcccctcccctccctcctttctcacacgcgtacagtgaacttctcctcgtgttctccgaggcggagcaaaaccctcccttccccgcgctagggttttagcgcggccgcgacgggaggatcacggcggcccaaggagacggctagacggtcggtggacgccgccgagacgtggggcggcgccgtcgcgtattgaaatggaggaggatcactcggtgatactaatatctgaaggtgctattaaaagcatcaaacttagcctctctaccggagaagagatatgcacatactccataaacgagtgcccagtgacccatcctagccagcttggaaatccgttccttgggttgccacttgaagctgggaagtgtgaatcctgtggtgcctctgaaaatgacaaatgcgaaggccattttgggtacattgaactacctgtacccatataccatccatgtcatgtcactgaactgaggcaactattgagcttgatatgtctgaagtgccttcgaatcaagaaagggaaggtgaaacaaagtaatggaaaaggaaacgcggcaccaactttgtgctcttattgcagggatattccagccctgtctttgaaggaaatcaagacaacagatggtgcaattcgtttagagttgagagcacctcataataaacacatgacagaacgttcatggaactttcttgataaatatggatttcatcatggtggatgttctcaccataggacactgcttccagaagaggctctaaatatattgaagaaggttcctgatgatactaggagaaagctagctgcacggggatacattgttcagactgggacatttcaatagctctgttgaagaaggttcttcagaaaatagaacagattaaaagatcaagatctggttccccaaactttgaatcacatgatgctgaatcatgtgatttgcagcttgcgattggccagtacatacgtctaaggggcactacaaggggccctcaagacaacaccaagcggtttactgttggcagtgctgattcagctgcattgtcaacaaaacagtggttagaaaagatgcggacactgtttatcagcaaagggtcaggtttttcatctcgcagcgttctgacaggagatccatatattgggctaggtgttgtagggcttccttctgaagttgcaaagagaatgacattcgaagagcaggtaactgacataaacattaacagattgcaagacgtggtagacaagggactctgtttgacctacagagatggtcaagctacatatgccatcactgttggatcaaaagggtacacaacacttaaagttggtcagactatcagtcggaggatagttgatggggatgttgtgtttcttaacaggccacccagcacacataagcattctctccaagctttctacgcatatgtgcatgatgaccatacagtcaaaatcaatcctctcatgtgtggccccttttctgctgactttgacggggattgcgtacacatatattatccacaatcgcttgctgcaaaagctgaagccttggagctttttagtgttgagaggcaactcattagttcgcacagtgggaaggttaatctccagctaggtaacgactccttggtagctatgaaggctatgtctcatacaaccatgttacacaaggaattagcaaaccagttggcaatgtttgtgccattttcacttcttgctcctgctgtaatcaagccagttccatcttggacaatatcacagatagtgcaaggtgcatttccagctaacctgacttgccaaggggacacacacttggttagggacagcacaatcataaggctggaccttggcaaagaatctgttcaggactcattccctgatttggtgtcctccatccttcgtgagaagggtccaaaagaagctctgcaatttctgaatgtgttggagccattgttgatggagtttttacttcttgacggtttgagtataagtctgcgggattttaatgttcccaaggctttattggaggaagcacaaaaggacattcgaaatcagtcccttattcttgagcagtctaggtgctctacaagtcaattcgtagaattccgagtcgaaaacaatttgaaaaatgtcaaacagcagatttcagattctgttgggaaattctctgaccttggtctgctgattgatccgaaaaaggaagcctcaatgtcaaaagtagttcaacaagttggttttgttggcttgcaactgtatcgtgaaggcaagttgtattcaagacgcttggtagaggactgcttcacaaactttgttaataaacacttggccattggagatgagtatcctccagaagcgtatggtcttgtccaaagttcatattttcatggtctcaatccttatgaagagttgatacatgctatatccactagagaagctatgatccgctcctctagaggtctgtcagaacctggaactttgttcaagaatttaatggccatcttgagggatgtagttatatgttatgatggaactgtgagaaacatttgtagcaattctatcattcaacttaagtatggggaagatgatgaaactgattcttcaagtgttgtacctcctggtgaacctgtgggtgtcttagccgccacagctatctcgaaccctgcatacaaggctgtcttggattcctcccaaagtaacaatgcttcatgggagtcaatgaaggtagtaatgttataaatatttcttgtcatttaatttagaggccttgttgttactgcttaataagtttgttttattattatcacaggaaattcttcagacaagaacttcctataaaaatgatgtgaaagatcggaaagtggtcctattcctgaatgattgctcttgcgcaaaaaaattctgcaaggaaagggctgcacttgcagtacaaagttgtcttaagagagtcacacttggggattgtgctactgatatctgcattgagcatcagaagcaaataaatttagatggaacatctgaagctgccccaactcttgtaggacatattcaccttgacaaggggcatttagaaaggataaacattagtactcaagacattctccaaaaatgtcaagaagtttctgggagatttggaaagaagaaaggacacctttgccacatctttaaaaaaattacttttgctacttgtgattgttcattcactcagatgccaatcgatggaaagctacataaggttccatgtgtgcagtttgctttttctgatgacattgtactatccgagtctattgagagagcagtgaatgtgatagctgactctgtctgctcagtgcttttagatacaattattaaaggtgatcctcgaattcaagcggcaaaagttatctgggttgaatcagatgcagcatcttgggtaaaacacacacggaaggtatcaaagggcgagtcagcattagaaatcattgttgaaaaagatgatgctgtaagcaatggtgatgcctggagaacagcaattgatgcctgcttacctgtacttaacctcattgacacacggaggtctattccatatggcattcaacaagtgagggaacttattggcatctcatgtgccttcgatcaagtggtgcagcggctttcaacgactgtaaaaatggttaataaaggagttcttaaagaccatttgatacttgtggcaaacagcatgacatgcactggaaatttgattgggttcaacattgctggctacaaggcaactttccgttcattaaaagttcaagtgcctttcaccgagtccactttgtttacccctatgaaatgctttgagaaggctgcagaaaaatgtgattctgattcattgggatgtgtggtctcatcgtccgcatggggcaagcatgcagcagttggtactgggtcatcttttcaaattctctggaatgaaaatcagctgaaaagcaacaaggagtatggggatgggttgtacgatttcttagcattggtcaggactgaccaagaaaagacagactacatgttcttggacgatgttgactatcttgtagaggagaatgcagcagatgacatgtgcttatctcctgagccagatgggacccttggtaagcctacctttgaggataattttgaagagcaaaatattcagaaaggcagctcatgggaaattggcataacaacgaactcaagttgggaacagaatgctagtgttgcgaatgattctggtgactggggaggctggagtagtggaggtggagctgctgcaaagccagcagatcaagataattcatgggaagtgcatgctaaggtgcaggacaattccaccactgattggggaggctggagcgttgagaagccaacaggtgaggcaactgtatctggagaaccagctgaaacagatacttgggctgataagggtgctaaaatggaatcagatgcaggtgatggtaattgggaaaagtccagcactcctgaggcatcaaagaaaaatgactcatcagaaaatacatgggacaaaagaaaaggagatggaggtgatggtgcgtgggggaacaggtctgatgatggccatggcaattgggagcatcccagcaattggaatgggcagagtttggatgtagatcaggacacatggggaaacgccaggggaaaaaagaaggcagatggtaactactgtcaatgggaggagcagccaagcaattacaaacagaagaagacaaatgctgatcatgattcctcctataacaatgtgatgccgtcatcagaaattgcttggaatgctggagatggaactggaagaccaaatgccaagtctaatgcagaatccagttggggtgaggaagataagatggagtctgacgatcatccgaaagtcccaaaagaatcagacacatggaatacagggagatcaaatgaaagtccatgggataacactgatgcactgcaggattcctgggttaagagcgcagctcgcaataacaacactcaggatggttcatgggataaagtagtatctatgaaggatcttgattcactccaagattcatggagtaaggcgacaatccagacgaatgatgcacagaatgattcttgggacaatgtggcaaaaaatgccccggattctgccgcagaagactcctggggggctgcaacaccagcggagacaactgattctggtaacaaggagtggaaatcagatggatggggggcaaagtctggtaactggagcagccaaagaaataatcctgggagacccccaaggagaccagatgagaggggtccacctccaccaagacaacggttcgaactaacagttgcggagaagaacattcttctagaagttgaacctattaaattacgtgtgagaagcatcttccgtgaagcatgtgacggtgttagacttaatccagaagacgagaagtttatcctggagaaagttcttgagcaccacccggaaaagcaatccaaggtgtctggtgaaatcgactacctaacggtcaacaagcaccagactttccaggacactcggtgctttttcgtggtctccacagatggatcccaggcagatttctcctacctgaagtgcctggagaactttgtgaggaagagctacacggaggacgccgacacattctgcatgaagtacttaaggccccgtcgcaggcaggcaccaccagctgatgttgggacagcatcaggcgccccggatgaggttccaccgtcaaccgcagctgagacagagcaaggcactcctccagcccctcaggcagaggttccacaagagacttggggttctcccgcagtgcctctggaaggaggaactcacatcgccggaccagactcaacaggcgacgctgtgatcctaggggagcagcacgatctgactccggcttctccagctgtggcaccacaagtggcttctgagccagacacaaccgacggcacggggcttctaggaaaggctccgcaagctgactggggacccagattcgacgctgactgatatttaggctgtgtgaagctgccgcatgtaaaagccagacctgtgctctgagcaagggagcattcccttgctaagtcgtcagttaactccccttgacttcatctggagaggtggacaggtagtagcggcaaacattctagcccttagcggccgcttgctcgtcctcgtccgtttcgtctcgccctgatgggaaccatgtaaatccttgggaacaaagctaccccctgctgcctttaccgtatctagttggaccttccccactgttggaatctgtgagtccgtctgctgttaaatttttgatggtttctgggctgtggcttgccagcggtgatgccaaactctggaaacctagggatttgtttggtgcggtcgtttggttgtcaggtcgatcagcaaatgtatgcctttgtcctccagatatgtgcttgttgagctagtagatagtgttacattgcgtgcctttgttcaatggaagcccagtttgagatggagcacgtgttcgaaaatactcggtatcacttatgagcgtaaatgcgaa

SEQ ID NO: 212016 - DNA, 6686 bp, Zea Mays
ctttaccattacctgctcacgggcacggcgcctctcatttcgtgacggagcaccggtgcgcctcgtcctcggctgaccggtcgtcgtccagttccacctccctgtcctgtctcctcccctcccctccctcctttctcacacgcgtacagtgaacttctcctcgtgttctccgaggcggagcaaaaccctcccttccccgcgctagggttttagcgcggccgcgacgggaggatcacggcggcccaaggagacggctagacggtcggtggacgccgccgagacgtggggcggcgccgtcgcgtattgaaatggaggaggatcactcggtgatactaatatctgaaggtgctattaaaagcatcaaacttagcctctctaccggagaagagatatgcacatactccataaacgagtgcccagtgacccatcctagccagcttggaaatccgttccttgggttgccacttgaagctgggaagtgtgaatcctgtggtgcctctgaaaatgacaaatgcgaaggccattttgggtacattgaactacctgtacccatataccatccatgtcatgtcactgaactgaggcaactattgagcttgatatgtctgaagtgccttcgaatcaagaaagggaaggtgaaacaaagtaatggaaaaggaaacgcggcaccaactttgtgctcttattgcagggatattccagccctgtctttgaaggaaatcaagacaacagatggtgcaattcgtttagagttgagagcacctcataataaacacatgacagaacgttcatggaactttcttgataaatatggatttcatcatggtggatgttctcaccataggacactgcttccagaagaggctctaaatatattgaagaaggttcctgatgatactaggagaaagctagctgcacggggatacattgttcagactgggtatgtgatgaagtaccttccagtacctccgaactgtctatatattccagagttcaccgatgggcagagcattatgtcatatgacatttcaatagctctgttgaagaaggttcttcagaaaatagaacagattaaaagatcaagatctggttccccaaactttgaatcacatgatgctgaatcatgtgatttgcagcttgcgattggccagtacatacgtctaaggggcactacaaggggccctcaagacaacaccaagcggtttactgttggcagtgctgattcagctgcattgtcaacaaaacagtggttagaaaagatgcggacactgtttatcagcaaagggtcaggtttttcatctcgcagcgttctgacaggagatccatatattgggctaggtgttgtagggcttccttctgaagttgcaaagagaatgacattcgaagagcaggtaactgacataaacattaacagattgcaagacgtggtagacaagggactctgtttgacctacagagatggtcaagctacatatgccatcactgttggatcaaaagggtacacaacacttaaagttggtcagactatcagtcggaggatagttgatggggatgttgtgtttcttaacaggccacccagcacacataagcattctctccaagctttctacgcatatgtgcatgatgaccatacagtcaaaatcaatcctctcatgtgtggccccttttctgctgactttgacggggattgcgtacacatatattatccacaatcgcttgctgcaaaagctgaagccttggagctttttagtgttgagaggcaactcattagttcgcacagtgggaaggttaatctccagctaggtaacgactccttggtagctatgaaggctatgtctcatacaaccatgttacacaaggaattagcaaaccagttggcaatgtttgtgccattttcacttcttgctcctgctgtaatcaagccagttccatcttggacaatatcacagatagtgcaaggtgcatttccagctaacctgacttgccaaggggacacacacttggttagggacagcacaatcataaggctggaccttggcaaagaatctgttcaggactcattccctgatttggtgtcctccatccttcgtgagaagggtccaaaagaagctctgcaatttctgaatgtgttggagccattgttgatggagtttttacttcttgacggtttgagtataagtctgcgggattttaatgttcccaaggctttattggaggaagcacaaaaggacattcgaaatcagtcccttattcttgagcagtctaggtgctctacaagtcaattcgtagaattccgagtcgaaaacaatttgaaaaatgtcaaacagcagatttcagattctgttgggaaattctctgaccttggtctgctgattgatccgaaaaaggaagcctcaatgtcaaaagtagttcaacaagttggttttgttggcttgcaactgtatcgtgaaggcaagttgtattcaagacgcttggtagaggactgcttcacaaactttgttaataaacacttggccattggagatgagtatcctccagaagcgtatggtcttgtccaaagttcatattttcatggtctcaatccttatgaagagttgatacatgctatatccactagagaagctatgatccgctcctctagaggtctgtcagaacctggaactttgttcaagaatttaatggccatcttgagggatgtagttatatgttatgatggaactgtgagaaacatttgtagcaattctatcattcaacttaagtatggggaagatgatgaaactgattcttcaagtgttgtacctcctggtgaacctgtgggtgtcttagccgccacagctatctcgaaccctgcatacaaggctgtcttggattcctcccaaagtaacaatgcttcatgggagtcaatgaaggaaattcttcagacaagaacttcctataaaaatgatgtgaaagatcggaaagtggtcctattcctgaatgattgctcttgcgcaaaaaaattctgcaaggaaagggctgcacttgcagtacaaagttgtcttaagagagtcacacttggggattgtgctactgatatctgcattgagcatcagaagcaaataaatttagatggaacatctgaagctgccccaactcttgtaggacatattcaccttgacaaggggcatttagaaaggataaacattagtactcaagacattctccaaaaatgtcaagaagtttctgggagatttggaaagaagaaaggacacctttgccacatctttaaaaaaattacttttgctacttgtgattgttcattcactcagatgccaatcgatggaaagctacataaggttccatgtgtgcagtttgctttttctgatgacattgtactatccgagtctattgagagagcagtgaatgtgatagctgactctgtctgctcagtgcttttagatacaattattaaaggtgatcctcgaattcaagcggcaaaagttatctgggttgaatcagatgcagcatcttgggtaaaacacacacggaaggtatcaaagggcgagtcagcattagaaatcattgttgaaaaagatgatgctgtaagcaatggtgatgcctggagaacagcaattgatgcctgcttacctgtacttaacctcattgacacacggaggtctattccatatggcattcaacaattttgactgcagtgatacggtgataccccaaggacacttattccccacccaaggacttctggggattggtagatctttccttgtttaggcggctttcaacgactgtaaaaatggttaataaaggagttcttaaagaccatttgatacttgtggcaaacagcatgacatgcactggaaatttgattgggttcaacattgctggctacaaggcaactttccgttcattaaaagttcaagtgcctttcaccgagtccactttgtttacccctatgaaatgctttgagaaggctgcagaaaaatgtgattctgattcattgggatgtgtggtctcatcgtccgcatggggcaagcatgcagcagttggtactgggtcatcttttcaaattctctggaatgaaaatcagctgaaaagcaacaaggagtatggggatgggttgtacgatttcttagcattggtcaggactgaccaagaaaagacagactacatgttcttggacgatgttgactatcttgtagaggagaatgcagcagatgacatgtgcttatctcctgagccagatgggacccttggtaagcctacctttgaggataattttgaagagcaaaatattcagaaaggcagctcatgggaaattggcataacaacgaactcaagttgggaacagaatgctagtgttgcgaatgattctggtgactggggaggctggagtagtggaggtggagctgctgcaaagccagcagatcaagataattcatgggaagtgcatgctaaggtgcaggacaattccaccactgattggggaggctggagcgttgagaagccaacaggtgaggcaactgtatctggagaaccagctgaaacagatacttgggctgataagggtgctaaaatggaatcagatgcaggtgatggtaattgggaaaagtccagcactcctgaggcatcaaagaaaaatgactcatcagaaaatacatgggacaaaagaaaaggagatggaggtgatggtgcgtgggggaacaggtctgatgatggccatggcaattgggagcatcccagcaattggaatgggcagagtttggatgtagatcaggacacatggggaaacgccaggggaaaaaagaaggcagatggtaactactgtcaatgggaggagcagccaagcaattacaaacagaagaagacaaatgctgatcatgattcctcctataacaatgtgatgccgtcatcagaaattgcttggaatgctggagatggaactggaagaccaaatgccaagtctaatgcagaatccagttggggtgaggaagataagatggagtctgacgatcatccgaaagtcccaaaagaatcagacacatggaatacagggagatcaaatgaaagtccatgggataacactgatgcactgcaggattcctgggttaagagcgcagctcgcaataacaacactcaggatggttcatgggataaagtagtatctatgaaggatcttgattcactccaagattcatggagtaaggcgacaatccagacgaatgatgcacagaatgattcttgggacaatgtggcaaaaaatgccccggattctgccgcagaagactcctggggggctgcaacaccagcggagacaactgattctggtaacaaggagtggaaatcagatggatggggggcaaagtctggtaactggagcagccaaagaaataatcctgggagacccccaaggagaccagatgagaggggtccacctccaccaagacaacggttcgaactaacagttgcggagaagaacattcttctagaagttgaacctattaaattacgtgtgagaagcatcttccgtgaagcatgtgacggtgttagacttaatccagaagacgagaagtttatcctggagaaagttcttgagcaccacccggaaaagcaatccaaggtgtctggtgaaatcgactacctaacggtcaacaagcaccagactttccaggacactcggtgctttttcgtggtctccacagatggatcccaggcagatttctcctacctgaagtgcctggagaactttgtgaggaagagctacacggaggacgccgacacattctgcatgaagtacttaaggccccgtcgcaggcaggcaccaccagctgatgttgggacagcatcaggcgccccggatgaggttccaccgtcaaccgcagctgagacagagcaaggcactcctccagcccctcaggcagaggttccacaagagacttggggttctcccgcagtgcctctggaaggaggaactcacatcgccggaccagactcaacaggcgacgctgtgatcctaggggagcagcacgatctgactccggcttctccagctgtggcaccacaagtggcttctgagccagacacaaccgacggcacggggcttctaggaaaggctccgcaagctgactggggacccagattcgacgctgactgatatttaggctgtgtgaagctgccgcatgtaaaagccagacctgtgctctgagcaagggagcattcccttgctaagtcgtcagttaactccccttgacttcatctggagaggtggacaggtagtagcggcaaacattctagcccttagcggccgcttgctcgtcctcgtccgtttcgtctcgccctgatgggaaccatgtaaatccttgggaacaaagctaccccctgctgcctttaccgtatctagttggaccttccccactgttggaatctgtgagtccgtctgctgttaaatttttgatggtttctgggctgtggcttgccagcggtgatgccaaactctggaaacctagggatttgtttggtgcggtcgtttggttgtcaggtcgatcagcaaatgtatgcctttgtcctccagatatgtgcttgttgagctagtagatagtgttacattgcgtgcctttgttcaatggaagcccagtttgagatggagcacgtgttcgaaaatactcggtatcacttatgagcgtaaatgcgaa

SEQ ID NO: 212017 - DNA, 6633 bp, Zea Mays
ctcacgggcacggcgcctctcatttcgtgacggagcaccggtgcgcctcgtcctcggctgaccggtcgtcgtccagttccacctccctgtcctgtctcctcccctcccctccctcctttctcacacgcgtacagtgaacttctcctcgtgttctccgaggcggagcaaaaccctcccttccccgcgctagggttttagcgcggccgcgacgggaggatcacggcggcccaaggagacggctagacggtcggtggacgccgccgagacgtggggcggcgccgtcgcgtattgaaatggaggaggatcactcggtgatactaatatctgaaggtgctattaaaagcatcaaacttagcctctctaccggagaagagatatgcacatactccataaacgagtgcccagtgacccatcctagccagcttggaaatccgttccttgggttgccacttgaagctgggaagtgtgaatcctgtggtgcctctgaaaatgacaaatgcgaaggccattttgggtacattgaactacctgtacccatataccatccatgtcatgtcactgaactgaggcaactattgagcttgatatgtctgaagtgccttcgaatcaagaaagggaaggtgaaacaaagtaatggaaaaggaaacgcggcaccaactttgtgctcttattgcagggatattccagccctgtctttgaaggaaatcaagacaacagatggtgcaattcgtttagagttgagagcacctcataataaacacatgacagaacgttcatggaactttcttgataaatatggatttcatcatggtggatgttctcaccataggacactgcttccagaagaggctctaaatatattgaagaaggttcctgatgatactaggagaaagctagctgcacggggatacattgttcagactgggtatgtgatgaagtaccttccagtacctccgaactgtctatatattccagagttcaccgatgggcagagcattatgtcatatgacatttcaatagctctgttgaagaaggttcttcagaaaatagaacagattaaaagatcaagatctggttccccaaactttgaatcacatgatgctgaatcatgtgatttgcagcttgcgattggccagtacatacgtctaaggggcactacaaggtagggccctcaagacaacaccaagcggtttactgttggcagtgctgattcagctgcattgtcaacaaaacagtggttagaaaagatgcggacactgtttatcagcaaagggtcaggtttttcatctcgcagcgttctgacaggagatccatatattgggctaggtgttgtagggcttccttctgaagttgcaaagagaatgacattcgaagagcaggtaactgacataaacattaacagattgcaagacgtggtagacaagggactctgtttgacctacagagatggtcaagctacatatgccatcactgttggatcaaaagggtacacaacacttaaagttggtcagactatcagtcggaggatagttgatggggatgttgtgtttcttaacaggccacccagcacacataagcattctctccaagctttctacgcatatgtgcatgatgaccatacagtcaaaatcaatcctctcatgtgtggccccttttctgctgactttgacggggattgcgtacacatatattatccacaatcgcttgctgcaaaagctgaagccttggagctttttagtgttgagaggcaactcattagttcgcacagtgggaaggttaatctccagctaggtaacgactccttggtagctatgaaggctatgtctcatacaaccatgttacacaaggaattagcaaaccagttggcaatgtttgtgccattttcacttcttgctcctgctgtaatcaagccagttccatcttggacaatatcacagatagtgcaaggtgcatttccagctaacctgacttgccaaggggacacacacttggttagggacagcacaatcataaggctggaccttggcaaagaatctgttcaggactcattccctgatttggtgtcctccatccttcgtgagaagggtccaaaagaagctctgcaatttctgaatgtgttggagccattgttgatggagtttttacttcttgacggtttgagtataagtctgcgggattttaatgttcccaaggctttattggaggaagcacaaaaggacattcgaaatcagtcccttattcttgagcagtctaggtgctctacaagtcaattcgtagaattccgagtcgaaaacaatttgaaaaatgtcaaacagcagatttcagattctgttgggaaattctctgaccttggtctgctgattgatccgaaaaaggaagcctcaatgtcaaaagtagttcaacaagttggttttgttggcttgcaactgtatcgtgaaggcaagttgtattcaagacgcttggtagaggactgcttcacaaactttgttaataaacacttggccattggagatgagtatcctccagaagcgtatggtcttgtccaaagttcatattttcatggtctcaatccttatgaagagttgatacatgctatatccactagagaagctatgatccgctcctctagaggtctgtcagaacctggaactttgttcaagaatttaatggccatcttgagggatgtagttatatgttatgatggaactgtgagaaacatttgtagcaattctatcattcaacttaagtatggggaagatgatgaaactgattcttcaagtgttgtacctcctggtgaacctgtgggtgtcttagccgccacagctatctcgaaccctgcatacaaggctgtcttggattcctcccaaagtaacaatgcttcatgggagtcaatgaaggaaattcttcagacaagaacttcctataaaaatgatgtgaaagatcggaaagtggtcctattcctgaatgattgctcttgcgcaaaaaaattctgcaaggaaagggctgcacttgcagtacaaagttgtcttaagagagtcacacttggggattgtgctactgatatctgcattgagcatcagaagcaaataaatttagatggaacatctgaagctgccccaactcttgtaggacatattcaccttgacaaggggcatttagaaaggataaacattagtactcaagacattctccaaaaatgtcaagaagtttctgggagatttggaaagaagaaaggacacctttgccacatctttaaaaaaattacttttgctacttgtgattgttcattcactcagatgccaatcgatggaaagctacataaggttccatgtgtgcagtttgctttttctgatgacattgtactatccgagtctattgagagagcagtgaatgtgatagctgactctgtctgctcagtgcttttagatacaattattaaaggtgatcctcgaattcaagcggcaaaagttatctgggttgaatcagatgcagcatcttgggtaaaacacacacggaaggtatcaaagggcgagtcagcattagaaatcattgttgaaaaagatgatgctgtaagcaatggtgatgcctggagaacagcaattgatgcctgcttacctgtacttaacctcattgacacacggaggtctattccatatggcattcaacaagtgagggaacttattggcatctcatgtgccttcgatcaagtggtgcagcggctttcaacgactgtaaaaatggttaataaaggagttcttaaagaccatttgatacttgtggcaaacagcatgacatgcactggaaatttgattgggttcaacattgctggctacaaggcaactttccgttcattaaaagttcaagtgcctttcaccgagtccactttgtttacccctatgaaatgctttgagaaggctgcagaaaaatgtgattctgattcattgggatgtgtggtctcatcgtccgcatggggcaagcatgcagcagttggtactgggtcatcttttcaaattctctggaatgaaaatcagctgaaaagcaacaaggagtatggggatgggttgtacgatttcttagcattggtcaggactgaccaagaaaagacagactacatgttcttggacgatgttgactatcttgtagaggagaatgcagcagatgacatgtgcttatctcctgagccagatgggacccttggtaagcctacctttgaggataattttgaagagcaaaatattcagaaaggcagctcatgggaaattggcataacaacgaactcaagttgggaacagaatgctagtgttgcgaatgattctggtgactggggaggctggagtagtggaggtggagctgctgcaaagccagcagatcaagataattcatgggaagtgcatgctaaggtgcaggacaattccaccactgattggggaggctggagcgttgagaagccaacaggtgaggcaactgtatctggagaaccagctgaaacagatacttgggctgataagggtgctaaaatggaatcagatgcaggtgatggtaattgggaaaagtccagcactcctgaggcatcaaagaaaaatgactcatcagaaaatacatgggacaaaagaaaaggagatggaggtgatggtgcgtgggggaacaggtctgatgatggccatggcaattgggagcatcccagcaattggaatgggcagagtttggatgtagatcaggacacatggggaaacgccaggggaaaaaagaaggcagatggtaactactgtcaatgggaggagcagccaagcaattacaaacagaagaagacaaatgctgatcatgattcctcctataacaatgtgatgccgtcatcagaaattgcttggaatgctggagatggaactggaagaccaaatgccaagtctaatgcagaatccagttggggtgaggaagataagatggagtctgacgatcatccgaaagtcccaaaagaatcagacacatggaatacagggagatcaaatgaaagtccatgggataacactgatgcactgcaggattcctgggttaagagcgcagctcgcaataacaacactcaggatggttcatgggataaagtagtatctatgaaggatcttgattcactccaagattcatggagtaaggcgacaatccagacgaatgatgcacagaatgattcttgggacaatgtggcaaaaaatgccccggattctgccgcagaagactcctggggggctgcaacaccagcggagacaactgattctggtaacaaggagtggaaatcagatggatggggggcaaagtctggtaactggagcagccaaagaaataatcctgggagacccccaaggagaccagatgagaggggtccacctccaccaagacaacggttcgaactaacagttgcggagaagaacattcttctagaagttgaacctattaaattacgtgtgagaagcatcttccgtgaagcatgtgacggtgttagacttaatccagaagacgagaagtttatcctggagaaagttcttgagcaccacccggaaaagcaatccaaggtgtctggtgaaatcgactacctaacggtcaacaagcaccagactttccaggacactcggtgctttttcgtggtctccacagatggatcccaggcagatttctcctacctgaagtgcctggagaactttgtgaggaagagctacacggaggacgccgacacattctgcatgaagtacttaaggccccgtcgcaggcaggcaccaccagctgatgttgggacagcatcaggcgccccggatgaggttccaccgtcaaccgcagctgagacagagcaaggcactcctccagcccctcaggcagaggttccacaagagacttggggttctcccgcagtgcctctggaaggaggaactcacatcgccggaccagactcaacaggcgacgctgtgatcctaggggagcagcacgatctgactccggcttctccagctgtggcaccacaagtggcttctgagccagacacaaccgacggcacggggcttctaggaaaggctccgcaagctgactggggacccagattcgacgctgactgatatttaggctgtgtgaagctgccgcatgtaaaagccagacctgtgctctgagcaagggagcattcccttgctaagtcgtcagttaactccccttgacttcatctggagaggtggacaggtagtagcggcaaacattctagcccttagcggccgcttgctcgtcctcgtccgtttcgtctcgccctgatgggaaccatgtaaatccttgggaacaaagctaccccctgctgcctttaccgtatctagttggaccttccccactgttggaatctgtgagtccgtctgctgttaaatttttgatggtttctgggctgtggcttgccagcggtgatgccaaactctggaaacctagggatttgtttggtgcggtcgtttggttgtcaggtcgatcagcaaatgtatgcctttgtcctccagatatgtgcttgttgagctagtagatagtgttacattgcgtgcctttgttcaatggaagcccagtttgagatggagcacgtgttcgaaaatactcggtatcacttatgagcgtaaatgcgaa

SEQ ID NO: 212018 - DNA, 6536 bp, Zea Mays
ctgtcctgtctcctcccctcccctccctcctttctcacacgcgtacagtgaacttctcctcgtgttctccgaggcggagcaaaaccctcccttccccgcgctagggttttagcgcggccgcgacgggaggatcacggcggcccaaggagacggctagacggtcggtggacgccgccgagacgtggggcggcgccgtcgcgtattggaggatcactcggtgatactaatatctgaaggtgctattaaaagcatcaaacttagcctctctaccggagaagagatatgcacatactccataaacgagtgcccagtgacccatcctagccagcttggaaatccgttccttgggttgccacttgaagctgggaagtgtgaatcctgtggtgcctctgaaaatgacaaatgcgaaggccattttgggtacattgaactacctgtacccatataccatccatgtcatgtcactgaactgaggcaactattgagcttgatatgtctgaagtgccttcgaatcaagaaagggaaggtgaaacaaagtaatggaaaaggaaacgcggcaccaactttgtgctcttattgcagggatattccagccctgtctttgaaggaaatcaagacaacagatggtgcaattcgtttagagttgagagcacctcataataaacacatgacagaacgttcatggaactttcttgataaatatggatttcatcatggtggatgttctcaccataggacactgcttccagaagaggctctaaatatattgaagaaggttcctgatgatactaggagaaagctagctgcacggggatacattgttcagactgggtatgtgatgaagtaccttccagtacctccgaactgtctatatattccagagttcaccgatgggcagagcattatgtcatatgacatttcaatagctctgttgaagaaggttcttcagaaaatagaacagattaaaagatcaagatctggttccccaaactttgaatcacatgatgctgaatcatgtgatttgcagcttgcgattggccagtacatacgtctaaggggcactacaaggggccctcaagacaacaccaagcggtttactgttggcagtgctgattcagctgcattgtcaacaaaacagtggttagaaaagatgcggacactgtttatcagcaaagggtcaggtttttcatctcgcagcgttctgacaggagatccatatattgggctaggtgttgtagggcttccttctgaagttgcaaagagaatgacattcgaagagcaggtaactgacataaacattaacagattgcaagacgtggtagacaagggactctgtttgacctacagagatggtcaagctacatatgccatcactgttggatcaaaagggtacacaacacttaaagttggtcagactatcagtcggaggatagttgatggggatgttgtgtttcttaacaggccacccagcacacataagcattctctccaagctttctacgcatatgtgcatgatgaccatacagtcaaaatcaatcctctcatgtgtggccccttttctgctgactttgacggggattgcgtacacatatattatccacaatcgcttgctgcaaaagctgaagccttggagctttttagtgttgagaggcaactcattagttcgcacagtgggaaggttaatctccagctaggtaacgactccttggtagctatgaaggctatgtctcatacaaccatgttacacaaggaattagcaaaccagttggcaatgtttgtgccattttcacttcttgctcctgctgtaatcaagccagttccatcttggacaatatcacagatagtgcaaggtgcatttccagctaacctgacttgccaaggggacacacacttggttagggacagcacaatcataaggctggaccttggcaaagaatctgttcaggactcattccctgatttggtgtcctccatccttcgtgagaagggtccaaaagaagctctgcaatttctgaatgtgttggagccattgttgatggagtttttacttcttgacggtttgagtataagtctgcgggattttaatgttcccaaggctttattggaggaagcacaaaaggacattcgaaatcagtcccttattcttgagcagtctaggtgctctacaagtcaattcgtagaattccgagtcgaaaacaatttgaaaaatgtcaaacagcagatttcagattctgttgggaaattctctgaccttggtctgctgattgatccgaaaaaggaagcctcaatgtcaaaagtagttcaacaagttggttttgttggcttgcaactgtatcgtgaaggcaagttgtattcaagacgcttggtagaggactgcttcacaaactttgttaataaacacttggccattggagatgagtatcctccagaagcgtatggtcttgtccaaagttcatattttcatggtctcaatccttatgaagagttgatacatgctatatccactagagaagctatgatccgctcctctagaggtctgtcagaacctggaactttgttcaagaatttaatggccatcttgagggatgtagttatatgttatgatggaactgtgagaaacatttgtagcaattctatcattcaacttaagtatggggaagatgatgaaactgattcttcaagtgttgtacctcctggtgaacctgtgggtgtcttagccgccacagctatctcgaaccctgcatacaaggctgtcttggattcctcccaaagtaacaatgcttcatgggagtcaatgaaggaaattcttcagacaagaacttcctataaaaatgatgtgaaagatcggaaagtggtcctattcctgaatgattgctcttgcgcaaaaaaattctgcaaggaaagggctgcacttgcagtacaaagttgtcttaagagagtcacacttggggattgtgctactgatatctgcattgagcatcagaagcaaataaatttagatggaacatctgaagctgccccaactcttgtaggacatattcaccttgacaaggggcatttagaaaggataaacattagtactcaagacattctccaaaaatgtcaagaagtttctgggagatttggaaagaagaaaggacacctttgccacatctttaaaaaaattacttttgctacttgtgattgttcattcactcagatgccaatcgatggaaagctacataaggttccatgtgtgcagtttgctttttctgatgacattgtactatccgagtctattgagagagcagtgaatgtgatagctgactctgtctgctcagtgcttttagatacaattattaaaggtgatcctcgaattcaagcggcaaaagttatctgggttgaatcagatgcagcatcttgggtaaaacacacacggaaggtatcaaagggcgagtcagcattagaaatcattgttgaaaaagatgatgctgtaagcaatggtgatgcctggagaacagcaattgatgcctgcttacctgtacttaacctcattgacacacggaggtctattccatatggcattcaacaagtgagggaacttattggcatctcatgtgccttcgatcaagtggtgcagcggctttcaacgactgtaaaaatggttaataaaggagttcttaaagaccatttgatacttgtggcaaacagcatgacatgcactggaaatttgattgggttcaacattgctggctacaaggcaactttccgttcattaaaagttcaagtgcctttcaccgagtccactttgtttacccctatgaaatgctttgagaaggctgcagaaaaatgtgattctgattcattgggatgtgtggtctcatcgtccgcatggggcaagcatgcagcagttggtactgggtcatcttttcaaattctctggaatgaaaatcagctgaaaagcaacaaggagtatggggatgggttgtacgatttcttagcattggtcaggactgaccaagaaaagacagactacatgttcttggacgatgttgactatcttgtagaggagaatgcagcagatgacatgtgcttatctcctgagccagatgggacccttggtaagcctacctttgaggataattttgaagagcaaaatattcagaaaggcagctcatgggaaattggcataacaacgaactcaagttgggaacagaatgctagtgttgcgaatgattctggtgactggggaggctggagtagtggaggtggagctgctgcaaagccagcagatcaagataattcatgggaagtgcatgctaaggtgcaggacaattccaccactgattggggaggctggagcgttgagaagccaacaggtgaggcaactgtatctggagaaccagctgaaacagatacttgggctgataagggtgctaaaatggaatcagatgcaggtgatggtaattgggaaaagtccagcactcctgaggcatcaaagaaaaatgactcatcagaaaatacatgggacaaaagaaaaggagatggaggtgatggtgcgtgggggaacaggtctgatgatggccatggcaattgggagcatcccagcaattggaatgggcagagtttggatgtagatcaggacacatggggaaacgccaggggaaaaaagaaggcagatggtaactactgtcaatgggaggagcagccaagcaattacaaacagaagaagacaaatgctgatcatgattcctcctataacaatgtgatgccgtcatcagaaattgcttggaatgctggagatggaactggaagaccaaatgccaagtctaatgcagaatccagttggggtgaggaagataagatggagtctgacgatcatccgaaagtcccaaaagaatcagacacatggaatacagggagatcaaatgaaagtccatgggataacactgatgcactgcaggattcctgggttaagagcgcagctcgcaataacaacactcaggatggttcatgggataaagtagtatctatgaaggatcttgattcactccaagattcatggagtaaggcgacaatccagacgaatgatgcacagaatgattcttgggacaatgtggcaaaaaatgccccggattctgccgcagaagactcctggggggctgcaacaccagcggagacaactgattctggtaacaaggagtggaaatcagatggatggggggcaaagtctggtaactggagcagccaaagaaataatcctgggagacccccaaggagaccagatgagaggggtccacctccaccaagacaacggttcgaactaacagttgcggagaagaacattcttctagaagttgaacctattaaattacgtgtgagaagcatcttccgtgaagcatgtgacggtgttagacttaatccagaagacgagaagtttatcctggagaaagttcttgagcaccacccggaaaagcaatccaaggtgtctggtgaaatcgactacctaacggtcaacaagcaccagactttccaggacactcggtgctttttcgtggtctccacagatggatcccaggcagatttctcctacctgaagtgcctggagaactttgtgaggaagagctacacggaggacgccgacacattctgcatgaagtacttaaggccccgtcgcaggcaggcaccaccagctgatgttgggacagcatcaggcgccccggatgaggttccaccgtcaaccgcagctgagacagagcaaggcactcctccagcccctcaggcagaggttccacaagagacttggggttctcccgcagtgcctctggaaggaggaactcacatcgccggaccagactcaacaggcgacgctgtgatcctaggggagcagcacgatctgactccggcttctccagctgtggcaccacaagtggcttctgagccagacacaaccgacggcacggggcttctaggaaaggctccgcaagctgactggggacccagattcgacgctgactgatatttaggctgtgtgaagctgccgcatgtaaaagccagacctgtgctctgagcaagggagcattcccttgctaagtcgtcagttaactccccttgacttcatctggagaggtggacaggtagtagcggcaaacattctagcccttagcggccgcttgctcgtcctcgtccgtttcgtctcgccctgatgggaaccatgtaaatccttgggaacaaagctaccccctgctgcctttaccgtatctagttggaccttccccactgttggaatctgtgagtccgtctgctgttaaatttttgatggtttctgggctgtggcttgccagcggtgatgccaaactctggaaacctagggatttgtttggtgcggtcgtttggttgtcaggtcgatcagcaaatgtatgcctttgtcctccagatatgtgcttgttgagctagtagatagtgttacattgcgtgcctttgttcaatggaagcccagtttgagatggagcacgtgttcgaaaatactcggtatcacttatgagcgtaaatgcgaa

SEQ ID NO: 212019 - DNA, 1398 bp, Zea Mays
aagtctcagtgcgctctgcctcgccacttcgccagtcgtcactcgtcaccaccgtcccgcccccgcgccgtcccacccttgctcccactcgttgcgccgcgccgcgcgatgcaggcccgcgtcgtcgtcttccccgtcaagggccgcgcctggtgcttcgccctcccgcgcgcctccgccgcagcgcccgctgctgatggcgccctcccgcgcccgaccctgagggacctctggcgcggcatctcctccgggtcccgcacggcgccggagaaggccgaggcggtcgtcgacttcgtcgctgacaagatgaacagggcgtgggtcgggttcgggagcgcgccggaggggtcgatgaagagccggatccacagcttcgggctgaagctgctgtcccgggtgaggccgtcggaggtgctcctgaagtccgtcaccaaggacgtgagcgcgctcgagatcgtgcatccggcgagcataaattctcgtcttgtgcgtcgacgtttgcggcatattgctgttaggggtgcatcagttcacaagaaatttctgtatggctcggtactaccgttaccaaacattccattcttttgggtgctatttcgtgcttattctcattggagagctctacagggaagtgagaggctcgagttactagtttctgactgctcagataagtggaaagttcttgaggagaagattaattcagtaaaggatggcaaacccagtgaaaatgcaaggaattctccttggaagctgcggccatcagaaaagcttgacaggtttcttgagggtagaaacttggatgaaggtttggattgtgataccattttgagtatatgccaggagtacgatttggacaagatcgatgttctcaagtacagggatcttctgtagccacatccagattgtttctctgaggtttatacgtttaaattcttctgctagtgagatcaagatgaagggtacaagagttgcatgaacccactaaccattggcggtcaaatgagttcttttaaatagcttcagattttcttgttatgtaccaaaccggtctgccactagtgcaatgatctcagaaacaaagaggacatcttatgaaactatagaagcccagggcagttgttcccaccgtgcaaatagagattgctagctgccaactttcccccgtcagccatcacaaattttagttgggatcaatgaacgacaaatgcaaagagcagggttgaaaattgagattggccatccgtacatgcttctctctctctctctctctctctctcttgtttgtggctctcaatctatctttggttgtatttgaatcttgtactgggatccaatgcatagccttctcgatctggagggattctagagctttgatctctcaggtgcctttttctgcac

SEQ ID NO: 212020 - DNA, 1341 bp, Zea Mays
gtttcagatccaaccgcacggtgtttcgctactgttcttacggtgccacggagttggcaactgcaaggagtgatattgtggtacaacactagttctaattgaagtaataaggcgggggtgaaactgtctgctaccattgcttccatggcaactaatgagaacctcccgccaaatgtcatcaagcaattggctaaagaactgaagaaccttgatgagtcacctccagaagggattaatgtgattgtcaatgatgatgacttcactactatttttgctgacattgaaggccctgctggaactccatatgagaacggagtattcaggatgaagctattattgtcacgcgatttccctcaatctcccccaaaagggttcttcttgactaaaattttccatcctaacatagctactagtggtgagatatgtgtaaacacactgaagaaggattggaatcctggccttggattaagacatgttcttctggttgtgagatgccttctgattgaaccatttcctgaatctgcacttaatgaacaagctgggaagatgttacttgaaaattatgaggaatatgcacgacatgcaaggttatacactggcatccatgcccttaaacctaagaatacgtccaagaccggagctatatctgagtcaaccacagctctgaatgtcgacaagtcaagtactgcctctagcaagaacacaccatcgatgccaccggcggtatctacctccagtgcatccagagcatttggtacgagtttgcaggatcagaaccccactgtttctgatcctgctgtaggagctgcggcggcacgaaagaaggatggcccaatggcttccaaagttcctgtggataagaaaaggctggatgcgcggaagaagagcttgaagagattataggcggaacgtcctgggaagaagagagagggtttagagttcagaatttttatcggaaactcagcagatgcttatttaagctgggagacaaacaattaggggaggagaggcatctgatgacctggctttcgggagaagggggtccggggcggggccaaaggtgaataatgtgaagcaactgagtccttcgggacaactgtatgtgcaatgcccaatcatttggaagaacacttgcctatttctttttgttgtctctccttgtctgcattcaatcagcatgcatgcctgccatttgcgagcaatccgctgccatcgttcttcatggagtacacaagctatgaattgaaaagatgtgaccttcaaaatttctttaacttgtggcgcagagatcaattaaactaacagggcatttggatctcttcattttagatgaattgaaat

SEQ ID NO: 212021 - DNA, 2348 bp, Zea Mays
ggccgctgctgcccgtgcgcgcaccggccgccccacctccatcttcccatggtggtggtgtcatcccccttcctcttcctcccctcgtgcaagtgcaaccacccacccgctctcccaccgccctcctcgcctatccctgccgccactgcggccgtcgatgagccccatgcccaccgcgccgtacacctccgcgacctcgctgctgctgggcagccgcaggctcccgcggttccagttccagtccctccgcacccccaccaagccccccttccgccgcccggcctcctcttcgtccacacctctccctcgatgccgcgccagcgcgaccccccgccctctggcccccgtctgcgcttccgccctcgcgctgcccgtgtcggtggcggccgctcccccaccgcaggtggacggtggctgggtgggagggacggcagcagccgtgaggagagtagctgtggcggttgcgtgcggggctctcgcggcggcgtggtgccgccgggcgatggctgtgggggctgccgcggcggcgggagccggggccggggcgccggggacggtggaggctgctgcagggattggatggatggcgctgcgcgggggctggcccagggtgctacagattctgcagctgctcagggagcacggcttgattctggccgcgctgcttagcctctctgcgttcttctccatggcagaaacttctatcacgacgctttggccttggaaggttcgtgaactagctgagaaggaacctgagaatggtgttttcaaaatgctccgaagtgacgtcacccgtttcttgaccaccattctcattggcacaacagtggtcaacattggtgcaacagcaattgttactgaggcagcaacagcaatgttcggtgaagcaggcgttagtgcagcaacaggtgtcatgacagttgccatcttacttcttacagaaatcactcccaaaagtgttgcagtccataatgccaccgaggtcgctaggtttgtggtaagaccggtcgcatggctttcactgatcctctatccagttgggcggattgttacttttctgtcaatggggatgctaaagattctaggcctgaaagggagaagtgaaccatatgttactgaagatgaactgaagttaatgttacgaggagcagagttgagtggtgcaattgcagaagatgaacaggatatgatcgagaatgtcctggaaattaaagatacacatgtgagggaagtaatgacgcctttggtggacgtagtagcaattgatgctatcgcaacacttattgatttcaaaaacttgtgggaaactcatcagtactctagagttcctgtatttgaggagcgcatagataatattgttggaattgcttatgcaatggacatgcttgaatatgttgaagaggttgagaaattgaatgcaatcactgtgaaggaaatcgcacatatgcctacatactttgttccagattcaatgtctgtttggaacctattaagagagttccggatcaggcaggttcatatggcagtggtcctcaatgaatatggtggaactattggtatttaacattagaagacgtagtggaagaaatagttggtgaaatcttcgatgagaatgattccaaggaggaaatccagaagaaaacaggctatatagtaaggcggggggatggaacatttgatgttgatgcaaacacatcgatagatcacctatctgaagagcttggtatcaaaataccagagggacatcagtatgagacggtgtctggttttgtctgtgcatcttttggctatattccagaagaaggtgggaaaatgcttgtgattcttgaaaagaatttcagagaagaaaacggtgaatatcaggaggaaggtcctgatcgccaagatgatagagaaaaaactcaagcttatgaactcgagatagtggaagctaatgcaaggaaggtgggcaaagttctattcaagccaataagcagtgaatgtgttgatgtcgacaacaagggtgtgaaccgcctcatttccaagaagatcatcaagcggaagaagaaaggctctgatgattcctccaatgatgacgagtgtccagacgtaacagagaatggttgccctgcagagttactctcatactcggatgataacagtgccttgttggaagatgcaagcagttctagtgccaaaagatgacaagaaaggaactgcaagaccatcgtactactggtgaacacagccgatgcaccgtcaaagacctctgtcatccgatacgtcggacagtaattgagatattcgtagcaaatgatgcttgactaccagaagagaaaactagtcttcgttgcttgccgcatcttggg

SEQ ID NO: 212022 - DNA, 2910 bp, Zea Mays
ggccgccccacctccatcttcccatggtggtggtgtcatcccccttcctcttcctcccctcgtgcaagtgcaaccacccacccgctctcccaccgccctcctcgcctatccctgccgccactgcggccgtcgatgagccccatgcccaccgcgccgtacacctccgcgacctcgctgctgctgggcagccgcaggctcccgcggttccagttccagtccctccgcacccccaccaagccccccttccgccgcccggcctcctcttcgtccacacctctccctcgatgccgcgccagcgcgaccccccgccctctggcccccgtctgcgcttccgccctcgcgctgcccgtgtcggtggcggccgctcccccaccgcaggtggacggtggctgggtgggagggacggcagcagccgtgaggagagtagctgtggcggttgcgtgcggggctctcgcggcggcgtggtgccgccgggcgatggctgtgggggctgccgcggcggcgggagccggggccggggcgccggggacggtggaggctgctgcagggattggatggatggcgctgcgcgggggctggcccagggtgctacagattctgcagctgctcagggagcacggcttgattctggccgcgctgcttagcctctctgcgttcttctccatggcagaaacttctatcacgacgctttggccttggaaggttcgtgaactagctgagaaggaacctgagaatggtgttttcaaaatgctccgaagtgacgtcacccgtttcttgaccaccattctcattggcacaacagtggtcaacattggtgcaacagcaattgttactgaggcagcaacagcaatgttcggtgaagcaggcgttagtgcagcaacaggtgtcatgacagttgccatcttacttcttacagaaatcactcccaaaagtgttgcagtccataatgccaccgaggtcgctaggtttgtgaccggtcgcatggctttcactgatcctctatccagttgggcggattgttacttttctgtcaatggggatgctaaagattctaggcctgaaagggagaagtgaaccatatgttactgaagatgaactgaagttaatgttacgaggagcagagttgagtggtgcaattgcagaagatgaacaggatatgatcgagaatgtcctggaaattaaagatacacatgtgagggaagtaatgacgcctttggtggacgtagtagcaattgatgctatcgcaacacttattgatttcaaaaacttgtgggaaactcatcagtactctagagttcctgtatttgaggagcgcatagataatattgttggaattgcttatgcaatggacatgcttgaatatgttgaagaggttgagaaattgaatgcaatcactgtgaaggaaatcgcacatatgcctacatactttgttccagattcaatgtctgtttggaacctattaagagagttccggatcaggcaggttcatatggcagtggtcctcaatgaatatggtggaactattggtatttaacattagaagacgtagtggaagaaatagttggtgaaatcttcgatgagaatgattccaaggaggaaatccagaagaaaacaggctatatagtaaggcggggggatggaacatttgatgttgatgcaaacacatcgatagatcacctatctgaagagcttggtatcaaaataccagagggacatcagtatgagacggtgtctggttttgtctgtgcatcttttggctatattccagaagaaggtgggaaaatgcttgtgattcttgaaaagaatttcagagaagaaaacggtgaatatcaggaggaaggtcctgatcgccaagatgatagagaaaaaactcaagcttatgaactcgagatagtggaagctaatgcaaggaaggtgggcaaagttctattcaagccaataagcagtgaatgtgttgatgtcgacaacaagggtgtgaaccgcctcatttccaagaagatcatcaagcggaagaagaaaggctctgatgattcctccaatgatgacgagtgtccagacgtaacagagaatggttgccctgcagagttactctcatactcggatgataacagtgccttgttggaagatgcaagcagttctagtgccaaaagatgacaagaaaggaactgcaagaccatcgtactactggtaataattacagcacaccgtcacccctcctaataccccttgttacaacagaagaagagaacatagtagtaggctaccaaaaaaaaaactgcgagagcaacaccaagtggttaacagaagtttatagggcattggaacatttttttagtagcagtagcagtctagaggtgcagcgaggtgtcgacgtcgacttcaccagagacatgtttgtagttgtaagtcttactgggccacagctccaccgtgatggggtcgttatcgccgtggagctggaagcttttgcattcacaggccgggaataaggaggcggcagcggtgtcccgcagtggcctgcacgggtagagcagctccggatggaagaaccacttcacgggcatctccctcggggaggtggtggccacagggcgcggggcgagcacgtggagtagcctctcctcccgcttctccctgatcctctccagctccctgaacctctgctgcagcagggcgatggaggagaacatcatctggccctcgctgctctgtacccccatgatgaacaaaaactcctcgttttcagttgatgtgtgtgtgtgtgtgtatctcagccagcgtctgtctacttcgctcgctcgctgtgtggggttttgctgcttgaggtggtggtggtcttgggcatgcgcctacttataagctgcaaagttttgtcacggcgcagggcgtcgtcttgtggtcgtcttgcaa

SEQ ID NO: 212023 - DNA, 2649 bp, Zea Mays
ggccgctgctgcccgtgcgcgcaccggccgccccacctccatcttcccatggtggtggtgtcatcccccttcctcttcctcccctcgtgcaagtgcaaccacccacccgctctcccaccgccctcctcgcctatccctgccgccactgcggccgtcgatgagccccatgcccaccgcgccgtacacctccgcgacctcgctgctgctgggcagccgcaggctcccgcggttccagttccagtccctccgcacccccaccaagccccccttccgccgcccggcctcctcttcgtccacacctctccctcgatgccgcgccagcgcgaccccccgccctctggcccccgtctgcgcttccgccctcgcgctgcccgtgtcggtggcggccgctcccccaccgcaggtggacggtggctgggtgggagggacggcagcagccgtgaggagagtagctgtggcggttgcgtgcggggctctcgcggcggcgtggtgccgccgggcgatggctgtgggggctgccgcggcggcgggagccggggccggggcgccggggacggtggaggctgctgcagggattggatggatggcgctgcgcgggggctggcccagggtgctacagattctgcagctgctcagggagcacggcttgattctggccgcgctgcttagcctctctgcgttcttctccatggcagaaacttctatcacgacgctttggccttggaaggttcgtgaactagctgagaaggaacctgagaatggtgttttcaaaatgctccgaagtgacgtcacccgtttcttgaccaccattctcattggcacaacagtggtcaacattggtgcaacagcaattgttactgaggcagcaacagcaatgttcggtgaagcaggcgttagtgcagcaacaggtgtcatgacagttgccatcttacttcttacagaaatcactcccaaaagtgttgcagtccataatgccaccgaggtcgctaggtttgtggtaagaccggtcgcatggctttcactgatcctctatccagttgggcggattgttacttttctgtcaatggggatgctaaagattctaggcctgaaagggagaagtgaaccatatgttactgaagatgaactgaagttaatgttacgaggagcagagttgagtggtgcaattgcagaagatgaacaggatatgatcgagaatgtcctggaaattaaagatacacatgtgagggaagtaatgacgcctttggtggacgtagtagcaattgatgctatcgcaacacttattgatttcaaaaacttgtgggaaactcatcagtactctagagttcctgtatttgaggagcgcatagataatattgttggaattgcttatgcaatggacatgcttgaatatgttgaagaggttgagaaattgaatgcaatcactgtgaaggaaatcgcacatatgcctacatactttgttccagattcaatgtctgtttggaacctattaagagagttccggatcaggcaggttcatatggcagtggtcctcaatgaatatggtggaactattggtatttaacattagaagacgtagtggaagaaatagttggtgaaatcttcgatgagaatgattccaaggaggaaatccagaagaaaacaggctatatagtaaggcggggggatggaacatttgatgttgatgcaaacacatcgatagatcacctatctgaagagcttggtatcaaaataccagagggacatcagtatgagacggtgtctggttttgtctgtgcatcttttggctatattccagaagaaggtgggaaaatgcttgtgattcttgaaaagaatttcagagaagaaaacggtgaatatcaggaggaaggtcctgatcgccaagatgatagagaaaaaactcaagcttatgaactcgagatagtggaagctaatgcaaggaaggtgggcaaagttctattcaagccaataagcagtgaatgtgttgatgtcgacaacaagggtgtgaaccgcctcatttccaagaagatcatcaagcggaagaagaaaggctctgatgattcctccaatgatgacgagtgtccagacgtaacagagaatggttgccctgcagagttactctcatactcggatgataacagtgccttgttggaagatgcaagcagttctagtgccaaaagatgacaagaaaggaactgcaagaccatcgtactactggccgggaataaggaggcggcagcggtgtcccgcagtggcctgcacgggtagagcagctccggatggaagaaccacttcacgggcatctccctcggggaggtggtggccacagggcgcggggcgagcacgtggagtagcctctcctcccgcttctccctgatcctctccagctccctgaacctctgctgcagcagggcgatggaggagaacatcatctggccctcgctgctctgtacccccatgatgaacaaaaactcctcgttttcagttgatgtgtgtgtgtgtgtgtatctcagccagcgtctgtctacttcgctcgctcgctgtgtggggttttgctgcttgaggtggtggtggtcttgggcatgcgcctacttataagctgcaaagttttgtcacggcgcagggcgtcgtcttgtggtcgtcttgcaa

SEQ ID NO: 212024 - DNA, 2940 bp, Zea Mays
ggccgctgctgcccgtgcgcgcaccggccgccccacctccatcttcccatggtggtggtgtcatcccccttcctcttcctcccctcgtgcaagtgcaaccacccacccgctctcccaccgccctcctcgcctatccctgccgccactgcggccgtcgatgagccccatgcccaccgcgccgtacacctccgcgacctcgctgctgctgggcagccgcaggctcccgcggttccagttccagtccctccgcacccccaccaagccccccttccgccgcccggcctcctcttcgtccacacctctccctcgatgccgcgccagcgcgaccccccgccctctggcccccgtctgcgcttccgccctcgcgctgcccgtgtcggtggcggccgctcccccaccgcaggtggacggtggctgggtgggagggacggcagcagccgtgaggagagtagctgtggcggttgcgtgcggggctctcgcggcggcgtggtgccgccgggcgatggctgtgggggctgccgcggcggcgggagccggggccggggcgccggggacggtggaggctgctgcagggattggatggatggcgctgcgcgggggctggcccagggtgctacagattctgcagctgctcagggagcacggcttgattctggccgcgctgcttagcctctctgcgttcttctccatggcagaaacttctatcacgacgctttggccttggaaggttcgtgaactagctgagaaggaacctgagaatggtgttttcaaaatgctccgaagtgacgtcacccgtttcttgaccaccattctcattggcacaacagtggtcaacattggtgcaacagcaattgttactgaggcagcaacagcaatgttcggtgaagcaggcgttagtgcagcaacaggtgtcatgacagttgccatcttacttcttacagaaatcactcccaaaagtgttgcagtccataatgccaccgaggtcgctaggtttgtggtaagaccggtcgcatggctttcactgatcctctatccagttgggcggattgttacttttctgtcaatggggatgctaaagattctaggcctgaaagggagaagtgaaccatatgttactgaagatgaactgaagttaatgttacgaggagcagagttgagtggtgcaattgcagaagatgaacaggatatgatcgagaatgtcctggaaattaaagatacacatgtgagggaagtaatgacgcctttggtggacgtagtagcaattgatgctatcgcaacacttattgatttcaaaaacttgtgggaaactcatcagtactctagagttcctgtatttgaggagcgcatagataatattgttggaattgcttatgcaatggacatgcttgaatatgttgaagaggttgagaaattgaatgcaatcactgtgaaggaaatcgcacatatgcctacatactttgttccagattcaatgtctgtttggaacctattaagagagttccggatcaggcaggttcatatggcagtggtcctcaatgaatatggtggaactattggtatttaacattagaagacgtagtggaagaaatagttggtgaaatcttcgatgagaatgattccaaggaggaaatccagaagaaaacaggctatatagtaaggcggggggatggaacatttgatgttgatgcaaacacatcgatagatcacctatctgaagagcttggtatcaaaataccagagggacatcagtatgagacggtgtctggttttgtctgtgcatcttttggctatattccagaagaaggtgggaaaatgcttgtgattcttgaaaagaatttcagagaagaaaacggtgaatatcaggaggaaggtcctgatcgccaagatgatagagaaaaaactcaagcttatgaactcgagatagtggaagctaatgcaaggaaggtgggcaaagttctattcaagccaataagcagtgaatgtgttgatgtcgacaacaagggtgtgaaccgcctcatttccaagaagatcatcaagcggaagaagaaaggctctgatgattcctccaatgatgacgagtgtccagacgtaacagagaatggttgccctgcagagttactctcatactcggatgataacagtgccttgttggaagatgcaagcagttctagtgccaaaagatgacaagaaaggaactgcaagaccatcgtactactggtaataattacagcacaccgtcacccctcctaataccccttgttacaacagaagaagagaacatagtagtaggctaccaaaaaaaaaactgcgagagcaacaccaagtggttaacagaagtttatagggcattggaacatttttttagtagcagtagcagtctagaggtgcagcgaggtgtcgacgtcgacttcaccagagacatgtttgtagttgtaagtcttactgggccacagctccaccgtgatggggtcgttatcgccgtggagctggaagcttttgcattcacaggccgggaataaggaggcggcagcggtgtcccgcagtggcctgcacgggtagagcagctccggatggaagaaccacttcacgggcatctccctcggggaggtggtggccacagggcgcggggcgagcacgtggagtagcctctcctcccgcttctccctgatcctctccagctccctgaacctctgctgcagcagggcgatggaggagaacatcatctggccctcgctgctctgtacccccatgatgaacaaaaactcctcgttttcagttgatgtgtgtgtgtgtgtgtatctcagccagcgtctgtctacttcgctcgctcgctgtgtggggttttgctgcttgaggtggtggtggtcttgggcatgcgcctacttataagctgcaaagttttgtcacggcgcagggcgtcgtcttgtggtcgtcttgcaa

SEQ ID NO: 212025 - DNA, 1819 bp, Zea Mays
ggccgccccacctccatcttcccatggtggtggtgtcatcccccttcctcttcctcccctcgtgcaagtgcaaccacccacccgctctcccaccgccctcctcgcctatccctgccgccactgcggccgtcgatgagccccatgcccaccgcgccgtacacctccgcgacctcgctgctgctgggcagccgcaggctcccgcggttccagttccagtccctccgcacccccaccaagccccccttccgccgcccggcctcctcttcgtccacacctctccctcgatgccgcgccagcgcgaccccccgccctctggcccccgtctgcgcttccgccctcgcgctgcccgtgtcggtggcggccgctcccccaccgcaggtggacggtggctgggtgggagggacggcagcagccgtgaggagagtagctgtggcggttgcgtgcggggctctcgcggcggcgtggtgccgccgggcgatggctgtgggggctgccgcggcggcgggagccggggccggggcgccggggacggtggaggctgctgcagggattggatggatggcgctgcgcgggggctggcccagggtgctacagattctgcagctgctcagggagcacggcttgattctggccgcgctgcttagcctctctgcgttcttctccatggcagaaacttctatcacgacgctttggccttggaaggttcgtgaactagctgagaaggaacctgagaatggtgttttcaaaatgctccgaagtgacgtcacccgtttcttgaccaccattctcattggcacaacagtggtcaacattggtgcaacagcaattgttactgaggcagcaacagcaatgttcggtgaagcaggcgttagtgcagcaacaggtgtcatgacagttgccatcttacttcttacagaaatcactcccaaaagtgttgcagtccataatgccaccgaggtcgctaggtttgtggtaagaccggtcgcatggctttcactgatcctctatccagttgggcggattgttacttttctgtcaatggggatgctaaagattctaggcctgaaagggagaagtgaaccatatgttactgaagatgaactgaagttaatgttacgaggagcagagttgagtggtgcaattgcagaagatgaacaggatatgatcgagaatgtcctggaaattaaagatacacatgtgagggaagtaatgacgcctttggtggacgtagtagcaattgatgctatcgcaacacttattgatttcaaaaacttgtgggaaactcatcagtactctagagttcctgtatttgaggagcgcatagataatattgttggaattgcttatgcaatggacatgcttgaatatgttgaagaggttgagaaattgaatgcaatcactgtgaaggaaatcgcacatatgcctacatactttgttccagatttaacattagaagacgtagtggaagaaatagttggtgaaatcttcgatgagaatgattccaaggaggaaatccagaagaaaacaggctatatagtaaggcggggggatggaacatttgatgttgatgcaaacacatcgatagatcacctatctgaagagcttggtatcaaaataccagagggacatcagtatgagacggtgtctggttttgtctgtgcatcttttggctatattccagaagaaggtgggaaaatgcttgtgattcttgaaaagaatttcagagaagaaaacggtgaatatcaggaggaaggtcctgatcgccaagatgatagagaaaaaactcaagcttatgaactcgaggtgctggactgcagac

SEQ ID NO: 212026 - DNA, 2144 bp, Zea Mays
ctttaccttaaatcggaacgggctggactagaaactggtgtcagttcgttggggctgtcgttgttgcttgaattctaagcagctctgcgcttgctcgtcgcagtgctgcttagatctctaggccccgatgcgtgttcttcagcacctcaatccaagggccggagttctggaatctttgggtcaacctgaagcacatttgcacacatgtaccatggatgttcctcagttgactgctgaaggtgccacacaacttggagatagagtgtctttattacaccagacagggacacttcagtcagaaactccttgtctgaccttaggccgtgattctaatgcagtatcaatggagaagctgcatgctagcgattgcttgccctgtggtaaagagaatgtcgggacaggactacaacctaaatctgatccagaacgtgctgataataggatgagtgttgcacgtcttgggttggaccttaacacagtagatagtcctgatgtagcagagcctaaccctttcttcccttacaagaaattggggcagtcaaaagtcagcgatccatcggaatgtggcagcactactggtgctatagaagaaagcgagtcacacagaaagtggagagaaatgaagcagaatggctttctttcttcatttcatgggaatgcggtggtgcctaggccacgtggtcgaccccccaaaaggaaaagggatgatgaattcaaaaagagcagttccacacagcatgtacaggctaacaagtctgtgaaggttgctgctcctagtggtctattatctgggctaaaccctggaatcattaaccatgtgagaaatagcaagcaagtttactccataataaaggctatggtacactctgagaggcttgagaatgagaaccactctagtcaaacaggtgaaagagggagagaagttaatgagagaattcaggatcagaaatatggtggtggtttcatgaagtgccatttgttgataaatgataataatgcggtgtttcaccaaacactgcctaacacatcgcagttccttgcacaggatggtgatagtcttaaactgcaactcccatccgcagtcactatgtcttcagataggaccttcagtacgtcagctgatgatcctgcatctaatcatgattacatgactgtactgtcagtaaaagcggctagtgttgcttctcaatggttggaattactgcatcaggacataaggggacgtcttgctgctttaaagcgcagcaggaagagagtcagaaatgctcttcacacggaactgccatacctaaccgcgacagaattttcatctaatcaagagaacgaatcatccattgcaaatacttctgagattggatgtactgacaaagcggtttcagaagctcatgtggcacgatggaggtctctgtttgttcagatggacaaaacacttcaggaggaagggaaacagctggagaacaagttgaagcaagtgcaagaaatgcaattgaattgtgataaaggcctcaaacacatgacctgtgaagctcctctgctaggacctatggctgaactatggaagctgaagaacccaaatatttccgagagcgagtgggcggtgcaagccgctgccgcatcgatctactcgacctgcaacatggtcatgagaacggagaacgtgccttgcttttgataccacacttgtactttagttttttgctttgggcgtgttcggctggctacaagccgacactgttgcagctgtttggattgctgcagctgcaatccatagagagaaaaatactgtagaagccgcagccgcagccggattgcagccgcagcaagccgcagcgaacaagcttacctcaaaccaggtcttctttcttacctttaccctatgtgaatcgtgatcccttgtccattacagtagtggcgactggcgagtgatgtaacaagaacaaacttgtgatgtatgttatcccgagcctacaatttcacaggcacatgaaacagcacattctttttcatggagttgaggatattcatatcctaccgttttggttcggtgagatggtcgaaatagagattgccaccttgttaaatttttaactgacatggtcgatcttctgattggatgattacgccagtattttctttctttttca

SEQ ID NO: 212027 - DNA, 1826 bp, Zea Mays
ccgatccatctcgatttgaaaaccgcgcaggagcttcgcgtctcttcctccctcactaccgctccgctccgctccaaaaccctagacggcgcccgcagcccggagccccggatccgcgtcccgctcccccggcgtctctgcccgctgtcgccggctccccgatggacctcgcggggccgcgcggggccacggatcccgccggatcgagggccgcgccgccgcacgaggaattggacgggagaggaggaggggcgtgcagcggcgcggcagcagtggaggggagcgcgtggcggctggcggtcgctggactgggagttccttgcacaggatggtgatagtcttaaactgcaactcccatccgcagtcactatgtcttcagataggaccttcagtacgtcagctgatgatcctgcatctaatcatgattacatgactgtactgtcagtaaaagcggctagtgttgcttctcaatggttggaattactgcatcaggacataaggggacgtcttgctgctttaaagcgcagcaggaagagagtcagaaatgctcttcacacggaactgccatacctaaccgcgacagaattttcatctaatcaagagaacgaatcatccattgcaaatacttctgagattggatgtactgacaaagcggtttcagaagctcatgtggcacgatggaggtctctgtttgttcagatggacaaaacacttcaggaggaagggaaacagctggtgagtttactgatcgggttagtttgtgttataggaaaggagcacactatctgtcattgttcgtgttggtatattgctctattcatattcggcctgattggttgtccgcttggccgcatccaggctcgtcacgcgcgttgaccgcatgcatgcatatgattggtgacctgcaccggccgagcgtagtctgcatgcgcgagtacaacctagttattttccaccacttccacctgcacacgcagagatgctaggagagagcttcgctggtcacccaggccgacgcgagcctgattcccacgaacacatcaaccaatcacgcagattgtttgtataagatgcattgtgtttatgctcatagagtaggtatatacagtacctgacttcttaatgcttgttgcaggagaacaagttgaagcaagtgcaagaaatgcaattgaattgtgataaaggcctcaaacacatgacctgtgaagctcctctgctaggacctatggctgaactatggaagctgaagaacccaaatatttccgagagcgagtgggcggtgcaagccgctgccgcatcgatctactcgacctgcaacatggtcatgagaacggagaacgtgccttgcttttgataccacacttgtactttagttttttgctttgggcgtgttcggctggctacaagccgacactgttgcagctgtttggattgctgcagctgcaatccatagagagaaaaatactgtagaagccgcagccgcagccggattgcagccgcagcaagccgcagcgaacaagcttacctcaaaccaggtcttctttcttacctttaccctatgtgaatcgtgatcccttgtccattacagtagtggcgactggcgagtgatgtaacaagaacaaacttgtgatgtatgttatcccgagcctacaatttcacaggcacatgaaacagcacattctttttcatggagttgaggatattcatatcctaccgttttggttcggtgagatggtcgaaatagagattgccaccttgttaaatttttaactgacatggtcgatcttctgattggatgattacgccagtattttctttctttttca

SEQ ID NO: 212028 - DNA, 2466 bp, Zea Mays
agaaaactgaaatgaaaacatgaccaagaaccctacccaacacgagaagccccaggccgaaattaccgaagcgcccctcgccatttaaccatctcatctcctcacctcctcgacggcgcgactccctcgacctcgccctcctccccccgccttgacgctgtcgcctggtcctccgcggtcggctgtctcgattcgatcgtaatacatcgacaataggattgaatcacttcttcaagatttggagttgaagaatagaagttccttcaccaaaagaagaaaataattcgacaaattctgaagctgctacagatagcgaagacattgaaatcagcgatgatgatgaccgcaaccacaagcaccgaagacgggaggctaaacaacaatctgatgacaatacagaggagcaacatccagggccacctcttaaaaaaaggagtagggttgctggtaatggagaaccttttggtggagctggctctcaaggtgaagtacaaaaggattttgtgccaaattttaaaaggcgttctggagcaggaggtcacactcgagcacctagagcgaaccaatccttccgagctgattcatcggcttctgctgctactcgccctcctatgacacgaggaagaggacgtaatgttgcaccttggactcaccatgatccaagatttaactcacttgatatgatggattttgcatcccagatggcttcacaaggaccacctgcacatcctagcttatttatgggcactgcattgccatgtggtccatatggatttatgcctggaatgcctcatgggattttggatccaatccacccacttggaatgcaaggccctattcagcgctcagtatctcctttgattgatcttggcatgcctcgtcaacgttgcagagactttgaggaacgtggattttgcttgagaggggatatgtgccccatggagcatggtgtaaatagaattgttgttgatgatatgcagagtctttctcaattcaatcttccagtatcagttccaaatgctcaaggattgggaatccaaaatgagggaggaaccagttctgttaacttatccaaccttggagggagtaaaagcgttcctgtaaaagatgtgaaatctggtgtagcaagtgatgcattaaagccaaatggaagtgctgtttcagctgttgctgatgctgatgtatatgatcctgatcaacctctttggaacaatgagcaccgagaagcatcatctactggctttataaataaagatgttggaccgtggaatgctgaatcatccggctatgaaatggggcaggagcattcaaaccaggttttggcttctgatggttctcagagtttgaagtcttctgtttgggggcgaataacatcaaaaagaaaaccaggaggtaataacacagctaaaagtacaccaacgagtatcactggaaaccaaaaaagtgattatgatgacatggctatcagcacgggccaagtaaaatctgctgctaaggataccaatggtcaacccaattcaagaatatatggagatgtgggctggcaaagtaatcgagctgctcagaaagcatcccgtacattatatgtaaatggaattccccaagaaagcaacagatgggagacccttctatcgcattttcagaagtttggtcaagtaatagatatttatattccatctaacagtgaaaaagcttttgtccagttctcgagaagggaagaagctgaagctgccctaaaagctccagatgctgttatgggaaaccgctttataaagctatggtgggccaacagagatagagttcttgatgtgggagagggcagaatctctcaaaagccttcccagttgtctactacgccggctaattcttaccccaacagagtcaaggaaaatgttcaaccaacagctccagggcccagctctggatcttctgctgaactgttgagttctggtacaccaagttctagaatgctgccagcaagtagtgcgaaagcagtaccaccccatgctccaaaaaggcaagaaagcctagaactattggaagaactacgtaaaaaacaagagatcttagctcagaagcgtgatgagttccgccggcagttagagaaacttacaaaacaaaaaggttcagcaaattcagttaagcatgcagagactggtggaaaagaaattgcttctaatgatgcatcacaagtaaaggatgcagcgtccacgagggttgaagggtcacaggagacagctggttcattggaaaagagaagttctggagagtttgccttgttgtctcaaaagtctgctgcgatatccacgcagaaaccagtggtggttacaaaacagactactctgccagcacctcctcagaataggtttaagcttgacaatcggaccacatcattcagaattcttccacctttgccacctgaaattgcaaatgtaagttttacatccaaccacttgccattccttg

SEQ ID NO: 212029 - DNA, 2547 bp, Zea Mays
gttggcctgttggggccacgggatggtctgcacaaaatcacctgttcagtcttgactcgaccaagagctctatttgtcaagcggcgtaattggtgaaattctatctggagtacagagtggacaattgaggtcgataaatagagaggaacatttctggggcaattatctgttggaatgtaatacatcgacaataggattgaatcacttcttcaagatttggagttgaaggtgataatcacattgaatacaatctagatgataagttttctgctgtactggttaccttgaagatgctcaaagagtcattatcaccagtgctggatgctgacagaatagaagttccttcaccaaaagaagaaaataattcgacaaattctgaagctgctacagatagcgaagacattgaaatcagcgatgatgatgaccgcaaccacaagcaccgaagacgggaggctaaacaacaatctgatgacaatacagaggagcaacatccagggccacctcttaaaaaaaggagtagggttgctggtaatggagaaccttttggtggagctggctctcaaggtgaagtacaaaaggattttgtgccaaattttaaaaggcgttctggagcaggaggtcacactcgagcacctagagcgaaccaatccttccgagctgattcatcggcttctgctgctactcgccctcctatgacacgaggaagaggacgtaatgttgcaccttggactcaccatgatccaagatttaactcacttgatatgatggattttgcatcccagatggcttcacaaggaccacctgcacatcctagcttatttatgggcactgcattgccatgtggtccatatggatttatgcctggaatgcctcatgggattttggatccaatccacccacttggaatgcaaggccctattcagcgctcagtatctcctttgattgatcttggcatgcctcgtcaacgttgcagagactttgaggaacgtggattttgcttgagaggggatatgtgccccatggagcatggtgtaaatagaattgttgttgatgatatgcagagtctttctcaattcaatcttccagtatcagttccaaatgctcaaggattgggaatccaaaatgagggaggaaccagttctgttaacttatccaaccttggagggagtaaaagcgttcctgtaaaagatgtgaaatctggtgtagcaagtgatgcattaaagccaaatggaagtgctgtttcagctgttgctgatgctgatgtatatgatcctgatcaacctctttggaacaatgagcaccgagaagcatcatctactggctttataaataaagatgttggaccgtggaatgctgaatcatccggctatgaaatggggcaggagcattcaaaccaggttttggcttctgatggttctcagagtttgaagtcttctgtttgggggcgaataacatcaaaaagaaaaccaggaggtaataacacagctaaaagtacaccaacgagtatcactggaaaccaaaaaagtgattatgatgacatggctatcagcacgggccaagtaaaatctgctgctaaggataccaatggtcaacccaattcaagaatatatggagatgtgggctggcaaagtaatcgagctgctcagaaagcatcccgtacattatatgtaaatggaattccccaagaaagcaacagatgggagacccttctatcgcattttcagaagtttggtcaagtaatagatatttatattccatctaacagtgaaaaagcttttgtccagttctcgagaagggaagaagctgaagctgccctaaaagctccagatgctgttatgggaaaccgctttataaagctatggtgggccaacagagatagagttcttgatgtgggagagggcagaatctctcaaaagccttcccagttgtctactacgccggctaattcttaccccaacagagtcaaggaaaatgttcaaccaacagctccagggcccagctctggatcttctgctgaactgttgagttctggtacaccaagttctagaatgctgccagcaagtagtgcgaaagcagtaccaccccatgctccaaaaaggcaagaaagcctagaactattggaagaactacgtaaaaaacaagagatcttagctcagaagcgtgatgagttccgccggcagttagagaaacttacaaaacaaaaaggttcagcaaattcagttaagcatgcagagactggtggaaaagaaattgcttctaatgatgcatcacaagtaaaggatgcagcgtccacgagggttgaagggtcacaggagacagctggttcattggaaaagagaagttctggagagtttgccttgttgtctcaaaagtctgctgcgatatccacgcagaaaccagtggtggttacaaaacagactactctgccagcacctcctcagaataggtttaagcttgacaatcggaccacatcattcagaattcttccacctttgccacctgaaattgcaaatgtaagttttacatccaaccacttgccattccttg

SEQ ID NO: 212030 - DNA, 3119 bp, Zea Mays
gggccgcccataagagtccacacgcttgcgctgccctgccccgccctcccccgcagccgccccgcccttggcctcgcctttccttgcttccttctcgagcagagcaacagagcaggtgaggcagtcagcacgctcagccacacccacagagacgcggcacgcctccactcctcctccgactccgaggccagcacgccgcacgctccgcctcgcagtcgcagcccctagcctctcgcgcgtgcttcttcttcctcctcgctccgggggctcgatctggtaactctggtgggggacaatcaagaactgaacactcgacactggcacagagctctggcagcatgcggtggctcggtctatctgtcgatgtgttccgcagggggatctccttgaacctttactgccgtgtgattctgtaaatcgtctccgtggctaccggcttttccttcgcacgcctcctgattcatgagaggcttgtgaaggcactttacatcttccccacccagtcattaattggcgtcgctgttaggctgttgtggttgtttggccaaggcttttgaggagaacgggctggagtactgatggtgtggaaagcagccgctcagacgagattccgcgtgtttaagcatgagaacggaatcacagtgagggctattgcttgcttccagccgctgcaaaattgccaggccgagtacttccgccatctcctcaagcccgtgacgtagctcccctctgctctccacctgctgctgaataaacttacagccttagttttttctccatagcaactgaagtgggagaacatcccagtcgttcatcgggactttctgctggtagttctgtccggtggttgttttaatttattcatcatgggggacaagcatcgtcgattgctgagagacctcttccaatgggcccgagacacgtcacgacattggcaccaagtttcgaatcgcctgcaccgtgtccctcgcgtaagagaccttcagtcctctaccagaaggaaactcatggtcccaccgcagctcctttgcggaggagcaaggggccactggatcctgtgccggagctccaaggtagcaacgagaccaacgtaaccgacgttggagcagaagaaaccgagggtgttcacgagaacacagacgagatcgatgccctcctggactcctccgactcggacgaagggccgcacgaactcgacagggccaggaggcagcctgctgcagagaacgagacctcgagcgtcgagtcggtggccagtgccgcaggttctgcgccgccggccaagaagaggaggctcagctcttgcacggacaggtccgtcgtcgacaccgccagttcggcgaggccggaccattccgtcgagcagaagcctctcgcgagcgactgcgacgcgcagtcgtgctgcgtcggcgaggcagcagaaggcgacagccccgacgaccagaggcggaggagagagaggatccaagagaccgtggctgcgctgagaaacatcgtcccggggggcaccgccaaggacgccacggccgttctcgacgaagccatctgctacctgcagtatctgaagctgaaggtcaagacgctgggagctgcctccctctagcctcctggacagggagtcatctggctttctgctgttctacataagtatggagtgcaggcaggcattgggtaataaggtgaaagatgccggagaccatatcagaatttggcggtgcttcaggacacgcaccacaccaggggtgaaaacaacggggagaagggggaaaaaaaggtccaatggtgcttgctttgctgcttccccgcccgtgtaccacccccaccacaaggctctcgaacgatgctgtgggcaacgactggcgtgcagcattgcgaagagcgtcttcaaccgaagcgaggcgggtatgttttccgtcgtccatttgtggcggagcaacatggaggccaaaagatccatccaccagtcaccaccacctaatatgctgctctccagtgacagtgagctgctagtgtaagcaccatctttctgtctgggagcatggatcttccaccctaagagctgtcggtgcctgcctgtatcactcgccgtcctcaaaaaggccctcacggcacgggttggtgcaacgtatgcgctatgcaaagctagaagacatcttttgctgaccgtgatccaaagcaaagagcggcactgaccaccaaaggcaaggaaagggggggagatgggctggagcctggagtccaacaaagtgctgtgtgcctgacgtggatgagctcaaactctgagccacaccaattgcgcgggcgggcgcctttcatcatctcacgctgctttgctttctctcaaatcccgctgcatgtgccaccacactagcgtacatacgtatgtatgcttgtgtaatcgctttgacacgcctttgtacgcggtgtaatcatgtatagtcctagctttaggacggtttctctgctggatccggatgaatgagccttgctcgtcaagtgtgcgtgcgtgcgtgcgtctatagtcctgttctgttggcaatgattgtttggaggctgcatcgtcgtcgtcccgttgttgcccctcgactagaaggggattaaatcctcttctggattggtataaccgaagccgaagagtgctgctgcggcgctgccactgccggattgggaaccgctttggtccctgtagggaacggatggcgggagggattccgagtgggggcacgcgtggggagcggagcgtgcagcgaccgtcgcggcggaatgagtggcgaggcagatggagtggagccgtcgaggccgcctgctttccttcggttcgttgcgccgaggtgaggtggggccggccccaatgccaaagcggaagatggagaggactgcactgcacaggcatcatcgcactcgcatgcgcatgcgacggaacggagtgcgggccgtagtatccgccccccctcaactccctgtagcaaagcctttatagacgtgcaaaccaggtcacctggcggtggtcatacattgaaggagtcttcgaaaccattgctttacttctgtaacaccctgttttaaaggaacaaagctgggtgcatctcatacatgcgccaagaagacaacatatataa

SEQ ID NO: 212031 - DNA, 1659 bp, Zea Mays
aggaggcaagtcgtgccgtgccgtctgctccttgcctgctctgctggtctcgccgttgccggcttgccccgtccgtgcgtccatctgtttcctccttggatcctcgacaagcaatggccatggaggaggagcagacaccacccgagctgcgctacctctcgggcctgggcaacacctccttcaccaccccgcgcgcccggaacctgcgcacgtggctgtaccggatcaagccgtcggtgacccacgaacccttctatccgcggaaccccaccaacgagcgcctcgtcggcgagttcgaccgcaccaccaccgtcgccacgcccacgcagctgcgctggaggcccgccgacgtgcccctccacccgggcctcgacttcatcgacggactctacaccgtctgcggcgccggcagctcatgcctccgacacggatacgccatccacatgtatgctgctaacaagcccatggatggatgctccttgtgcaatgcggacggtgacttcctcattgttccccagcaaggaaggttatttatcacaaccgagtgcggaaggctgctggtttcacccggcgagatcgtcgtgatccctcaaggtctccgatttgctgtcgacttgccggatggcccctcgcgtggctatgtctctgagatcttcggcgcccattttcagctccctgatcttggcccaattggtgccaatggcttggcttcgccgagggatttcctttccccgacagcatggtttgagcaggagcaccaccctggatacacaatagtgcacaagtatggtggcgagctgttcagcgccacgcaggatttctctccattcaacgtggtcgcgtggcatgggaattatgtcccttacaagtatgatctgagtaagttctgtccattcaacaccgtcctcttggatcatggcgacccgtcagtgaacacagatggctggttgctgagaatacattccgcccaccctactaccaccgcaactgcatgagcgaattcatgggcctcatctatgggattggcagcagtcatgtgaagagatgtaaagacgatgcacatctgcaggctaaggccgatggttttcttcctggtggcgccagccttcacagctgcatgacaccgcatgggccagacaccaagacgtacgaggcaacgatcagccgtgctgctgccaacgagccatccaggctcagtggtacgttggcgttcatgtttgagtcttggcttatccctcgcgtgtgcccatgggctctggattccccgtgtcgggacctcgactactaccagtgctggatcggattgaagtcacacttttcacctcctgctgctgctgttgatgatgagaacgagtagctgcttacagcagcagtcttggaacggacaggcagcgaactgaaactggggtggatatgctgtacgtcgtgtcctgcttgctgtcggtttctgaagcttttagctggcagggacaggcggctgttggctttgctgattgcccaaccctctcctgtaatattaatcctaccagagaaacttaaacttgactcaaccgatatgctattaaataaataaagcaagcaagttaggatacgagttaccagagttgtcacggttccagcaacccgtagccagtgctgtcacgtatcagtgagtacgtg

SEQ ID NO: 212032 - DNA, 1723 bp, Zea Mays
aggaggcaagtcgtgccgtgccgtctgctccttgcctgctctgctggtctcgccgttgccggcttgccccgtccgtgcgtccatctgtttcctccttggatcctcgacaagcaatggccatggaggaggagcagacaccacccgagctgcgctacctctcgggcctgggcaacacctccttcaccaccccgcgcgcccggaacctgcgcacgtggctgtaccggatcaagccgtcggtgacccacgaacccttctatccgcggaaccccaccaacgagcgcctcgtcggcgagttcgaccgcaccaccaccgtcgccacgcccacgcagctgcgctggaggcccgccgacgtgcccctccacccgggcctcgacttcatcgacggactctacaccgtctgcggcgccggcagctcatgcctccgacacggatacgccatccacatgtatgctgctaacaagcccatggatggatgctccttgtgcaatgcggacggtgacttcctcattgttccccagcaaggaaggttatttatcacaaccgagtgcggaaggctgctggtttcacccggcgagatcgtcgtgatccctcaaggtctccgatttgctgtcgacttgccggatggcccctcgcgtggctatgtctctgagatcttcggcgcccattttcagctccctgatcttggcccaattggtgccaatggcttggcttcgccgagggatttcctttccccgacagcatggtttgagcaggagcaccaccctggatacacaatagtgcacaagtatggtggcgagctgttcagcgccacgcaggatttctctccattcaacgtggtcgcgtggcatgggaattatgtcccttacaagtatgatctgagtaagttctgtccattcaacaccgtcctcttggatcatggcgacccgtcagtgaacacagttctaactgcgccaactgataagcctggcgtcgcgttgcttgattttgtaatattcccacccagatggctggttgctgagaatacattccgcccaccctactaccaccgcaactgcatgagcgaattcatgggcctcatctatgggattggcagcagtcatgtgaagagatgtaaagacgatgcacatctgcaggctaaggccgatggttttcttcctggtggcgccagccttcacagctgcatgacaccgcatgggccagacaccaagacgtacgaggcaacgatcagccgtgctgctgccaacgagccatccaggctcagtggtacgttggcgttcatgtttgagtcttggcttatccctcgcgtgtgcccatgggctctggattccccgtgtcgggacctcgactactaccagtgctggatcggattgaagtcacacttttcacctcctgctgctgctgttgatgatgagaacgagtagctgcttacagcagcagtcttggaacggacaggcagcgaactgaaactggggtggatatgctgtacgtcgtgtcctgcttgctgtcggtttctgaagcttttagctggcagggacaggcggctgttggctttgctgattgcccaaccctctcctgtaatattaatcctaccagagaaacttaaacttgactcaaccgatatgctattaaataaataaagcaagcaagttaggatacgagttaccagagttgtcacggttccagcaacccgtagccagtgctgtcacgtatcagtgagtacgtg

SEQ ID NO: 212033 - DNA, 2493 bp, Zea Mays
gctccatccccatcttcgcctcctcctcctcctccttggcttcaactccactcctcgcacgcttgcttgctttccaaaccaagggataacggataacataaccgccgcccgtctaagcgcttccaccaccaccacgtactacgccgcccatcccaactgcactgcactgcacccagcaacagccaacaggggtagtggaaagacgaaaggactcgctgatctgcccatcatccatccaatccatatggagaagcttaggagcctctgtgcctgctgcatgggccctccgcggccggcctcgccggcctgtgccaccgccggcgtcacggtcaaggtcagcgacagatacgtcgagatcaaaaacggcatctttgacctgacgctgtccaacccggacgggatcgtcaccggcgtgcgctacaacggcgtggacaatctcatggagattctcaacaaggaagacaaccgagggtactgggaccttgtttggaacccaccaggacagaaaactggcatctttgatgtgatcaaaggcaccgaattccgcatcgtttaccaagatgagaaccaggctgaggtatccttcaccagaaattgggatccttcccttgaaggaaaagctgtccccttgaacatcgataagaggttcatcgttctccgtggctcatccgggttctacacctatggtatctatgagcataaggaaggatggcctgatttcggcttgggagagacgagggtggctttcaagctgcggaaagacatgtttcattacatggcattggctgacgacaggcagagaattatgccaatgcccgatgaccggttgcctcctcgaggacagccattagcataccctgaggctgtgctccttgtggacccaatcaaccctgaacttagaggggaggttgacgacaagtaccagtactcttgcgaagaccagtacaacaatgtccatggttggatgtcattcgatcctccaattggcttctggcagatcactccaagtgatgagttcaggacaggaggacctctgaagcaaaacttgacttctcatgttggccctactatgctggctatgtttcttagtgcacattatgcaggagatgacctctcaccaaagttcacgaatggagagtactggaaaaaggtccatggaccggtattcatgtatcttaattccagttgggatgcaagtgacccaactatgctatgggaagatgcaaaagttcagaggattttcagaagacagagcaaaggggttgtgtctctggtagattactagtccgagacaggtatatagatgatcaagacctttatgcctcaggagcctatgtaggcttggccctaccaggagaagctggatcctggcaaagagagtgcaagggataccagttctggtgtagagcagatgtagacgggagcttctacataaggaacattgtaactgggaactacaacctgtatgcttgggttccagggtttctaggggactacaagctagatgccacagtgaccatagcttcaggggatgatatttatctgggtgacctcgtgtatgagccgccaagagacgggccgacgatgtgggagattggagtacctgatcgatctgctgctgagttttatgttccggatcctaaccccaactacgtcaatagattgtacgtcaaccaccctgcagatagatttagacagtatgggctctgggaacgatacgcggaactataccctgacagtgacctggtatacacagttggccaaagtgactatagcacggattggttctatgctcaagttaacaggaaaattgatgacaacacttaccagccaacaacatggcaaatcaagttcgaccttgacagtgtcagcccaagcagcacctacaagttcagggtggctctggcgtcttctgcgctcgctgagttgcagatttccttcaacgaccaggacagggctgttcctcacttcgccaccgggctgatcggcagggacaacgccatagcaaggcacgggatccatgggctctactggctgtttaacatcgatgtggccagtgcttggcttgtgcaaggggtgaacaccatctacctgaagcagcccaggagccagagcccgtttcaggggttgatgtacgactacttgcgtttggagggaccgtgcggctgctaatcgatttgtgtgtgaaattgcgttgctagatgtgaaattacaactgcattcactgtgtaaacccaatgcatacgattggggaaaagatgttgcggtattataggcattggggttacgtgtaggtaatgttagtttaattttcgcatttataaccgtgcagctatgctgatttgtaactataatgatgtaagtgtgtacgcaataatgggtgtttttagtcaggtaactaattacggacaacttcaacacaaggtcaaaaacggaggttgtttgaagggtattgtagaccactttatctataaagcaaaggtgatactcggg

SEQ ID NO: 212034 - DNA, 2504 bp, Zea Mays
ccctcctcttctcgctccatccccatcttcgcctcctcctcctcctccttggcttcaactccactcctcgcacgcttgcttgctttccaaaccaagggataacggataacataaccgccgcccgtctaagcgcttccaccaccaccacgtactacgccgcccatcccaactgcactgcactgcacccagcaacagccaacagggcctgtctgtctggtggtctcaaaacctgcatcaggagcctctgtgcctgctgcatgggccctccgcggccggcctcgccggcctgtgccaccgccggcgtcacggtcaaggtcgagatcaaaaacggcatctttgacctgacgctgtccaacccggacgggatcgtcaccggcgtgcgctacaacggcgtggacaatctcatggagattctcaacaaggaagacaaccgagggtactgggaccttgtttggaacccaccaggacagaaaactggcatctttgatgtgatcaaaggcaccgaattccgcatcgtttaccaagatgagaaccaggctgaggtatccttcaccagaaattgggatccttcccttgaaggaaaagctgtccccttgaacatcgataagaggttcatcgttctccgtggctcatccgggttctacacctatggtatctatgagcataaggaaggatggcctgatttcggcttgggagagacgagggtggctttcaagctgcggaaagacatgtttcattacatggcattggctgacgacaggcagagaattatgccaatgcccgatgaccggttgcctcctcgaggacagccattagcataccctgaggctgtgctccttgtggacccaatcaaccctgaacttagaggggaggttgacgacaagtaccagtactcttgcgaagaccagtacaacaatgtccatggttggatgtcattcgatcctccaattggcttctggcagatcactccaagtgatgagttcaggacaggaggacctctgaagcaaaacttgacttctcatgttggccctactatgctggctatgtttcttagtgcacattatgcaggagatgacctctcaccaaagttcacgaatggagagtactggaaaaaggtccatggaccggtattcatgtatcttaattccagttgggatgcaagtgacccaactatgctatgggaagatgcaaaagttcagatgatgattgagaaaggaaactggccgtactgttttgcactttcagaggattttcagaagacagagcaaaggggttgtgtctctggtagattactagtccgagacaggtatatagatgatcaagacctttatgcctcaggagcctatgtaggcttggccctaccaggagaagctggatcctggcaaagagagtgcaagggataccagttctggtgtagagcagatgtagacgggagcttctacataaggaacattgtaactgggaactacaacctgtatgcttgggttccagggtttctaggggactacaagctagatgccacagtgaccatagcttcaggggatgatatttatctgggtgacctcgtgtatgagccgccaagagacgggccgacgatgtgggagattggagtacctgatcgatctgctgctgagttttatgttccggatcctaaccccaactacgtcaatagattgtacgtcaaccaccctgcagatagatttagacagtatgggctctgggaacgatacgcggaactataccctgacagtgacctggtatacacagttggccaaagtgactatagcacggattggttctatgctcaagttaacaggaaaattgatgacaacacttaccagccaacaacatggcaaatcaagttcgaccttgacagtgtcagcccaagcagcacctacaagttcagggtggctctggcgtcttctgcgctcgctgagttgcagatttccttcaacgaccaggacagggctgttcctcacttcgccaccgggctgatcggcagggacaacgccatagcaaggcacgggatccatgggctctactggctgtttaacatcgatgtggccagtgcttggcttgtgcaaggggtgaacaccatctacctgaagcagcccaggagccagagcccgtttcaggggttgatgtacgactacttgcgtttggagggaccgtgcggctgctaatcgatttgtgtgtgaaattgcgttgctagatgtgaaattacaactgcattcactgtgtaaacccaatgcatacgattggggaaaagatgttgcggtattataggcattggggttacgtgtaggtaatgttagtttaattttcgcatttataaccgtgcagctatgctgatttgtaactataatgatgtaagtgtgtacgcaataatgggtgtttttagtcaggtaactaattacggacaacttcaacacaaggtcaaaaacggaggttgtttgaagggtattgtagaccactttatctataaagcaaaggtgatactcggg

SEQ ID NO: 212035 - DNA, 2708 bp, Zea Mays
cgaacattaggcactcacagccacagatgaaacaaggctccttgaaggcggcaggtgtgcactgcctgcctgccgactagaccaaccaactaccaagaattaaaagacgcggccgagcgagcgagggccggggggctaggacgccggccattgccgccctcctcttctcgctccatccccatcttcgcctcctcctcctcctccttggcttcaactccactcctcgcacgcttgcttgctttccaaaccaagggataacggataacataaccgccgcccgtctaagcgcttccaccaccaccacgtactacgccgcccatcccaactgcactgcactgcacccagcaacagccaacaggggtagtggaaagacgaaaggactcgctgatctgcccatcatccatccaatccatatggagaagcttaggagcctctgtgcctgctgcatgggccctccgcggccggcctcgccggcctgtgccaccgccggcgtcacggtcaaggtcagcgacagatacgtcgagatcaaaaacggcatctttgacctgacgctgtccaacccggacgggatcgtcaccggcgtgcgctacaacggcgtggacaatctcatggagattctcaacaaggaagacaaccgagggtactgggaccttgtttggaacccaccaggacagaaaactggcatctttgatgtgatcaaaggcaccgaattccgcatcgtttaccaagatgagaaccaggctgaggtatccttcaccagaaattgggatccttcccttgaaggaaaagctgtccccttgaacatcgataagaggttcatcgttctccgtggctcatccgggttctacacctatggtatctatgagcataaggaaggatggcctgatttcggcttgggagagacgagggtggctttcaagctgcggaaagacatgtttcattacatggcattggctgacgacaggcagagaattatgccaatgcccgatgaccggttgcctcctcgaggacagccattagcataccctgaggctgtgctccttgtggacccaatcaaccctgaacttagaggggaggttgacgacaagtaccagtactcttgcgaagaccagtacaacaatgtccatggttggatgtcattcgatcctccaattggcttctggcagatcactccaagtgatgagttcaggacaggaggacctctgaagcaaaacttgacttctcatgttggccctactatgctggctatgtttcttagtgcacattatgcaggagatgacctctcaccaaagttcacgaatggagagtactggaaaaaggtccatggaccggtattcatgtatcttaattccagttgggatgcaagtgacccaactatgctatgggaagatgcaaaagttcagatgatgattgagaaaggaaactggccgtactgttttgcactttcagaggattttcagaagacagagcaaaggggttgtgtctctggtagattactagtccgagacaggtatatagatgatcaagacctttatgcctcaggagcctatgtaggcttggccctaccaggagaagctggatcctggcaaagagagtgcaagggataccagttctggtgtagagcagatgtagacgggagcttctacataaggaacattgtaactgggaactacaacctgtatgcttgggttccagggtttctaggggactacaagctagatgccacagtgaccatagcttcaggggatgatatttatctgggtgacctcgtgtatgagccgccaagagacgggccgacgatgtgggagattggagtacctgatcgatctgctgctgagttttatgttccggatcctaaccccaactacgtcaatagattgtacgtcaaccaccctgcagatagatttagacagtatgggctctgggaacgatacgcggaactataccctgacagtgacctggtatacacagttggccaaagtgactatagcacggattggttctatgctcaagttaacaggaaaattgatgacaacacttaccagccaacaacatggcaaatcaagttcgaccttgacagtgtcagcccaagcagcacctacaagttcagggtggctctggcgtcttctgcgctcgctgagttgcagatttccttcaacgaccaggacagggctgttcctcacttcgccaccgggctgatcggcagggacaacgccatagcaaggcacgggatccatgggctctactggctgtttaacatcgatgtggccagtgcttggcttgtgcaaggggtgaacaccatctacctgaagcagcccaggagccagagcccgtttcaggggttgatgtacgactacttgcgtttggagggaccgtgcggctgctaatcgatttgtgtgtgaaattgcgttgctagatgtgaaattacaactgcattcactgtgtaaacccaatgcatacgattggggaaaagatgttgcggtattataggcattggggttacgtgtaggtaatgttagtttaattttcgcatttataaccgtgcagctatgctgatttgtaactataatgatgtaagtgtgtacgcaataatgggtgtttttagtcaggtaactaattacggacaacttcaacacaaggtcaaaaacggaggttgtttgaagggtattgtagaccactttatctataaagcaaaggtgatactcggg

SEQ ID NO: 212036 - DNA, 2837 bp, Zea Mays
ctggctccatccattgcccgggagcgcgcgggtggacccttttttttctcggagatcgccgggagagagggacagatcatgctcggggaacggtgtgtggcgaggaatgttgactagttgtttaatacgagatcaagaaggacaaagcaattaaacaagcagcaggctttgtgctttgtgggtgtccctcctctggttcactgccccgctctccactccagctccatacattagtttactcctcctgaggtactttgtgctcctcccccttctggcccctcactgcctacgatagcagcagcaccggccgcataagtaggttgggcgctagagtgcgcttcaagcagcagcgctgttgctgcatcggaacccatccccactatttgtttgttttcgctgtacgagcgatctcctggccggctccggcacgttgcaatattcggtcttctcttctcggcgcagcagcaacttgttcttgtgcgctgcctcgctgctctgagccatttgccgttgctgcggtggacaagtatgggatagtggttgtggtgctgtgcagttcttgcttcttacaagtggtggtggtggtggtggtctggacgtctggtctctgcgtgagcattggactagaggagcgggaagctgtgcggctcctctttcgtggtcaagatgaagttcatgaagcttggatcaaatccggatacatttcagggagatgggaatgaagtcagtattgcggcatctgaattggtgagcgacatcactgttcgtatagggactacaaagttttaccttcacaagtttccgctcctatccaagtgtgctcgcttccagaagttgattccaactactggcgatgaaaatattgagatccacatccatgatattcctggtggtgccaaggcttttgagatctgtgccaagttttgctatggcatgattgtcacactcaatgcctacaatgtgattgccgcccgctgtgccgcagagtacctggagatgaacgagactgttgacaagggcaatctgatctacaagatcgatatcttcctcagctcaagcatacaccggagctggaaagactccataattgttcttggtacaacaaaggctcatttaccttgggcagaggatcttaagctggtcagccactgcattgactctgttgcttcaaaagcctctattgacgtttcaaaagttgaatggtcatacacatacaaccgtaagaagctcacagttgagaatggtcatgattcgccatggaatggagtcaagcagcagcagtttgttccaaaggattggtgggtcgaagatctgacagatctcgacattgacgcctacaagcaagtcataacagcagtcaaaaccaagggtacggtgcccaaggatgtgatcggtgcggcgattaaagcctacacttacaagaagctcccgtcactaagcaaggtctcgatgatccatggcgacgcaaaagttcgggctatgctagttaccatcacatgcctgttgccatccgagaaaggttcggtttcgtgcagcttcctcttgaagttactgaaggcaacaaacttgctcaagtgtggagagatgtgcaggaaagagcttatgaagcgcatcgcacggcaactggaagaagcgtcagtgtcagatcttctgatccctacggtggatggggataccaccgtttacgacatcgacctgattcttagcattgttgaagaatttgtcagacaagatagcaagaatgcccagagacataacggtggtgaggtgaacgaccacgtatctgctcctagtgcgtcaatggttgcagtggccaaaactgtcgatggatatctcgcagaggttgcaagggacccaaatataccggtctacaagtttttcagcctagctgagacggtttcgggaggttcaaggccggttcatgatggactgtatcgtgccattgatatgtatctgaaggagcacccaagcttgggcaagagcgacaagaagaggctatgtgccctgatggactgcaagaagttgtcgcccgacgcgtgcgctcatgccgtgcagaacgagcgcctgcctctgaggatcgtggtgcaggtgctgtaccacgagcagacaagggcctgtgccgcagccaccgccatccgagccgacagcatcggcatcggctcctacgagagctcaaggtcaggcgccacaacgaacacagaggacgagtgggacggcgtcatggccgtggaggacctcagcctgtccaagacgacgaagctggtggacaaatgcgacacggcggccagtacggtcgtcgtggggaaggacaaggaccacggtggcaacaagggcgccaccggcagggtggccaaaggtggcgctggcgcggcgacaccaaagaaggcgctcgggaaaacggtgtccggcaaagggcagaccggggagcgcagcagctcggactcatccgacagcgccgtcgccgtcgcagtcttgaccagccaggagcatcccaagaggacgacccgcgcaaggaacgccgccaagtcggctgctgcgtagcccttccgctgagagaaatgctcaaggagcactagctaggttttagcagtcgtctgttctttgttattacgagtgttgcatagaagccaggaccatgttttttacacgtctgtagctgcctgtagggatggtgtaataccaggtacgtgcgttgttaggtgatgctgttagcacgtaggttccaaacctatgagaccttgggctctgctgggtttatgtcgaactcgcagttgtgttataagaatcctactttgatagacttaaactgttctgcagctgtgagatcttttgaactc

SEQ ID NO: 212037 - DNA, 2573 bp, Zea Mays
ctacctgcccgccgccgccgccctgcgcgcgccccgccgccccaccgcgcgccacccagcacgccaccacccagcgcggcccgccctcaccaccccgcggccccgccgccgccgccagcgcctagccacgcgcgccccaccctcgccaccccgcggccccccgccgccgccagcgcctagccgtgcgcgccccgccgccccatcgcgcacctgctagcgcgccgcccagcacgtcgcccgccctcgccaccccaaccgccgccgcagccgccgcccgatgtgccctcgtgcacgagacctctcgaaccctctcagaaggcggtgcgatccggtttgggtcgccgtgccgagcccaatgtgcccgacgcgcgcgcggctgagtcaaagccgaaactggcgctcggagacgacgatgataggccgccccttgaggagaagcaccgctgcagcggtgagggcggattcatcttcctctgcgcccttgttggacacaccgaggctatcggtgggatttctatgccgtctggttcgaacaagctctactccggcagcgtcgacggatctgttcgcatctgggactacaattccggcaaggctaccaacaatctctttgattatggacgagtaacgggctgcttccacggaggttccagtgaggaggttgtcattgttcgtggtggttcatgtgctgattagcaatgtgtgcaccctatggaaccaaccataaccgaatggtgactcctaattttttctgattggttgtgcctaaatcaccaatcgtcagcggatttcttatgattagttgggtgatcctgtgctcctggtttggattggatgttatctgtcaggctagccttgttgctatatattggaggctcttcgcctgattcggttacccgtttgcctgggatcagtttgtggcgctatctggttggttgtcacttggttgatacatatgattgcatgatctgcaagtgaatcttcagagattacaactatctcattagtggatagtcatgcatttatgtaaaaatatagcaatgagaaaaaggaacaaagtaaagaaaaagagaaaatatagatggagatatgtgggagtatatccaagaggatggaaaaaatataatttgttatcatattacaatttttgttcttaatgtttctgcaatagtgtgttgatgtcatcaagatgggaggcaaggttagctgcatgatcacccatggcccatgggtactcattggaattccaaagtttgtggaggcattgaacacaaagacagggatgaaactaagatttcaagggccttctagtctagtttgttccatggctatcacgaatgagatgttgtttgctggtactggagatggtcgcatcatggcctggagatttcctgctaaggatagtaacactgaaccagtgttgatcctcagtggccatcaacggccagtgatttcactgtctatcttggcaagaagactttactctggctcacttgacaagtccatcaaagcatgggaccttacaactcggcagtgtgtccaaacactctctgagcataaagcttctgtaacatctgtgctttgttgggatgagaagttattatcttgctcccttgacaagactgtaaaactctagactctgtcagagtctggaaaccttcaagtcaaatatgcccatgccgaggagaatggtttgcgcacactcttcggcatgcaccgagttgggaagacaccagttctcttctgctccctccacaacagcaattgcgtccgcttgctcgacttgccatcaaatgcaggctgccaagaggcaaacagttgctactggatcaccgaccccagggcgcactgcatgggttggcaagggaacagtaacagcactaatgataatctgcaaaatgaagacgcaaatgatgcttctagggcccatatccctggtgctttgttctttgatgttgatggaatatccgacagaacatctagtttaccacacatgctgccatctgaaaaggcattttcagttgctgtatctgctcttggcatctacaacaaagatgggatagtagtttatgatggaaaggggatgttcagtgctgcttgtgtttggtggtggggaggactgcacagttcgcatttggagcatcaaaacaggcgagctaatctttgtgcggagcatggcagacagtcccttcacgacatcttgttggcccaaaagcagccatggcttgtagtccttggctgtttgatgtaaaccacagctgggaagtcagacatcacctagagctagggtgtccattcttgacatgtttctcttagtgataggtggatactgtctaggtaggaacagagtcttgagggattgatgggcgcatgcatcttcaattcctgtgtgttgtattactactggtacaatctccaatgcttgtgaacttatgtgtttggactgtgaatttgtgatatgaacatatatcaatatgtttaaaatctgtattgtttgtgatattctgtgttgcatgtgatattatgtgtgtctaatttttaatttctgtattttttatttttttctggaaaag

SEQ ID NO: 212038 - DNA, 3000 bp, Zea Mays
ctacctgcccgccgccgccgccctgcgcgcgccccgccgccccaccgcgcgccacccagcacgccaccacccagcgcggcccgccctcaccaccccgcggccccgccgccgccgccagcgcctagccacgcgcgccccaccctcgccaccccgcggccccccgccgccgccagcgcctagccgtgcgcgccccgccgccccatcgcgcacctgctagcgcgccgcccagcacgtcgcccgccctcgccaccccaaccgccgccgcagccgccgcccgatgtgccctcgtgcacgagacctctcgaaccctctcagaaggcggtgcgatccggtttgggtcgccgtgccgagcccaatgtgcccgacgcgcgcgcggctgagtcaaagccgaaactggcgctcggagacgacgatgataggccgccccttgaggagaagcaccgctgcagcggtgagggcggattcatcttcctctgcgcccttgttggacacaccgaggctatcggtgggatttctatgccgtctggttcgaacaagctctactccggcagcgtcgacggatctgttcgcatctgggactacaattccggcaaggctaccaacaatctctttgattatggacgagtaacgggctgcttccacggaggttccagtgaggaggttgtcattgttcgtggtggttcatgtgctgattagcaatgtgtgcaccctatggaaccaaccataaccgaatggtgactcctaattttttctgattggttgtgcctaaatcaccaatcgtcagcggatttcttatgattagttgggtgatcctgtgctcctggtttggattggatgttatctgtcaggctagccttgttgctatatattggaggctcttcgcctgattcggttacccgtttgcctgggatcagtttgtggcgctatctggttggttgtcacttggttgatacatatgattgcatgatctgcaagtgaatcttcagagattacaactatctcattagtggatagtcatgcatttatgtaaaaatatagcaatgagaaaaaggaacaaagtaaagaaaaagagaaaatatagatggagatatgtgggagtatatccaagaggatggaaaaaatataatttgttatcatattacaatttttgttcttaatgtttctgcaatagtgtgttgatgtcatcaagatgggaggcaaggttagctgcatgatcacccatggcccatgggtactcattggaattccaaagtttgtggaggtgacattctgattctagtgagagtacacctttattttgtattatgtatggtgacattgaggggtgactttgcttggtacaaggcattgaacacaaagacagggatgaaactaagatttcaagggccttctagtctagtttgttccatggctatcacgaatgagatgttgtttgctggtactggagatggtcgcatcatggcctggagatttcctgctaaggatagtaacactgaaccagtgttgatcctcagtggccatcaacggccagtgatttcactgtctatcttggcaagaagactttactctggctcacttgacaagtccatcaaagcatgggaccttacaactcggcagtgtgtccaaacactctctgagcataaagcttctgtaacatctgtgctttgttgggatgagaagttattatcttgctcccttgacaagactgtaaaactctagactctgtcagagtctggaaaccttcaagtcaaatatgcccatgccgaggagaatggtttgcgcacactcttcggcatgcaccgagttgggaagacaccagttctcttctgctccctccacaacagcaattgcgtccgcttgctcgacttgccatccagttcgttagatcacatgcccgtcgtctacctcaaaacagtctcatcttttggaccgttcaattcaacttacttagttcaaacccaaggaggacggagggagggagattcagttctgaaatgtttattctgttattagtttaatcgcagcttctggaacaacagctctgtgccttttccctgcttaaattaaacggcaacaaggtctcagagcacctgccatttttcctgaaaaattgtttgtttaatagatgagagctacatctagttgtaggtgtccgtaggcctcttctttctgaacagatccactagtgtggaacatgcagaaatgcaggctgccaagaggcaaacagttgctactggatcaccgaccccagggcgcactgcatgggttggcaagggaacagtaacagcactaatgataatctgcaaaatgaagacgcaaatgatgcttctaggtggccatatccctggtgggcccatatccctggtgctttgttctttgatgttgatggaatatccgacagaacatctagtttaccacacatgctgccatctgaaaaggcattttcagttgctgtatctgctcttggcatctacaacaaagatgggatagtagtttatgatggaaaggggatgttcagtgctgcttgtgtttggtggtggggaggactgcacagttcgcatttggagcatcaaaacaggcgagctaatctttgtgcggagcatggcagacagtcccttcacgacatcttgttggcccaaaagcagccatggcttgtagtccttggctgtttgatgtaaaccacagctgggaagtcagacatcacctagagctagggtgtccattcttgacatgtttctcttagtgataggtggatactgtctaggtaggaacagagtcttgagggattgatgggcgcatgcatcttcaattcctgtgtgttgtattactactggtacaatctccaatgcttgtgaacttatgtgtttggactgtgaatttgtgatatgaacatatatcaatatgtttaaaatctgtattgtttgtgatattctgtgttgcatgtgatattatgtgtgtctaatttttaatttctgtattttttatttttttctggaaaag

SEQ ID NO: 212039 - DNA, 4356 bp, Zea Mays
gtacgagccgccccgccccgccccgccccgcgcctacctgctaggatttggacgccgtgcttggttaggtccgccggccgccttagctcgtttcgccaagaaacggacgggtacttctcctcgggtggctggctcctgcgcgcgccgtgcctcctccttgctttgtcgggctcgtgcgccgccgactcgtccgttttgcccttcctcctatggctgcgtcggttttaggggttggttccaatcaaagattgggtcttttcggctggctgtttggttagggcgagattgggcgtccttgtgcctttttccattatcgcagattgctggattgagtgcttaggtcagtcggtgggtggcagtactgtaatagcagattcttgaatcgagagttttatttcaatcagcgagtaacagtagtttggtggcgtgctctggctgtttggagtgctatgctcgcctcaccaaacttgacttagaacagaactcgaggaggtcgagctggaggaggcggtcaacagtgcaaaccctcgatgctgtacggttgtggttagtgactaatcattgaaggactttggcaccactgagggggtgtttcaatgcactagagagctcataggtagttggctaaaaaaatgctagtgaaattagctaggtaactattagctaatttgctataaaagtagctaatagctggattataagttagactgtttgagacgtctttagctaattttagcggtgttagcccgagtgctttcaaacaccccctacaacgtgttttttttttaaatgccaaaaatgggcaaggcaccctattatgtcattgaggtaccattcttgttgttgtttcagtataaatgcaaaatgtgggtaatatgcctttgaaattttggcataggccaagtgaccagtaggatcatgacatgcgttcaaatcagttttgaactttggtcaaaggccatgtgagcaatgacactaatttgctatttgaatattcagttttgaatttttggtaaaggctaaatatggcactatagctagccggcactgtgccacacgggttctcaacctgtgcttatattgcagtttgtggtggggcagctaaccagcccttgttcctctggtatgcagtaatgcagtttggcacaataattagccagtcctgtgccatgtggcacaggttctaagcctgtgctttatattaccctgtggtggggcagctaactgggcccttagttctctgccttgcagtttgacactttggcttactggtctgaagtcacttttacggccccgtttggatccttggaattgaattccattctaataatagtaatttaggcatgtatcaattaagctaatacagttttataagaaatatatttgtatattattattagcaagatgtgtgagatatttatgtgctacatttttacataaaggagtgagccgaagaacgtcttataagttgcagattagaaacattgtctgctgatatataaaatcatttctcattctccgtcccatgaatttgagataggcttctatctgaaatttggaaagtggtggaatgtcaaattccaaaccaaataggttactttatttagtaaattccaattcctccaaaatgaatggatccatatgctgcttgtgtgcattcaagcatgatatggcgacttctagtgtaacttcctgtgtctttgtgacaattcgttctgacctgcatggctgcaacttctttttaatggattcttcaagatgagcaccaaactgcatgagcagagagtgcaaacaatggagtgctaggtcagattaaatgttatggaggtgctatgatccacactagaaatcatcatgccacgttagaatccactcaagcagcatgcaatgtggtcaatggcggtaaatctaggaagagacacaggtgctagaatacaaaagcaaaagttgtagggcggtttgatgaaccccatatttacagatgggttttaggaatttccccttagcacgatcgtcatccaacaatgctcttctgtcaaccatgcttaataattcttagacaaaattctctttgccatggagtgtagcctgctggtataatactatcggctttgtcagtcttccattcacagataatgtggtttgttaggctacactatcttgatctggttactagctgtgacatgctagcagtcatgtactgtcctccacaatgtgttggtgtctaaaactgaaactcgcaaccaaaattctggagttaatgcacaattaagcttggctttcaagcaacggagcataactgcaggaaagatggaaatatcaggcctctatacttttgaataaaaccacttgcaccattctttcgcagagaagtatttggacgaaaataagcaacttattttggccatcctggaaaatcagaacttagggaagttggctgaatgtgctcagtatcaagctcaacttcaaaagaacctcttgtacctggctgcgattgctgatgcccaaccccagcctccgcaaaaccctgcaggtcgccctcagatgatgcagcctggtatagtgcctggtgcggggcattacatgtcacaagtaccaatgttccctccaagaaccccattaaccccacagcagatgcaggagcagcagcaacaacaacagtttcagcagcagcagcagcaagtgcaggctcttacatttcctggacagatggtcatgagaccaggcaccatcaacggtatgcagcagcagcagcctatgcaggctgaccctgcccgggcagcagcggagctgcagcaggcagcacctatcccagctgacgggcgaggaagcaagcaggacaccgcgggtggggcgagctcagagccttctgccaatgagagccacaagagcgccaccggagcagataccgaggcaggtggcgacgtggccgagaaatcctaagtcgagcagcctgggcagggcgaaaaataatgccttgtatactagcaacgaaagaaaaaaagagtctttgaatgacagctactagcccctaccagtttactgtgtggtttagatgatgtagaacaaagtttagattggtgatgatgtaaaccgtccaatattgatactgcgttcttacattgctgtagtcaattatatgaataatttcatataagcatgttgccctagtggattttacctatgttttatgagctgatgtaaccaaaaacactgagcagcttttaattcagtatggcaattctgcagagttttcaccaatctgataagctgctccacacaattaaccctaagaattaacccaagcggaagcatttcaatacattcactcatacagatagacaaacatttatcaatacatagatgacatgtttccttaacaagaaaatgtcgatgagcaactaaaaacaaaacgagatgaaacacaggacaacttttcatttccagtacactattaaaatcgggcccctagcatcgatgcctttacttcttgccttcgatagggagtatttccaatccagccatccattcaagtaatgcaagccatttctgagataaatagccattggtttctctccttgtctcctttggataaaagccctactgccgtcgccgctttctcgtaacttcctttgggaacttgagaggggctgggagcgtcatgaaagtagacttaaaagcaccttctgtcacagatttgcatcccaactggtcatagtatggtttaagattttggcgggtcattttaaggtcctcacatatgtcgctggggttggatctgaagtcatcggcaaaaagtgttaggaccaatatgtagttggtcagaagctcttttttctctgttggcatgacactggaccccggttctgtaaacatgaacagcagcctgcgatatacagcctgcggggttgctggtccatggcttatctggttttcatttctgcctttccatttgcgattggacatggagccattccgcgccaatagagataggagatgttggatgtaggaaagtatccaagcaaacctctttttatcttcaccctaatgcaagagaaaagttgtttcttttagaaaacatatggaaaacatccatgaacacgatgtattaacaaaataaaaaatggcataagagcaagaattgtctgccatcattttggcagccaaactgtcacttccaaaagaggcgcacacagagcagtgccattcaacttgtcaacattgcagtagcaatggtgtctgctacactgttatcagcatgttatacaagtaaaaacggtcatgctaaggatcaattataaactgtcacaagttcaataagaagaaaaacaaaggcactccaaattaccacaaaac

SEQ ID NO: 212040 - DNA, 4477 bp, Zea Mays
gctggattgagtgcttaggtcagtcggtgggtggcagtactgtaatagcagattcttgaatcgagagttttatttcaatcagcgagtaacagtagtttggtggcgtgctctggctgtttggagtgctatgctcgcctcaccaaacttgacttagaacagaactcgaggaggtcgagctggaggaggcggtcaacagtgcaaaccctcgatgctgtacggttgtggttagtgactaatcattgaaggactttggcaccactgagggggtgtttcaatgcactagagagctcataggtagttggctaaaaaaatgctagtgaaattagctaggtaactattagctaatttgctataaaagtagctaatagctggattataagttagactgtttgagacgtctttagctaattttagcggtgttagcccgagtgctttcaaacaccccctacaacgtgttttttttttaaatgccaaaaatgggcaaggcaccctattatgtcattgaggtaccattcttgttgttgtttcagtataaatgcaaaatgtgggtaatatgcctttgaaattttggcataggccaagtgaccagtaggatcatgacatgcgttcaaatcagttttgaactttggtcaaaggccatgtgagcaatgacactaatttgctatttgaatattcagttttgaatttttggtaaaggctaaatatggcactatagctagccggcactgtgccacacgggttctcaacctgtgcttatattgcagtttgtggtggggcagctaaccagcccttgttcctctggtatgcagtaatgcagtttggcacaataattagccagtcctgtgccatgtggcacaggttctaagcctgtgctttatattaccctgtggtggggcagctaactgggcccttagttctctgccttgcagtttgacactttggcttactggtctgaagtcacttttacggccccgtttggatccttggaattgaattccattctaataatagtaatttaggcatgtatcaattaagctaatacagttttataagaaatatatttgtatattattattagcaagatgtgtgagatatttatgtgctacatttttacataaaggagtgagccgaagaacgtcttataagttgcagattagaaacattgtctgctgatatataaaatcatttctcattctccgtcccatgaatttgagataggcttctatctgaaatttggaaagtggtggaatgtcaaattccaaaccaaataggttactttatttagtaaattccaattcctccaaaatgaatggatccatatgctgcttgtgtgcattcaagcatgatatggcgacttctagtgtaacttcctgtgtctttgtgacaattcgttctgacctgcatggctgcaacttctttttaatggattcttcaagatgagcaccaaactgcatgagcagagagtgcaaacaatggagtgctaggtcagattaaatgttatggaggtgctatgatccacactagaaatcatcatgccacgttagaatccactcaagcagcatgcaatgtggtcaatggcggtaaatctaggaagagacacaggtgctagaatacaaaagcaaaagttgtagggcggtttgatgaaccccatatttacagatgggttttaggaatttccccttagcacgatcgtcatccaacaatgctcttctgtcaaccatgcttaataattcttagacaaaattctctttgccatggagtgtagcctgctggtataatactatcggctttgtcagtcttccattcacagataatgtggtttgttaggctacactatcttgatctggttactagctgtgacatgctagcagtcatgtactgtcctccacaatgtgttggtgtctaaaactgaaactcgcaaccaaaattctggagttaatgcacaattaagcttggctttcaagcaacggagcataactgcaggaaagatggaaatatcaggcctctatacttttgaataaaaccacttgcaccattctttcgcagagaaggtaaacggattgcttcatgactatgcataagccaaaaaccagtctgtgtcatcattcacttaatgaagtgtactgacatgaactgaatttgccttttgcagtatttggacgaaaataagcaacttattttggccatcctggaaaatcagaacttagggaagttggctgaatgtgctcagtaagtatctttcggaactattttgtgagacacctcatttttccgtactagtttatatctatcaattgataagggtgtctgaattagtttaaccgtaatgctgtctaaaattctgatcctttgacgtgttaagtcattttgccgtcattttacatacaagtttcagctgttagttgagaaggatgcatgggcatttacaattcataatattgatgcattaaaacttaaatgatatgtttgtaattagtaccttcaatctttttgatgacttaaccgtctcatgtgtacttgctatcttcttcacaatgtatttccaatagcgttcatttcgtgaacttgtaggtatcaagctcaacttcaaaagaacctcttgtacctggctgcgattgctgatgcccaaccccagcctccgcaaaaccctgcaggtcgccctcagatgatgcagcctggtatagtgcctggtgcggggcattacatgtcacaagtaccaatgttccctccaagaaccccattaaccccacagcagatgcaggagcagcagcaacaacaacagtttcagcagcagcagcagcaagtgcaggctcttacatttcctggacagatggtcatgagaccaggcaccatcaacggtatgcagcagcagcagcctatgcaggctgaccctgcccgggcagcagcggagctgcagcaggcagcacctatcccagctgacgggcgaggaagcaagcaggacaccgcgggtggggcgagctcagagccttctgccaatgagagccacaagagcgccaccggagcagataccgaggcaggtggcgacgtggccgagaaatcctaagtcgagcagcctgggcagggcgaaaaataatgccttgtatactagcaacgaaagaaaaaaagagtctttgaatgacagctactagcccctaccagtttactgtgtggtttagatgatgtagaacaaagtttagattggtgatgatgtaaaccgtccaatattgatactgcgttcttacattgctgtagtcaattatatgaataatttcatataagcatgttgccctagtggattttacctatgttttatgagctgatgtaaccaaaaacactgagcagcttttaattcagtatggcaattctgcagagttttcaccaatctgataagctgctccacacaattaaccctaagaattaacccaagcggaagcatttcaatacattcactcatacagatagacaaacatttatcaatacatagatgacatgtttccttaacaagaaaatgtcgatgagcaactaaaaacaaaacgagatgaaacacaggacaacttttcatttccagtacactattaaaatcgggcccctagcatcgatgcctttacttcttgccttcgatagggagtatttccaatccagccatccattcaagtaatgcaagccatttctgagataaatagccattggtttctctccttgtctcctttggataaaagccctactgccgtcgccgctttctcgtaacttcctttgggaacttgagaggggctgggagcgtcatgaaagtagacttaaaagcaccttctgtcacagatttgcatcccaactggtcatagtatggtttaagattttggcgggtcattttaaggtcctcacatatgtcgctggggttggatctgaagtcatcggcaaaaagtgttaggaccaatatgtagttggtcagaagctcttttttctctgttggcatgacactggaccccggttctgtaaacatgaacagcagcctgcgatatacagcctgcggggttgctggtccatggcttatctggttttcatttctgcctttccatttgcgattggacatggagccattccgcgccaatagagataggagatgttggatgtaggaaagtatccaagcaaacctctttttatcttcaccctaatgcaagagaaaagttgtttcttttagaaaacatatggaaaacatccatgaacacgatgtattaacaaaataaaaaatggcataagagcaagaattgtctgccatcattttggcagccaaactgtcacttccaaaagaggcgcacacagagcagtgccattcaacttgtcaacattgcagtagcaatggtgtctgctacactgttatcagcatgttatacaagtaaaaacggtcatgctaaggatcaattataaactgtcacaagttcaataagaagaaaaacaaaggcactccaaattaccacaaaac

SEQ ID NO: 212041 - DNA, 1589 bp, Zea Mays
cccgtgctcgcgcgcgcgcgcgctctctctctctctctctctcccctccctgtctccctccccctctcggagtctcggtcgtggcgacgacgactgggcaggccgacgagcacccaccaggaaaagtattgctcctagcctcctacagctagttctttttatgattaagctccaatgaaggattctcagacttgttctacaggatattcagagcacaacagagttgcagtcatcagcacagggtactaatgaagtgcaaagtcagcaaccaaacccgatgaccactgatgctcctgcaggaaattcgggttccttgtctatagctagtaatgacagtaagaaggtgtctcgcgaagacattgaacttgttcagaatttaatagagcgttgtcttcagctatacatgaacaaaggagaagttgttagaactctttctactcgtgctagaatagaacctggcttcactactttagtatggcagaaactcgaagaagagaactccgagttctttagggcttactatatccggttgaaattgaaacggcaaatcatcttgttcaatcatttattgcaacaccagtacaatttgatgaaatatccagcacctccaaatgttccattggctccaatacaaaatggaattcatcatatgccagttagcaatttaccaatggggtatccagtacttccgcagcctatcatgccggctcccggccagcctcacatggacccaatggcctgtggtctgtccaatggtcatgtggtcaatggaatacctgcaccaggtggttatcatccgatgcgcatgaactctggaaatgacatggttgtggacaacggagcgcccgaagcaccacatgctggtgctaccggcagcgtcatgtcatccgagatggccgtgagcccctcatcagcggcttcaagcaaccatgctccatttatgccgccggagatcccaggcatggccatggacgtgccaggcctagactcgacattcggatctgacgtagggaatggacctctgcaattaggaccagatggctcgtcgagagactccattagatccttggggcagctctggaacttcagcctctctgatctaacggcggatttgacgagtttgggagcagatttggacgtgctggagaactacaccggcacccctttcctgccttcggactcggacattctgctcgactccccggaccaagatgacatagtcgaatattttgctgacgccatcaacgggtctcagtcagacgaggagaggtcatagcgaagctagctcaaggtttttcaggcagggcgcagggatgtgtcttctcatggcctgctgcgagagatgctgcggctaatgtaatgtaactgtgccttgggcccgcgcccctgtgtgctgcggcaagtgtagctggtttaattagactttttttttaatttgtagctggttaattagaatcctaattctttggaataaaaaagtagtagctggagttatcggtaagaatcgctggatgtaatgcaaagctcgctctcacagtcacagctgggtgaccacaggaggacctcctttttgtttgttgtatatttgc

SEQ ID NO: 212042 - DNA, 1568 bp, Zea Mays
cccgtgctcgcgcgcgcgcgcgctctctctctctctctctctcccctccctgtctccctccccctctcggagtctcggtcgtggcgacgacgactgggcaggccgacgagcacccaccaggaaaagtattgctcctagcctcctacagctagttctttttatgattaagctccaatgaaggattctcaggatattcagagcacaacagagttgcagtcatcagcacagggtactaatgaagtgcaaagtcagcaaccaaacccgatgaccactgatgctcctgcaggaaattcgggttccttgtctatagctagtaatgacagtaagaaggtgtctcgcgaagacattgaacttgttcagaatttaatagagcgttgtcttcagctatacatgaacaaaggagaagttgttagaactctttctactcgtgctagaatagaacctggcttcactactttagaaactcgaagaagagaactccgagttctttagggcttactatatccggttgaaattgaaacggcaaatcatcttgttcaatcatttattgcaacaccagtacaatttgatgaaatatccagcacctccaaatgttccattggctccaatacaaaatggaattcatcatatgccagttagcaatttaccaatggggtatccagtacttccgcagcctatcatgccggctcccggccagcctcacatggacccaatggcctgtggtctgtccaatggtcatgtggtcaatggaatacctgcaccaggtggttatcatccgatgcgcatgaactctggaaatgacatggttgtggacaacggagcgcccgaagcaccacatgctggtgctaccggcagcgtcatgtcatccgagatggccgtgagcccctcatcagcggcttcaagcaaccatgctccatttatgccgccggagatcccaggcatggccatggacgtgccaggcctagactcgacattcggatctgacgtagggaatggacctctgcaattaggaccagatggctcgtcgagagactccattagatccttggggcagctctggaacttcagcctctctgatctaacggcggatttgacgagtttgggagcagatttggacgtgctggagaactacaccggcacccctttcctgccttcggactcggacattctgctcgactccccggaccaagatgacatagtcgaatattttgctgacgccatcaacgggtctcagtcagacgaggagaggtcatagcgaagctagctcaaggtttttcaggcagggcgcagggatgtgtcttctcatggcctgctgcgagagatgctgcggctaatgtaatgtaactgtgccttgggcccgcgcccctgtgtgctgcggcaagtgtagctggtttaattagactttttttttaatttgtagctggttaattagaatcctaattctttggaataaaaaagtagtagctggagttatcggtaagaatcgctggatgtaatgcaaagctcgctctcacagtcacagctgggtgaccacaggaggacctcctttttgtttgttgtatatttgc

SEQ ID NO: 212043 - DNA, 3667 bp, Zea Mays
ccttctttctccttgtgtgttgtgttggggtgtctctcccctttataaaacccaactacgactagggaaacgaaaggaaaggaaaggaaaggaatgcaaggaaggagagacacaatcggcggcaacagcgattgatttcgtccgccgcacctctcctctctctccgccgccgtcgccgccgccaacaagggcgaaaccttccgatttcttccacttctgctgttagggttccgcctccacctgctctgctctggtatcttctgcgcaatgccaatgctgtaatggatcgatcgtcagattcttccaatccaccaggtcttgccgtgcctgccgcctcaaagccaccacagatggccgcaaataacaacccttggagggcccctctgccaccgctgctcaatgctcgcgctggttttggtggcgatacaagcctcttctcaacctcgctgccggttcttcctcatgaaaagtccatttctttcagtgatctttgctgattcttctcatggtaccccaccaatggatgacactttgaccaaaatgaaagtcctggctaatgatcctgatgagaaggactacaaatttgattttgatcttcggcagatagatgacttgttgccagatgaagatgagtttttcgcggggatcactgatgagactgagcccgttgcgcagacaaataccacggaggaattggaggagtttgatgtgtttggcaatggagggggcatggagctggacattgaccctgtggagagcatcacagttggttttgcaaattcaagtattgtcgacggggctagatgcaatagcatcaacccttttggtgtcccaagcactgtaggaactgtggctggggagcacccgtttggagagcacccttcgaggaccttgtttgtaaggaacatcaatagcaatgtcgaggactctgaactgcgatctttgtttgagcaatatggggacatccggaccctttacactgcaacaaagcacaggggctttgtaatgatatcttattttgatatcagagctgcacggaatgcaatgcgcgcattgcagaacaaacctctgaggaggagaaagctggacattcatttttccatcccaaaggagaatccatctgacaaagatttgaaccagggaactcttgttatttttaacttggatccgtcggtttctaatgaagaggttcgccagatttttggggcatatggtgaagtaaaggagataagagagacaccaaacaagaaacaccataagtttattgagttctatgatgtaagagcagcagaggctgctcttcggtcactgaataaaagtgagatagctggaaaacgaatcaagttggaaccaagtcgtcctggtggaacacgcagaaacttgatgcagcaacttggtcacgatttggaccaagaagagccaagaacctacagacattctcatgttggttcacctattgctaactctcctccaggggcatgggctcagtacagtagtccaacagatagcaatatgctgcaagctttcaccagatctccaactggaaatggaatgagtcctatcggaattccttccctgatttcaaatgctccaaagattgctcctattggcaaggatagcaaccggtctaagtatgatcaagtgttttcaaatggtaaccagtccgtgggagctgcatttcagcactcccactcataccaagatcacaacagtgaacacatgagttctagtcctgggactttatcagggccccagtttctctggggcagtccaaagccatattcagaacattcaaaatcccctatttggcatccaccaggaatcggatctgcattgtcatccagcagtcgcactcagggccaaggattcttgtacagtagccgtcaggcttcattatttggttcttcggatcagcaccatcatcatgttggctctgccccttcaggtgctccatttgagagccattttggcttcttacctgaatcgccagagacatcttttatgaagcaagccaggtttgggaacatgggtaattttggtactggccgaaacgggggaggtctcctgctgggcatggctaatcgtgcttctgtgaatcctggttcttctctaattggaagtctgacagataacagctctactaacttcagaccgatgttgtcgcctagattgggacagacattttacactaatcctccataccatgggattggtacattcggacttgacagctccattgaccgtgtccgcaaccgccgggttgacagcagtgtgttgcaggctgatagcaagaggcagtatcagcttgacttggagaagattcacagaggtgatgatactcggacaacattgatgattaagaacatcccaaacaagtatacatctaagatgctcctggctgcaattgatgagcttcacagaggaacttatgactttttctacctgccaattgatttcaagaacaaatgcaatgttggatacgcgttcgttaacatgatatcgccggtgcatattatatccttctaccaggtgctttcctttcttggcctttgtcctgtgtttgcaatagttacctgcagagttaagaacttgttccctgtccagctgagttaatcagcaatacggattagcaatagtataattactctgaacagcttgtaatatttatgtactgatgtacatctataacctgcaggcttttaatggtaagaaatgggaaaagttcaacagcgagaaggtagcctcgttggcttatgctagaattcaaggacggtctgcactgatatcacattttcaaaattcaagtttgatgaatgaggataagaggtgccgccccattctttttaatcccaatggtcaggagtctgtgcaccaggaagcatttccaatcaatggcatatgcatccacatgcttccggaagatgattaccttgacaatgaagatggcaagagtctgaacgagaagactggagagagctcgaccgatatggccgggagtttgtgacgtctgcgatgatagcagacaggatcagaatggccatacatataaatctaactgtctagagagagtatccaccccccaaattgtataaaaagcgaggaaggttgatggttagcgctgaattttgtggtctggtgtggcatggcacgtcttttggtttcagatgtcgccccggcagtggaaatgggagctgaagctcaagcgatcgagcttcgaactggagccgggagcttgcttgtagaatcccccccctctgtagatagagatgtgggggtggaaccgcccaaaccgctgcttctcatagtcgtgcttgtttttgattgcttgctgtaaaaaggtgaactgaactgaagaaaaaaaaagccaaactgtacagtttagaacttttgtgcatattttgcattctggcatcttaatgtgcagtgctgaagttggggcattgatcatgcaaagttatttgcatgattgtatccatggaatctgaccaaaatatagaaagctgcttgcgtgctttctctgttctgttcacaaggaaaagggatgtaaatccgacgttaattacagttttctcgtctagcagttgccccaattgcaatattggaacaatttgatgcaaactgtgccaatgcccaatggtcatcatgatttttcaaaacaatcattgtg

SEQ ID NO: 212044 - DNA, 151 bp, Zea Mays
atacttgtgacagtttctcatacatcacagacaatgaataccaagaagaatgttgttctttgctgccttcttttcgtgctcgttctgcatgcagatcacgctctagccatcttcagacttctcatttaaggaagggaaaactcatctatgt

SEQ ID NO: 212045 - DNA, 1771 bp, Zea Mays
ggacattctactttttcataaagtagacggacgccatagttatctagctcacataaatcctgagcctcacaatgtgccagctgctttcactggatccctttctctgcatcagagatcagaatcgacggagagtatcgaatccattgttcgcagatatggtcgtcgtttcgtacctatcaagcgggactaatgtatgctgacgcaaaaggaggccgcgcagcgcattatataaaaacccatgtcccaggagttaggagtagccccaacagacgaccactgtatgcttgtggaaatgggcagcagagcagctttcgtggtcgcgtttctcctgagggctatatatgcaggcacgcagatactcaccaaggctgccttcgatgaaggcatgaacacgtcggtctttgttttctacaggcatctgactggtatcctcttcttggtgcctattgcttttgtgcttgagaggaaaactgcccctccactgtcattcagagtctctctgaaattgtttttccatgcactatacgggatctctggagcaataaacatatacggcctcggtctcagctattcttcagcaacatcatcgtctgcgatatttaacctcctgccagctgtggctttctttctggctgttcttttggggatggagacactgaacttgaagcggttccacgggatcgcaaaggctgcaggcgtgttgttcagcactgctggcgtgactgtgctggcgttctaccaaggccccgcattcagatcgttcatccaccacaccgctttctcccatcacaacgtccacgctggggtcgttaccgccgctcatcctaaaagcgtctggatactggggattttcctgacgaccttgtcgactgcatcgtgggctctctggacggttcttcaggggccaatgctggaagcgtacccatccaagctgctcaacacgaccctccagatgatcttcgcgacggtccagtgcttcttcatcgccctagcggccgagagggacttgtcgaggtggaagctggcgctggacatacgcctttacgctgtgatctactctggaatacttgtctcgggagtcgcttactacatgcaagtatgggtgatcgagaagagcgggcctgtcttcttggccatgacgatgccgataaccttgcttgtcaccatcattctgtccctgtttctcggagagccggttaccctgggaagcatcttgggtggactgatcatggtcggtggtctgtacagtgtgctctgggccaagaggtctgagcaggtgcatgccagcaagcagcaaatggcggcgcctactcctcctccagcagaggcgacacaagtgtaggccgagcttagcttgtttgtggttgcacacccccgttgttgatgctggtagtttgcacgtattttgcagacacaagtttgtacgtattttgcagtgactgagatcgagagaactgtgaagttctgattttagataatggaaacctgaatgagcacatgcatcaggcccctaaggactcccctaacagctgctaaaccacgcctagcacttgtcttttgattacagctgacattctcctcctaatcctaagacttgtgcagttgtgcttcatgttgacgacgccaattcggtcacaaagttctctgaacttctcacgcctaagtgacttcgtcgtcaggatgtcagcgaattgttagaaatctgctcccttcgtccacacactcactcacgtgtgtggaatttttgcctgttcgtttggctttaatctgt

SEQ ID NO: 212046 - DNA, 495 bp, Zea Mays
agccaactgccaacccgaccgcgtcgcctctctcctcctttcgcgtcgtctccctcctccactctcctctcctctcgcgtccgcagcttcccttgccggctagggtttgcagatgacgacggcggcgcgccccacctgggcgccggccaagggcggcaacgagcaagggggcacccgcatcttcggcccctcccagaagtactcgtcccgcgacctcgccgcgcatacctcgctcaagctcagaaaagacggtcaacagacccaagaggagttacagaagaggaatctcagggaggaacttgaggaacgtgagcgcaagcactactcttccaaggataagtcctatgctgaagaaagagaccggcggaaaagctcaagccagctactcctagaaggttcaaagagagaggcagaggataagatagttccacgagaaatcgatgcagatgactccgatgtggagcctaaaagtgatgatgagagagaagacaacac

SEQ ID NO: 212047 - DNA, 815 bp, Zea Mays
agccaactgccaacccgaccgcgtcgcctctctcctcctttcgcgtcgtctccctcctccactctcctctcctctcgcgtccgcagcttcccttgccggctagggtttgcagatgacgacggcggcgcgccccacctgggcgccggccaagggcggcaacgagcaagggggcacccgcatcttcggcccctcccagaagtactcgtcccgcgacctcgccgcgcatacctcgctcaagctcagaaaagacggtcaacagacccaagaggagttacagaagaggaatctcagggaggaacttgaggaacgtgagcgcaagcactactcttccaaggataagtcctatgctgaaagagaccggcggaaaagctcaagccagctactcctagaaggttcaaagagagaggcagaggataagatagttccacgagaaatcgatgcagatgactccgatgtggagcctaaaagtgatgatgagagcgatgaagatggcgacgacgacgacaccgaagctctaatggcagagcttgagaggattaagaaagagagagcagaggagaagcttagaaaggagcggcaacaagcagaggaggaggccaagatgaaggaggctgaactgatgcggggaaaccctttgattaatatcaacaatcctggctccttcagtgtcaagagaaggtgggacgacgacgtggtgttcaagaatcaagcacgtggagagaccaagacgccgaaacggttcatcaacgacaccatcaggagtgacttccaccgaacaggaaggaaagaagccaggagtgcaaaccactatagtt

SEQ ID NO: 212048 - DNA, 2152 bp, Zea Mays
ggccagggccgccgttgtgtccgtctgggtctctcggactgtgtgcttggtcgtttgccaccccctgtggccttgtcccttgaattcgaaccccgcctcctgcttcccgatttcaaatagctggcccgcggtgcctgcagtgcagcactgcactgcacgcctccgccatactgcgacgccgccgtgcatcgcttcacgcagagcagtgatggaatcccatcacggcggcgacgggaaggcgcgggacaagttctcggtgtaccagaacccgtccctcacccgcgccctagactcccgcagcgcccgcccctccgtcacagtcctcctcgtcctcgcggtcatatccgtcgcctccgcatcctccttcctcgccctcacctcccgggaggagcagctcaccaagctcgccggacgagcgggtatctctgtccttgctgctgtttttgtcattaggttggtggaagcagcactcggtcttgttgcacttttcacactgctggggttcttcagggcactgatgttatacaatgggcagaaggcactggccaaggccgacaaggttgtcttgtctgaacgccaactggggcttcttgggttaaagatggcaggttcagaaggaggtgggaaaggtgagcaaatcaaaaggcctcccaagaccaagccatcaacaccatcggaaccaattgtgcctatcaggaggtcttcgttcagctatacaccatctcggccttcggggcaatctaggattggttccagccatttgagccctggtggtgagagactgatcatggcattgccaatgtcaccctccacaccattgcagaagcatgtctcttctccttcaactccatggtcaaggaaaagctcaggcagtgccaagggcatacagacagaggcaatgctggaccagttcttggctggcttggatgtaaacattgacaaaatcatggatccagagactaagactacaacacctccagcaaccattacaagctttggtgttgctacccctgtttcaattaccacatcgaccaccccttctggtgctgcaaggagcacacctctgagacctgtgaggatgtctcctggctcccatcagaaatacagcacgccaccaaaaaagggtgagggtgaacttccaactccaatgtccttagagcaagcagtggaggcctttgagaacttgggtgtatatcctgagattgagcagtggcgagatagtctcaggcagtggttttcttcagttgtgatgaacccacttgtacaaaaaatcaaaacaagccatactcaggttaagcaaacaacagctactgttggggcttcagttactgttagccaagttggaagtgatctgccaagcacaacaccaccagttgccttgtctcctcttggtgggactaaagattggcaaccgactgtcacggtagatgaggatgggatccttaaccaattgcactctgcactcctacattctcgagatgcccctgttgcgcaaacttttggcagtctacaacagccacaacggaacccccaccttccagctattcaagcatgtattgatgcaatcacagagcatcagaggctcaacactctgatgaagggagagctgataaaaggcttgttgccacagagtagtgtccgtgctgattacactgtccagagagttcaagaactcgctgaaggaacatgcttgaagaattatgattacatgggtcatggaaatgactatggtaaatcagaaaagaaatggaccaccgagctacctactgactcacaccttcttctgtatctgtttgctgctttccttgaacatccaaaatggatgcttcatgttgaccctacctcgtactctggttcccagtccagcaaaaatcccttatttctgggagttcttccaccaaaagagaggttcccagaaaagtatgttgctctgatatcaggtgttccagcaattattcacccaggggctcttatactggctgtgagcaagcagaatcctccaatttttgctctatactgggacaagaagcagcaattttctcttcagttgggagaaacaaacacagaagaaatgtaggaaacgggtagttttgtttgcttaaggagttgaggtatgacttgaacgaaactacatttagttatcatcttatgt

SEQ ID NO: 212049 - DNA, 2201 bp, Zea Mays
cccacgtccagtggaggaaacaggcttccccacgaggccacgattatttacgaacgaccccaactcctggagcgctctggaccgccctccccagaccccaaccaacggacgacgactccgtccagaattccagatcacgcatatctctctccctccctctctctcctcggcctcgccgcccctgtcccctcctacactgccgcgcgcgcatcgtggaatggagatccctccggccatgaagtgatctatttcttcgtcgcccctagctcgcgcacaggagaaggagaaggagaaagagaaagcaggagcccgctcgcggcgaggcagcaggatgtcttcgtctaactcgccctgtgccgcgtgtaagctgctgcgccgcaagtgcacgcagggatgcgtgttcgcgccctacttcccgcccgacaatccgggcaagttcgcgagcgtgcaccgcgtcttcggcgccagcaacgtctcgaagctcctcaacgacctggaccagctgcagcgggaggacgccgtaaactccctggcgtacgaggccgacgcgcgcatccgcgaccccgtctatggctgcgtggcctacatctccgtgctgcagatgaagatcaaacgggtccgcgacgagatcgccaacgcgcgcaaggagctggcggcttacattgggaccgcggcctttgcgccttacgtcgccacgccgcagtaccaccaccatcagtacgcggcaggcgccgtgcctctcgccgtcggcgtcgggccgcagcacggtcacccgcaccaccagcagcaacagatcatggtgcaccagcacctccaccaccagcagcagatggcagcggctgccgaggtgcagcagcagctcgctgtggccgtggaggtcgcgcgagagcaggatctcatgatgcggcaggccgcggtatacgcgcacgccgtgcccagcggcggccccacggtcgccgttgtgccgcccgacgcgctgccgtacgagggcggcttcctcttccagcagcagccgcccccttcgcaggcgcagaccgccgtggcgctcacgtaccagatggagcagtccccgccgtcgtcgtcctcgggccagtctcaccccgaggtgtcgcagcagcacaatacggatggcagcgacgagggcagcggtggcggtggtgtcgtgccgccggcctgatctgagtcgtctcgtctgacggcgcgctgcacgcttgcctctcattcgagcttgctttagccttttgctttcttgtgtttggtgttcgtaatgaatctttttccccttccgtcgtcttcatcatatggccggcgtacgtcttggcatcgtctcggtctagaatccatgcacgtttcaagtggcaaaattccaattatttccctcccgaagccagactatagctggattcttatcaaggttccacatgatcagttgcctttcttcctcaagagttagagccaaataaatgctggacagaaagagtggtaggaaatggcctggggacagatactcatcatatggatcagtgtaacacagagaaattaatggtgggaaggtggaggtagacagaaacagcagagagaagcatgcatggtgtgcttcagcgcaggaggggagcagtaaatggtgaagtaagataggaaacaagatgcatgcaagtagcttgcaatttgcaggagggagcagcagcaggcatgaataaagaaatcaacacgaacatgataagcaactcatataatatactgactccgttctcgaatatttgttggccattagtttatttttaaactaaaacatgacataaaaaagaacggagggagtatcttagttcacttgtgcatttggtgttgaacatatgtttttttttcaccgcttaattttattattattctttcatcttttcccctccttttctgtttctcattggtaaattctttctgtcgtcttgcattgtgtgtataaagaaatagaatcctttcatttatttgaacataaatggatggaggcaagagctagttagtcatcgttttaatttgtaaagtcaatgttgttttgtctgaattattattatatatccggtagccttcatgactatggtagggccaccaggctcacttcgacattctaaaaatgagccctaccatatagtcccgtcaatatgtatcagtttaaataagttaaatgtgtgttatttctttagaag

SEQ ID NO: 212050 - DNA, 1349 bp, Zea Mays
ccagaccccaaccaacggacgacgactccgtccagaattccagatcacgcatatctctctccctccctctctctcctcggcctcgccgcccctgtcccctcctacactgccgcgcgcgcatcgtggaatggagatccctccggccatgaagtgatctatttcttcgtcgcccctagctcgcgcacaggagaaggagaaggagaaagagaaagcaggagcccgctcgcggcgaggcagcaggatgtcttcgtctaactcgccctgtgccgcgtgtaagctgctgcgccgcaagtgcacgcagggatgcgtgttcgcgccctacttcccgcccgacaatccgggcaagttcgcgagcgtgcaccgcgtcttcggcgccagcaacgtctcgaagctcctcaacgacctggaccagctgcagcgggaggacgccgtaaactccctggcgtacgaggccgacgcgcgcatccgcgaccccgtctatggctgcgtggcctacatctccgtgctgcagatgaagatcaaacgggtccgcgacgagatcgccaacgcgcgcaaggagctggcggcttacattgggaccgcggcctttgcgccttacgtcgccacgccgcagtaccaccaccatcagtacgcggcaggcgccgtgcctctcgccgtcggcgtcgggccgcagcacggtcacccgcaccaccagcagcaacagatcatggtgcaccagcacctccaccaccagcagcagatggcagcggctgccgaggtgcagcagcagctcgctgtggccgtggaggtcgcgcgagagcaggatctcatgatgcggcaggccgcggtatacgcgcacgccgtgcccagcggcggccccacggtcgccgttgtgccgcccgacgcgctgccgtacgagggcggcttcctcttccagcagcagccgcccccttcgcaggcgcagaccgccgtggcgctcacgtaccagatggagcagtccccgccgtcgtcgtcctcgggccagtctcaccccgaggtgtcgcagcagcacaatacggatggcagcgacgagggcagcggtggcggtggtgtcgtgccgccggcctgatctgagtcgtctcgtctgacggcgcgctgcacgcttgcctctcattcgagcttgctttagccttttgctttcttgtgtttggtgttcgtaatgaatctttttccccttccgtcgtcttcatcatatggccggcgtacgtcttggcatcgtctcggtctagaatccatgcacgtttcaagtggcaaaattccaattatttccctcccgaagccagactatagctggattcttatcaagctctttgtaaagtgtgttcctgcgg

SEQ ID NO: 212051 - DNA, 1163 bp, Zea Mays
tatgtgctaaactgcactattcatggacagaactgccttgctgtttctttgttttccggtgattttgttgtttcttcgacaatggttatggaatggatgttttccagtattgccagttcagctataccaggcttggttattattcctgtataccagtttagctttgcgtgagaacatactgcgagttaatggaagtgatattcgtccttggtggatacttcatcactactgtgccatgctgatgtctcttgtaagtctcacatgggagataaaggggcaacctaattgtgcacgcaagcagagaggcgtggaacttttcctttgctgggccataatgcaaggatttgtcatgatgctgcagaatagatatcagcgtcaaagattatatactaggattgctttggggaaggctaaaagaatggatgttgtatggggagagactgctggtgttgaaggtcaattgttgctgttgtgccctctccttttcctcctgcagggattcgagggttatgttgggtttttacttctgcgcacagctcatactggcgttgtccctgagtggcaggttgtggtatgcgggatcctgctgatcgcgatggcaatcggtaactttgcaaacacagtggacaccctggtaaccaagtcccggttcaaggcgaagatgaagaaatccaagggcagacgggacctcgacacatgcccctcgccaacaggttcatcatcgccgatagattcagcgaccaccaaagcatgaacaaggccaagaggaaaaggtgcccgtgtttaacccgggtgtgttaccactgtaaagcattttagtgtttttttttcttggccgtcagctcgtaatcctgtccgtcgtctgtgtcgaagctcatactcgtgtaatcaatcatcaggcaagtaggctgctgatggttctaggctggaggtggccgagaataaacttgtggtgtttgtttatatacctgtaccctgaatgaacatcgagtgggctagggtggtgggcttaggactatgtaaggcttagcaaaattttccaagtatagttgtgagacaggcaggcatttgtcacaatgaatgaaacatgcgaagttgtatacacgttgtggcaatgtgttgctttgtatgttggttggtgcatgcttacgttgctctgaaat

SEQ ID NO: 212052 - DNA, 268 bp, Zea Mays
atataaggcccagcccaccgatcctcctcttctgtcttctcccctgcgtcaaagacgacgcaagcccttgcctctccctactccaaaccctcgccgactcagatccagcttcctcgcaccgccgtcgccatgccgttcactccaggcccctactctggcgtcagcaccctcgcccttgtggcgagggcgtcggcctttggcgtcggtgtcgtctacgggagcatcaagctctcaatcctaaagaacttgaacagggagcacggagtcc

SEQ ID NO: 212053 - DNA, 427 bp, Zea Mays
taaccacggtgaaggggccattacttggttggctacatgtggatgctcctgctcctgatataagttcctgcaagatggaattttgtatatataggatcataatagatgtagtagctatttcttgtgtctcctgttgttgttgttgttgtcgtcgtaggactggaaatcatacctccgtgtgtcctgtaactgaaggtacaaaatttactggatggagggatctgatagtatgttgcagccccccctttttcgtttcatccttgatgtaattgtggtaccgatgtattttgtacaagaacaaatcaataataatgcaatcgaaagcgagctgttcatacgcagacacaacatgttgcattgaccctaggtgcattcggtaactgaaaatcggagctgtgtatactgtggacatgtcatctttggtatg

SEQ ID NO: 212054 - DNA, 551 bp, Zea Mays
tttgtcagcagttcaagaggactacaatgcttggaattactggaagatgccattgcctgatgttgatttgtgaggtacaagtcgagtctgcacaacagcactgcactaattttatgatgtgccgtagtgatcatgagaaggccattacttggttggctacatgtggatgctcctgctcctgatataagttcctgcaagatggaattttgtatatataggatcataatagatgtagtagctatttcttgtgtctcctgttgttgttgttgttgtcgtcgtaggactggaaatcatacctccgtgtgtcctgtaactgaaggtacaaaatttactggatggagggatctgatagtatgttgcagccccccctttttcgtttcatccttgatgtaattgtggtaccgatgtattttgtacaagaacaaatcaataataatgcaatcgaaagcgagctgttcatacgcagacacaacatgttgcattgaccctaggtgcattcggtaactgaaaatcggagctgtgtatactgtggacatgtcatctttggtatg

SEQ ID NO: 212055 - DNA, 4365 bp, Zea Mays
ccttcctcggcatccttcggtcccggaatatgcccccggcgtctccctcctcgcgttcctctcgtcggtgagctcctgccgcctggctcgcacagccgatttgcctcagtccagatcgtgcctccttcttcctagatcgggtccgaattcggctaccctcgccaccgccctacgccaggtgccgaggcctccgccgatctcttcgccggcgaagagcggccaccagcttgtggatggaggaggaggcgctgggtcgtggtggtggtgaaaagctttgatttcgtagccgtggtggacgccgctgctaatgcccttgccgtgcctcgttggtggcgtgcaagatgtatgccgtggggaaggtgggcagcctcatctcccgcagcgtgtacaccgtctccggcccgttccacccgttcggcggcgcggtcgacatagtcgttgtgcagcagcaggacggcagcttcaagagctcgccgtggtacgtgcggttcggcaagttccagggggttctcaagtcgagggagaaggttgtcgacatctccgtcaatggcgtcgacgcagggttccacatgtacctggacagcaacggcgaggcttacttcctcaggaacgcggacccgaatggtgaggaaggggagttcattgtctcccccgcctcgtcgggagatgagcgagaggtgccgatccaggaagctcagctgaggaagtcgaagagcacttcgtgtgatagctcgacgatggaagccgacgtcggtgagggcaagattcttgcgaggacaacctcgaggcggataaccatacttgaaaggatgtttggccggaaatcgattaagaacaatgcccatgctgtggatagggtgagttcattggagcgtgcagaggtcgctgcagaactcctagataccaagtggtcaacaaatctcccacgtagttcaaaacctaatggttcaaatgatgagccttccaagagcaacaatgatcagatggaaacctcaaaacctgtattttcggaacatagtttggatcatgggaaagagatggactctaactgtgacaatgctcactgcaattcatgcagccctcgtggaggaagaaacagttcagcagatgaaaccgatccgtgtttacaagccactattgtgaagaaagaggtggttgagatacacgcgcgtgagagcagcgacttcactgataatatcacttcaatcacacatcaacaagggtcagaatcttcgtcaaatgatctgggaacagataaacttatgcagcagtctgtcgatactcaagatgagttgctgcatgatgttgaagatgtaactgaaagggagacacatgcagaggaggttatttccaatgacatttttgaaatccatgttgttgagacagacattacaagtggtaagagcgaggtggattctgagattgttactgtggatccagaaccagatcgagctaaccagaattttacagatacaaattaccaaaattatggcaccacagatatttcatctgaaagacatgaggtttcattgatcccttctgcacaggatgcagttcaagagaaaatagttatcctcagcagttctgaggctgtggagggctcactagatgcagttccagagaaagtagtcattctcagcagttctgagactgtggatagctcatatgctgtgtcctgtattttggatgacacagttcatgatgcttctgatatctcacaggctgacggtgtacaacatgaggagcactctagtatctctgatgggagtacagaaaagctaatttctgaggaaagttcattagtatgctatggtgttcccagcaacaaaaaagacttggttaatatagctgttcaagaaagtaaagcctttatcttaaaaaatcctgcctcccaaatcttggaagagagtggtccaggtttggatgtatctacagacagtgtttccctttcacatgcagactcagctcctgatttagcttgtcagcatgtttctcctaatgttgaagatacaacaagttatgagcctggcattggtcctgaagatgtaacaaaaaactcagttgtggaaaatggagcatgcagcggggaacttgttgtttctgttattcagacctcagcgggagatggactgacaaaatgcattgctcatccagctgttttttctaataaaatagaagtagaaggctcaccaacttctgctggattttccagtttgatcagtgttgaagtgcaaaacacaaaactagaagatgacacaaacaaatctagttctgtgattggagatgaagctggttttgtgcctgaggctacagctgagcttgatgaagaagcagaaccagttatatcattatctgaatatacagaagaaattcagtttcaatttagtgatgctgaaaattttgcagatagaaaggccacggatgacatggtggctaacaaaacaacaggtgaagtagaacatgatgaatctgattgtgacacagagaaacaggaagaaggtgatgtaggtcttgtaaatgacttggagaactgttctgcgtcattaaagcctaaatcagaagctattggtgatttttcagaagaaaataacagccctcctgaggttaccaacactgtagcacttgatggcaaccatgctgatgatctgaaagttgatgcgttcattccttttgcagaattatcactatgcagacacctgttatctgaaggcatgggggaggatgctgcttgcagtgcatttgattctgagaaggtaaccttagaggagttccgtaacatgaagcaatcactgatgcgaaacaacaaactagttgttaggattgctggccgctactttccctgggatgctgctgcacctatagtactcggtatgatttctttcagtgaggaacaagtttttgaacccaaaggaatgataaatgtggagcgagttgagcaaagtgcagctccaggtggcagctggagcatctggccatttagtttcagacgaacaaggactattactgctatccagccagtttgtgaaagtattgttgagacttctgtatccactcctaaagaattgacacattttaaagaactagatagagaaaggaataaatccagggtaaagaggattgagaggaaggtgcgatcactcactccaacatctgacgagcttgcatctcttgatctcagagagggcaggaacgtggtaacatttacgttctcaactgcaattgttgggaaacagcaggttgattgccacatatatttatggagatggaatacacgcattgtaatatctgatgtggatggaactatcaccaagtctgatgttcttgggcagttcatgccactagttggagttgattggtcccaaaacggagttgctcatttattttctgcaataaaggaaaatggataccagcttctatttctgagtgcacgcgctatttcacaagcccacatcacaagacagtttcttttcaacctaaagcaggacggcaaagcacttcctgatggccctgttgttatatctccagatggtctcttcccgtcactttacagagaagtcatcagaagagctccgcatgaattcaagatttcgtgtctagaggccatcaaagatttatttccacacgactcaaatccgttttatgctggatttggaaatagagacacagacgagcttagctacctcaaggttggtattcctatgggcaagatcttcataataaaccccaagggtgaagtcgcagtgaaccgacgggtcgatacaaagtcgtacacatccttgcatgctcttgtccacgggatgttccctccaatattgtcgtcatctgagcaggaggactacaatgcttggaattactggaagatgccattgcctgatgttgatttgtgaggtacaagtcgagtctgcacaacagcactgcactaattttatgatgtgccgtagtgatcatgagaaggccattacttggttggctacatgtggatgctcctgctcctgatataagttcctgcaagatggaattttgtatatataggatcataatagatgtagtagctatttcttgtgtctcctgttgttgttgttgttgtcgtcgtaggactggaaatcatacctccgtgtgtcctgtaactgaaggtacaaaatttactggatggagggatctgatagtatgttgcagccccccctttttcgtttcatccttgatgtaattgtggtaccgatgtattttgtacaagaacaaatcaataataatgcaatcgaaagcgagctgttcatacgcagacacaacatgttgcattgaccctaggtgcattcggtaactgaaaatcggagctgtgtatactgtggacatgtcatctttggtatg

SEQ ID NO: 212056 - DNA, 4601 bp, Zea Mays
ccttcctcggcatccttcggtcccggaatatgcccccggcgtctccctcctcgcgttcctctcgtcggtgagctcctgccgcctggctcgcacagccgatttgcctcagtccagatcgtgcctccttcttcctagatcgggtccgaattcggctaccctcgccaccgccctacgccaggtgccgaggcctccgccgatctcttcgccggcgaagagcggccaccagaattctggtggttcctgtagcttgtggatggaggaggaggcgctgggtcgtggtggtggtgaaaagctttgatttcgtagccgtggtggacgccgctgctaatgcccttgccgtgcctcgttggtggcgtgcaagatgtatgccgtggggaaggtgggcagcctcatctcccgcagcgtgtacaccgtctccggcccgttccacccgttcggcggcgcggtcgacatagtcgttgtgcagcagcaggacggcagcttcaagagctcgccgtggtacgtgcggttcggcaagttccagggggttctcaagtcgagggagaaggttgtcgacatctccgtcaatggcgtcgacgcagggttccacatgtacctggacagcaacggcgaggcttacttcctcaggaacgcggacccgaatggtgaggaaggggagttcattgtctcccccgcctcgtcgggagatgagcgagaggtgccgatccaggaagctcagctgaggaagtcgaagagcacttcgtgtgatagctcgacgatggaagccgacgtcggtgagggcaagattcttgcgaggacaacctcgaggcggataaccatacttgaaaggatgtttggccggaaatcgattaagaacaatgcccatgctgtggatagggtgagttcattggagcgtgcagaggtcgctgcagaactcctagataccaagtggtcaacaaatctcccacgtagttcaaaacctaatggttcaaatgatgagccttccaagagcaacaatgatcagatggaaacctcaaaacctgtattttcggaacatagtttggatcatgggaaagagatggactctaactgtgacaatgctcactgcaattcatgcagccctcgtggaggaagaaacagttcagcagatgaaaccgatccgtgtttacaagccactattgtgaagaaagaggtggttgagatacacgcgcgtgagagcagcgacttcactgataatatcacttcaatcacacatcaacaagggtcagaatcttcgtcaaatgatctgggaacagataaacttatgcagcagtctgtcgatactcaagatgagttgctgcatgatgttgaagatgtaactgaaagggagacacatgcagaggaggttatttccaatgacatttttgaaatccatgttgttgagacagacattacaagtggtaagagcgaggtggattctgagattgttactgtggatccagaaccagatcgagctaaccagaattttacagatacaaattaccaaaattatggcaccacagatatttcatctgaaagacatgaggtttcattgatcccttctgcacaggatgcagttcaagagaaaatagttatcctcagcagttctgaggctgtggagggctcactagatgcagttccagagaaagtagtcattctcagcagttctgagactgtggatagctcatatgctgtgtcctgtattttggatgacacagttcatgatgcttctgatatctcacaggctgacggtgtacaacatgaggagcactctagtatctctgatgggagtacagaaaagctaatttctgaggaaagttcattagtatgctatggtgttcccagcaacaaaaaagacttggttaatatagctgttcaagaaagtaaagcctttatcttaaaaaatcctgcctcccaaatcttggaagagagtggtccaggtttggatgtatctacagacagtgtttccctttcacatgcagactcagctcctgatttagcttgtcagcatgtttctcctaatgttgaagatacaacaagttatgagcctggcattggtcctgaagatgtaacaaaaaactcagttgtggaaaatggagcatgcagcggggaacttgttgtttctgttattcagacctcagcgggagatggactgacaaaatgcattgctcatccagctgttttttctaataaaatagaagtagaaggctcaccaacttctgctggattttccagtttgatcagtgttgaagtgcaaaacacaaaactagaagatgacacaaacaaatctagttctgtgattggagatgaagctggttttgtgcctgaggctacagctgagcttgatgaagaagcagaaccagttatatcattatctgaatatacagaagaaattcagtttcaatttagtgatgctgaaaattttgcagatagaaaggccacggatgacatggtggctaacaaaacaacaggtgaagtagaacatgatgaatctgattgtgacacagagaaacaggaagaaggtgatgtaggtcttgtaaatgacttggagaactgttctgcgtcattaaagcctgtgagtagccctgtttctattcctgcaattgacttccagtcaggaaatagtaacagagaggctaaatctctaccaaatctccgttctcatatacatgatcttgaaaggtcttatagttttcagctaagccgctcactgcaatcaactgctgaaaataatggaattgatctagtcaagagcatgaattatgcttttcttgagcagaaatcagaagctattggtgatttttcagaagaaaataacagccctcctgaggttaccaacactgtagcacttgatggcaaccatgctgatgatctgaaagttgatgcgttcattccttttgcagaattatcactatgcagacacctgttatctgaaggcatgggggaggatgctgcttgcagtgcatttgattctgagaaggtaaccttagaggagttccgtaacatgaagcaatcactgatgcgaaacaacaaactagttgttaggattgctggccgctactttccctgggatgctgctgcacctatagtactcggtatgatttctttcagtgaggaacaagtttttgaacccaaaggaatgataaatgtggagcgagttgagcaaagtgcagctccaggtggcagctggagcatctggccatttagtttcagacgaacaaggactattactgctatccagccagtttgtgaaagtattgttgagacttctgtatccactcctaaagaattgacacattttaaagaactagatagagaaaggaataaatccagggtaaagaggattgagaggaaggtgcgatcactcactccaacatctgacgagcttgcatctcttgatctcagagagggcaggaacgtggtaacatttacgttctcaactgcaattgttgggaaacagcaggttgattgccacatatatttatggagatggaatacacgcattgtaatatctgatgtggatggaactatcaccaagtctgatgttcttgggcagttcatgccactagttggagttgattggtcccaaaacggagttgctcatttattttctgcaataaaggaaaatggataccagcttctatttctgagtgcacgcgctatttcacaagcccacatcacaagacagtttcttttcaacctaaagcaggacggcaaagcacttcctgatggccctgttgttatatctccagatggtctcttcccgtcactttacagagaagtcatcagaagagctccgcatgaattcaagatttcgtgtctagaggccatcaaagatttatttccacacgactcaaatccgttttatgctggatttggaaatagagacacagacgagcttagctacctcaaggttggtattcctatgggcaagatcttcataataaaccccaagggtgaagtcgcagtgaaccgacgggtcgatacaaagtcgtacacatccttgcatgctcttgtccacgggatgttccctccaatattgtcgtcatctgagcaggccagcattcccgaggactacaatgcttggaattactggaagatgccattgcctgatgttgatttgtgaggtacaagtcgagtctgcacaacagcactgcactaattttatgatgtgccgtagtgatcatgagaaggccattacttggttggctacatgtggatgctcctgctcctgatataagttcctgcaagatggaattttgtatatataggatcataatagatgtagtagctatttcttgtgtctcctgttgttgttgttgttgtcgtcgtaggactggaaatcatacctccgtgtgtcctgtaactgaaggtacaaaatttactggatggagggatctgatagtatgttgcagccccccctttttcgtttcatccttgatgtaattgtggtaccgatgtattttgtacaagaacaaatcaataataatgcaatcgaaagcgagctgttcatacgcagacacaacatgttgcattgaccctaggtgcattcggtaactgaaaatcggagctgtgtatactgtggacatgtcatctttggtatg

SEQ ID NO: 212057 - DNA, 3728 bp, Zea Mays
gtggaataatcccttcctcggcatccttcggtcccggaatatgcccccggcgtctccctcctcgcgttcctctcgtcggtgagctcctgccgcctggctcgcacagccgatttgcctcagtccagatcgtgcctccttcttcctagatcgggtccgaattcggctaccctcgccaccgccctacgccaggtgccgaggcctccgccgatctcttcgccggcgaagagcggccaccagccctcgtggaggaagaaacagttcagcagatgaaaccgatccgtgtttacaagccactattgtgaagaaagaggtggttgagatacacgcgcgtgagagcagcgacttcactgataatatcacttcaatcacacatcaacaagggtcagaatcttcgtcaaatgatctgggaacagataaacttatgcagcagtctgtcgatactcaagatgagttgctgcatgatgttgaagatgtaactgaaagggagacacatgcagaggaggttatttccaatgacatttttgaaatccatgttgttgagacagacattacaagtggtaagagcgaggtggattctgagattgttactgtggatccagaaccagatcgagctaaccagaattttacagatacaaattaccaaaattatggcaccacagatatttcatctgaaagacatgaggtttcattgatcccttctgcacaggatgcagttcaagagaaaatagttatcctcagcagttctgaggctgtggagggctcactagatgcagttccagagaaagtagtcattctcagcagttctgagactgtggatagctcatatgctgtgtcctgtattttggatgacacagttcatgatgcttctgatatctcacaggctgacggtgtacaacatgaggagcactctagtatctctgatgggagtacagaaaagctaatttctgaggaaagttcattagtatgctatggtgttcccagcaacaaaaaagacttggttaatatagctgttcaagaaagtaaagcctttatcttaaaaaatcctgcctcccaaatcttggaagagagtggtccaggtttggatgtatctacagacagtgtttccctttcacatgcagactcagctcctgatttagcttgtcagcatgtttctcctaatgttgaagatacaacaagttatgagcctggcattggtcctgaagatgtaacaaaaaactcagttgtggaaaatggagcatgcagcggggaacttgttgtttctgttattcagacctcagcgggagatggactgacaaaatgcattgctcatccagctgttttttctaataaaatagaagtagaaggctcaccaacttctgctggattttccagtttgatcagtgttgaagtgcaaaacacaaaactagaagatgacacaaacaaatctagttctgtgattggagatgaagctggttttgtgcctgaggctacagctgagcttgatgaagaagcagaaccagttatatcattatctgaatatacagaagaaattcagtttcaatttagtgatgctgaaaattttgcagatagaaaggccacggatgacatggtggctaacaaaacaacaggtgaagtagaacatgatgaatctgattgtgacacagagaaacaggaagaaggtgatgtaggtcttgtaaatgacttggagaactgttctgcgtcattaaagcctgtgagtagccctgtttctattcctgcaattgacttccagtcaggaaatagtaacagagaggctaaatctctaccaaatctccgttctcatatacatgatcttgaaaggtcttatagttttcagctaagccgctcactgcaatcaactgctgaaaataatggaattgatctagtcaagagcatgaattatgcttttcttgagcagaaatcagaagctattggtgatttttcagaagaaaataacagccctcctgaggttaccaacactgtagcacttgatggcaaccatgctgatgatctgaaagttgatgcgttcattccttttgcagaattatcactatgcagacacctgttatctgaaggcatgggggaggatgctgcttgcagtgcatttgattctgagaaggtaaccttagaggagttccgtaacatgaagcaatcactgatgcgaaacaacaaactagttgttaggattgctggccgctactttccctgggatgctgctgcacctatagtactcggtatgatttctttcagtgaggaacaagtttttgaacccaaaggaatgataaatgtggagcgagttgagcaaagtgcagctccaggtggcagctggagcatctggccatttagtttcagacgaacaaggactattactgctatccagccagtttgtgaaagtattgttgagacttctgtatccactcctaaagaattgacacattttaaagaactagatagagaaaggaataaatccagggtaaagaggattgagaggaaggtgcgatcactcactccaacatctgacgagcttgcatctcttgatctcagagagggcaggaacgtggtaacatttacgttctcaactgcaattgttgggaaacagcaggttgattgccacatatatttatggagatggaatacacgcattgtaatatctgatgtggatggaactatcaccaagtctgatgttcttgggcagttcatgccactagttggagttgattggtcccaaaacggagttgctcatttattttctgcaataaaggaaaatggataccagcttctatttctgagtgcacgcgctatttcacaagcccacatcacaagacagtttcttttcaacctaaagcaggacggcaaagcacttcctgatggccctgttgttatatctccagatggtctcttcccgtcactttacagagaagtcatcagaagagctccgcatgaattcaagatttcgtgtctagaggccatcaaagatttatttccacacgactcaaatccgttttatgctggatttggaaatagagacacagacgagcttagctacctcaaggttggtattcctatgggcaagatcttcataataaaccccaagggtgaagtcgcagtgaaccgacgggtcgatacaaagtcgtacacatccttgcatgctcttgtccacgggatgttccctccaatattgtcgtcatctgagcaggaggactacaatgcttggaattactggaagatgccattgcctgatgttgatttgtgaggtacaagtcgagtctgcacaacagcactgcactaattttatgatgtgccgtagtgatcatgagaaggccattacttggttggctacatgtggatgctcctgctcctgatataagttcctgcaagatggaattttgtatatataggatcataatagatgtagtagctatttcttgtgtctcctgttgttgttgttgttgtcgtcgtaggactggaaatcatacctccgtgtgtcctgtaactgaaggtacaaaatttactggatggagggatctgatagtatgttgcagccccccctttttcgtttcatccttgatgtaattgtggtaccgatgtattttgtacaagaacaaatcaataataatgcaatcgaaagcgagctgttcatacgcagacacaacatgttgcattgaccctaggtgcattcggtaactgaaaatcggagctgtgtatactgtggacatgtcatctttggtatg

SEQ ID NO: 212058 - DNA, 4524 bp, Zea Mays
ctttttccaaaaaggataaaaatggctattcgagggaagtaaaataagtgagccggtggaataatcccttcctcggcatccttcggtcccggaatatgcccccggcgtctccctcctcgcgttcctctcgtcggtgagctcctgccgcctggctcgcacagccgatttgcctcagtccagatcgtgcctccttcttcctagatcgggtccgaattcggctaccctcgccaccgccctacgccaggtgccgaggcctccgccgatctcttcgccggcgaagagcggccaccagaattctggtggttcctgtagcttgtggatggaggaggaggcgctgggtcgtggtggtggtgaaaagctttgatttcgtagccgtggtggacgccgctgctaatgcccttgccgtgcctcgttggtggcgtgcaagatgtatgccgtggggaaggtgggcagcctcatctcccgcagcgtgtacaccgtctccggcccgttccacccgttcggcggcgcggtcgacatagtcgttgtgcagcagcaggacggcagcttcaagagctcgccgtggtacgtgcggttcggcaagttccagggggttctcaagtcgagggagaaggttgtcgacatctccgtcaatggcgtcgacgcagggttccacatgtacctggacagcaacggcgaggcttacttcctcaggaacgcggacccgaatggtgaggaaggggagttcattgtctcccccgcctcgtcgggagatgagcgagaggtgccgatccaggaagctcagctgaggaagtcgaagagcacttcgtgtgatagctcgacgatggaagccgacgtcggtgagggcaagattcttgcgaggacaacctcgaggcggataaccatacttgaaaggatgtttggccggaaatcgattaagaacaatgcccatgctgtggatagggtgagttcattggagcgtgcagaggtcgctgcagaactcctagataccaagtggtcaacaaatctcccacgtagttcaaaacctaatggttcaaatgatgagccttccaagagcaacaatgatcagatggaaacctcaaaacctgtattttcggaacatagtttggatcatgggaaagagatggactctaactgtgacaatgctcactgcaattcatgcagccctcgtggaggaagaaacagttcagcagatgaaaccgatccgtgtttacaagccactattgtgaagaaagaggtggttgagatacacgcgcgtgagagcagcgacttcactgataatatcacttcaatcacacatcaacaagggtcagaatcttcgtcaaatgatctgggaacagataaacttatgcagcagtctgtcgatactcaagatgagttgctgcatgatgttgaagatgtaactgaaagggagacacatgcagaggaggttatttccaatgacatttttgaaatccatgttgttgagacagacattacaagtggtaagagcgaggtggattctgagattgttactgtggatccagaaccagatcgagctaaccagaattttacagatacaaattaccaaaattatggcaccacagatatttcatctgaaagacatgaggtttcattgatcccttctgcacaggatgcagttcaagagaaaatagttatcctcagcagttctgaggctgtggagggctcactagatgcagttccagagaaagtagtcattctcagcagttctgagactgtggatagctcatatgctgtgtcctgtattttggatgacacagttcatgatgcttctgatatctcacaggctgacggtgtacaacatgaggagcactctagtatctctgatgggagtacagaaaagctaatttctgaggaaagttcattagtatgctatggtgttcccagcaacaaaaaagacttggttaatatagctgttcaagaaagtaaagcctttatcttaaaaaatcctgcctcccaaatcttggaagagagtggtccaggtttggatgtatctacagacagtgtttccctttcacatgcagactcagctcctgatttagcttgtcagcatgtttctcctaatgttgaagatacaacaagttatgagcctggcattggtcctgaagatgtaacaaaaaactcagttgtggaaaatggagcatgcagcggggaacttgttgtttctgttattcagacctcagcgggagatggactgacaaaatgcattgctcatccagctgttttttctaataaaatagaagtagaaggctcaccaacttctgctggattttccagtttgatcagtgttgaagtgcaaaacacaaaactagaagatgacacaaacaaatctagttctgtgattggagatgaagctggttttgtgcctgaggctacagctgagcttgatgaagaagcagaaccagttatatcattatctgaatatacagaagaaattcagtttcaatttagtgatgctgaaaattttgcagatagaaaggccacggatgacatggtggctaacaaaacaacaggtgaagtagaacatgatgaatctgattgtgacacagagaaacaggaagaaggtgatgtaggtcttgtaaatgacttggagaactgttctgcgtcattaaagcctgtgagtagccctgtttctattcctgcaattgacttccagtcaggaaatagtaacagagaggctaaatctctaccaaatctccgttctcatatacatgatcttgaaaggtcttatagttttcagctaagccgctcactgcaatcaactgctgaaaataatggaattgatctagtcaagagcatgaattatgcttttcttgagcagaaatcagaagctattggtgatttttcagaagaaaataacagccctcctgaggttaccaacactgtagcacttgatggcaaccatgctgatgatctgaaagttgatgcgttcattccttttgcagaattatcactatgcagacacctgttatctgaaggcatgggggaggatgctgcttgcagtgcatttgattctgagaagtgaggaacaagtttttgaacccaaaggaatgataaatgtggagcgagttgagcaaagtgcagctccaggtggcagctggagcatctggccatttagtttcagacgaacaaggactattactgctatccagccagtttgtgaaagtattgttgagacttctgtatccactcctaaagaattgacacattttaaagaactagatagagaaaggaataaatccagggtaaagaggattgagaggaaggtgcgatcactcactccaacatctgacgagcttgcatctcttgatctcagagagggcaggaacgtggtaacatttacgttctcaactgcaattgttgggaaacagcaggttgattgccacatatatttatggagatggaatacacgcattgtaatatctgatgtggatggaactatcaccaagtctgatgttcttgggcagttcatgccactagttggagttgattggtcccaaaacggagttgctcatttattttctgcaataaaggaaaatggataccagcttctatttctgagtgcacgcgctatttcacaagcccacatcacaagacagtttcttttcaacctaaagcaggacggcaaagcacttcctgatggccctgttgttatatctccagatggtctcttcccgtcactttacagagaagtcatcagaagagctccgcatgaattcaagatttcgtgtctagaggccatcaaagatttatttccacacgactcaaatccgttttatgctggatttggaaatagagacacagacgagcttagctacctcaaggttggtattcctatgggcaagatcttcataataaaccccaagggtgaagtcgcagtgaaccgacgggtcgatacaaagtcgtacacatccttgcatgctcttgtccacgggatgttccctccaatattgtcgtcatctgagcaggaggactacaatgcttggaattactggaagatgccattgcctgatgttgatttgtgaggtacaagtcgagtctgcacaacagcactgcactaattttatgatgtgccgtagtgatcatgagaaggccattacttggttggctacatgtggatgctcctgctcctgatataagttcctgcaagatggaattttgtatatataggatcataatagatgtagtagctatttcttgtgtctcctgttgttgttgttgttgtcgtcgtaggactggaaatcatacctccgtgtgtcctgtaactgaaggtacaaaatttactggatggagggatctgatagtatgttgcagccccccctttttcgtttcatccttgatgtaattgtggtaccgatgtattttgtacaagaacaaatcaataataatgcaatcgaaagcgagctgttcatacgcagacacaacatgttgcattgaccctaggtgcattcggtaactgaaaatcggagctgtgtatactgtggacatgtcatctttggtatg

SEQ ID NO: 212059 - DNA, 4583 bp, Zea Mays
atgttcttttcctcctttttattttcttttctttttccaaaaaggataaaaatggctattcgagggaagtaaaataagtgagccggtggaataatcccttcctcggcatccttcggtcccggaatatgcccccggcgtctccctcctcgcgttcctctcgtcggtgagctcctgccgcctggctcgcacagccgatttgcctcagtccagatcgtgcctccttcttcctagatcgggtccgaattcggctaccctcgccaccgccctacgccaggtgccgaggcctccgccgatctcttcgccggcgaagagcggccaccagaattctggtggttcctgtagcttgtggatggaggaggaggcgctgggtcgtggtggtggtgaaaagctttgatttcgtagccgtggtggacgccgctgctaatgcccttgccgtgcctcgttggtggcgtgcaagatgtatgccgtggggaaggtgggcagcctcatctcccgcagcgtgtacaccgtctccggcccgttccacccgttcggcggcgcggtcgacatagtcgttgtgcagcagcaggacggcagcttcaagagctcgccgtggtacgtgcggttcggcaagttccagggggttctcaagtcgagggagaaggttgtcgacatctccgtcaatggcgtcgacgcagggttccacatgtacctggacagcaacggcgaggcttacttcctcaggaacgcggacccgaatggtgaggaaggggagttcattgtctcccccgcctcgtcgggagatgagcgagaggtgccgatccaggaagctcagctgaggaagtcgaagagcacttcgtgtgatagctcgacgatggaagccgacgtcggtgagggcaagattcttgcgaggacaacctcgaggcggataaccatacttgaaaggatgtttggccggaaatcgattaagaacaatgcccatgctgtggatagggtgagttcattggagcgtgcagaggtcgctgcagaactcctagataccaagtggtcaacaaatctcccacgtagttcaaaacctaatggttcaaatgatgagccttccaagagcaacaatgatcagatggaaacctcaaaacctgtattttcggaacatagtttggatcatgggaaagagatggactctaactgtgacaatgctcactgcaattcatgcagccctcgtggaggaagaaacagttcagcagatgaaaccgatccgtgtttacaagccactattgtgaagaaagaggtggttgagatacacgcgcgtgagagcagcgacttcactgataatatcacttcaatcacacatcaacaagggtcagaatcttcgtcaaatgatctgggaacagataaacttatgcagcagtctgtcgatactcaagatgagttgctgcatgatgttgaagatgtaactgaaagggagacacatgcagaggaggttatttccaatgacatttttgaaatccatgttgttgagacagacattacaagtggtaagagcgaggtggattctgagattgttactgtggatccagaaccagatcgagctaaccagaattttacagatacaaattaccaaaattatggcaccacagatatttcatctgaaagacatgaggtttcattgatcccttctgcacaggatgcagttcaagagaaaatagttatcctcagcagttctgaggctgtggagggctcactagatgcagttccagagaaagtagtcattctcagcagttctgagactgtggatagctcatatgctgtgtcctgtattttggatgacacagttcatgatgcttctgatatctcacaggctgacggtgtacaacatgaggagcactctagtatctctgatgggagtacagaaaagctaatttctgaggaaagttcattagtatgctatggtgttcccagcaacaaaaaagacttggttaatatagctgttcaagaaagtaaagcctttatcttaaaaaatcctgcctcccaaatcttggaagagagtggtccaggtttggatgtatctacagacagtgtttccctttcacatgcagactcagctcctgatttagcttgtcagcatgtttctcctaatgttgaagatacaacaagttatgagcctggcattggtcctgaagatgtaacaaaaaactcagttgtggaaaatggagcatgcagcggggaacttgttgtttctgttattcagacctcagcgggagatggactgacaaaatgcattgctcatccagctgttttttctaataaaatagaagtagaaggctcaccaacttctgctggattttccagtttgatcagtgttgaagtgcaaaacacaaaactagaagatgacacaaacaaatctagttctgtgattggagatgaagctggttttgtgcctgaggctacagctgagcttgatgaagaagcagaaccagttatatcattatctgaatatacagaagaaattcagtttcaatttagtgatgctgaaaattttgcagatagaaaggccacggatgacatggtggctaacaaaacaacaggtgaagtagaacatgatgaatctgattgtgacacagagaaacaggaagaaggtgatgtaggtcttgtaaatgacttggagaactgttctgcgtcattaaagcctgtgagtagccctgtttctattcctgcaattgacttccagtcaggaaatagtaacagagaggctaaatctctaccaaatctccgttctcatatacatgatcttgaaaggtcttatagttttcagctaagccgctcactgcaatcaactgctgaaaataatggaattgatctagtcaagagcatgaattatgcttttcttgagcagaaatcagaagctattggtgatttttcagaagaaaataacagccctcctgaggttaccaacactgtagcacttgatggcaaccatgctgatgatctgaaagttgatgcgttcattccttttgcagaattatcactatgcagacacctgttatctgaaggcatgggggaggatgctgcttgcagtgcatttgattctgagaaggtaaccttagaggagttccgtaacatgaagcaatcactgatgcgaaacaacaaactagttgttaggattgctggccgctactttccctgggatgctgctgcacctatagtactcggtatgatttctttcagtgaggaacaagtttttgaacccaaaggaatgataaatgtggagcgagttgagcaaagtgcagctccaggtggcagctggagcatctggccatttagtttcagacgaacaaggactattactgctatccagccagtttgtgaaagtattgttgagacttctgtatccactcctaaagaattgacacattttaaagaactagatagagaaaggaataaatccagggtaaagaggattgagaggaaggtgcgatcactcactccaacatctgacgagcttgcatctcttgatctcagagagggcaggaacgtggtaacatttacgttctcaactgcaattgttgggaaacagcaggttgattgccacatatatttatggagatggaatacacgcattgtaatatctgatgtggatggaactatcaccaagtctgatgttcttgggcagttcatgccactagttggagttgattggtcccaaaacggagttgctcatttattttctgcaataaaggaaaatggataccagcttctatttctgagtgcacgcgctatttcacaagcccacatcacaagacagtttcttttcaacctaaagcaggacggcaaagcacttcctgatggccctgttgttatatctccagatggtctcttcccgtcactttacagagaagtcatcagaagagctccgcatgaattcaagatttcgtgtctagaggccatcaaagatttatttccacacgactcaaatccgttttatgctggatttggaaatagagacacagacgagcttagctacctcaaggttggtattcctatgggcaagatcttcataataaaccccaaggaggactacaatgcttggaattactggaagatgccattgcctgatgttgatttgtgaggtacaagtcgagtctgcacaacagcactgcactaattttatgatgtgccgtagtgatcatgagaaggccattacttggttggctacatgtggatgctcctgctcctgatataagttcctgcaagatggaattttgtatatataggatcataatagatgtagtagctatttcttgtgtctcctgttgttgttgttgttgtcgtcgtaggactggaaatcatacctccgtgtgtcctgtaactgaaggtacaaaatttactggatggagggatctgatagtatgttgcagccccccctttttcgtttcatccttgatgtaattgtggtaccgatgtattttgtacaagaacaaatcaataataatgcaatcgaaagcgagctgttcatacgcagacacaacatgttgcattgaccctaggtgcattcggtaactgaaaatcggagctgtgtatactgtggacatgtcatctttggtatg

SEQ ID NO: 212060 - DNA, 4665 bp, Zea Mays
cgcacaataagcatgtttatctgcaactccatatgtataccaagataaagtttcgtgtgacctctaatgttcttttcctcctttttattttcttttctttttccaaaaaggataaaaatggctattcgagggaagtaaaataagtgagccggtggaataatcccttcctcggcatccttcggtcccggaatatgcccccggcgtctccctcctcgcgttcctctcgtcggtgagctcctgccgcctggctcgcacagccgatttgcctcagtccagatcgtgcctccttcttcctagatcgggtccgaattcggctaccctcgccaccgccctacgccaggtgccgaggcctccgccgatctcttcgccggcgaagagcggccaccagcttgtggatggaggaggaggcgctgggtcgtggtggtggtgaaaagctttgatttcgtagccgtggtggacgccgctgctaatgcccttgccgtgcctcgttggtggcgtgcaagatgtatgccgtggggaaggtgggcagcctcatctcccgcagcgtgtacaccgtctccggcccgttccacccgttcggcggcgcggtcgacatagtcgttgtgcagcagcaggacggcagcttcaagagctcgccgtggtacgtgcggttcggcaagttccagggggttctcaagtcgagggagaaggttgtcgacatctccgtcaatggcgtcgacgcagggttccacatgtacctggacagcaacggcgaggcttacttcctcaggaacgcggacccgaatggtgaggaaggggagttcattgtctcccccgcctcgtcgggagatgagcgagaggtgccgatccaggaagctcagctgaggaagtcgaagagcacttcgtgtgatagctcgacgatggaagccgacgtcggtgagggcaagattcttgcgaggacaacctcgaggcggataaccatacttgaaaggatgtttggccggaaatcgattaagaacaatgcccatgctgtggatagggtgagttcattggagcgtgcagaggtcgctgcagaactcctagataccaagtggtcaacaaatctcccacgtagttcaaaacctaatggttcaaatgatgagccttccaagagcaacaatgatcagatggaaacctcaaaacctgtattttcggaacatagtttggatcatgggaaagagatggactctaactgtgacaatgctcactgcaattcatgcagccctcgtggaggaagaaacagttcagcagatgaaaccgatccgtgtttacaagccactattgtgaagaaagaggtggttgagatacacgcgcgtgagagcagcgacttcactgataatatcacttcaatcacacatcaacaagggtcagaatcttcgtcaaatgatctgggaacagataaacttatgcagcagtctgtcgatactcaagatgagttgctgcatgatgttgaagatgtaactgaaagggagacacatgcagaggaggttatttccaatgacatttttgaaatccatgttgttgagacagacattacaagtggtaagagcgaggtggattctgagattgttactgtggatccagaaccagatcgagctaaccagaattttacagatacaaattaccaaaattatggcaccacagatatttcatctgaaagacatgaggtttcattgatcccttctgcacaggatgcagttcaagagaaaatagttatcctcagcagttctgaggctgtggagggctcactagatgcagttccagagaaagtagtcattctcagcagttctgagactgtggatagctcatatgctgtgtcctgtattttggatgacacagttcatgatgcttctgatatctcacaggctgacggtgtacaacatgaggagcactctagtatctctgatgggagtacagaaaagctaatttctgaggaaagttcattagtatgctatggtgttcccagcaacaaaaaagacttggttaatatagctgttcaagaaagtaaagcctttatcttaaaaaatcctgcctcccaaatcttggaagagagtggtccaggtttggatgtatctacagacagtgtttccctttcacatgcagactcagctcctgatttagcttgtcagcatgtttctcctaatgttgaagatacaacaagttatgagcctggcattggtcctgaagatgtaacaaaaaactcagttgtggaaaatggagcatgcagcggggaacttgttgtttctgttattcagacctcagcgggagatggactgacaaaatgcattgctcatccagctgttttttctaataaaatagaagtagaaggctcaccaacttctgctggattttccagtttgatcagtgttgaagtgcaaaacacaaaactagaagatgacacaaacaaatctagttctgtgattggagatgaagctggttttgtgcctgaggctacagctgagcttgatgaagaagcagaaccagttatatcattatctgaatatacagaagaaattcagtttcaatttagtgatgctgaaaattttgcagatagaaaggccacggatgacatggtggctaacaaaacaacaggtgaagtagaacatgatgaatctgattgtgacacagagaaacaggaagaaggtgatgtaggtcttgtaaatgacttggagaactgttctgcgtcattaaagcctgtgagtagccctgtttctattcctgcaattgacttccagtcaggaaatagtaacagagaggctaaatctctaccaaatctccgttctcatatacatgatcttgaaaggtcttatagttttcagctaagccgctcactgcaatcaactgctgaaaataatggaattgatctagtcaagagcatgaattatgcttttcttgagcagaaatcagaagctattggtgatttttcagaagaaaataacagccctcctgaggttaccaacactgtagcacttgatggcaaccatgctgatgatctgaaagttgatgcgttcattccttttgcagaattatcactatgcagacacctgttatctgaaggcatgggggaggatgctgcttgcagtgcatttgattctgagaaggtaaccttagaggagttccgtaacatgaagcaatcactgatgcgaaacaacaaactagttgttaggattgctggccgctactttccctgggatgctgctgcacctatagtactcggtatgatttctttcagtgaggaacaagtttttgaacccaaaggaatgataaatgtggagcgagttgagcaaagtgcagctccaggtggcagctggagcatctggccatttagtttcagacgaacaaggactattactgctatccagccagtttgtgaaagtattgttgagacttctgtatccactcctaaagaattgacacattttaaagaactagatagagaaaggaataaatccagggtaaagaggattgagaggaaggtgcgatcactcactccaacatctgacgagcttgcatctcttgatctcagagagggcaggaacgtggtaacatttacgttctcaactgcaattgttgggaaacagcaggttgattgccacatatatttatggagatggaatacacgcattgtaatatctgatgtggatggaactatcaccaagtctgatgttcttgggcagttcatgccactagttggagttgattggtcccaaaacggagttgctcatttattttctgcaataaaggaaaatggataccagcttctatttctgagtgcacgcgctatttcacaagcccacatcacaagacagtttcttttcaacctaaagcaggacggcaaagcacttcctgatggccctgttgttatatctccagatggtctcttcccgtcactttacagagaagtcatcagaagagctccgcatgaattcaagatttcgtgtctagaggccatcaaagatttatttccacacgactcaaatccgttttatgctggatttggaaatagagacacagacgagcttagctacctcaaggttggtattcctatgggcaagatcttcataataaaccccaagggtgaagtcgcagtgaaccgacgggtcgatacaaagtcgtacacatccttgcatgctcttgtccacgggatgttccctccaatattgtcgtcatctgagcaggaggactacaatgcttggaattactggaagatgccattgcctgatgttgatttgtgaggccattacttggttggctacatgtggatgctcctgctcctgatataagttcctgcaagatggaattttgtatatataggatcataatagatgtagtagctatttcttgtgtctcctgttgttgttgttgttgtcgtcgtaggactggaaatcatacctccgtgtgtcctgtaactgaaggtacaaaatttactggatggagggatctgatagtatgttgcagccccccctttttcgtttcatccttgatgtaattgtggtaccgatgtattttgtacaagaacaaatcaataataatgcaatcgaaagcgagctgttcatacgcagacacaacatgttgcattgaccctaggtgcattcggtaactgaaaatcggagctgtgtatactgtggacatgtcatctttggtatg

SEQ ID NO: 212061 - DNA, 4731 bp, Zea Mays
cgcacaataagcatgtttatctgcaactccatatgtataccaagataaagtttcgtgtgacctctaatgttcttttcctcctttttattttcttttctttttccaaaaaggataaaaatggctattcgagggaagtaaaataagtgagccggtggaataatcccttcctcggcatccttcggtcccggaatatgcccccggcgtctccctcctcgcgttcctctcgtcggtgagctcctgccgcctggctcgcacagccgatttgcctcagtccagatcgtgcctccttcttcctagatcgggtccgaattcggctaccctcgccaccgccctacgccaggtgccgaggcctccgccgatctcttcgccggcgaagagcggccaccagcttgtggatggaggaggaggcgctgggtcgtggtggtggtgaaaagctttgatttcgtagccgtggtggacgccgctgctaatgcccttgccgtgcctcgttggtggcgtgcaagatgtatgccgtggggaaggtgggcagcctcatctcccgcagcgtgtacaccgtctccggcccgttccacccgttcggcggcgcggtcgacatagtcgttgtgcagcagcaggacggcagcttcaagagctcgccgtggtacgtgcggttcggcaagttccagggggttctcaagtcgagggagaaggttgtcgacatctccgtcaatggcgtcgacgcagggttccacatgtacctggacagcaacggcgaggcttacttcctcaggaacgcggacccgaatggtgaggaaggggagttcattgtctcccccgcctcgtcgggagatgagcgagaggtgccgatccaggaagctcagctgaggaagtcgaagagcacttcgtgtgatagctcgacgatggaagccgacgtcggtgagggcaagattcttgcgaggacaacctcgaggcggataaccatacttgaaaggatgtttggccggaaatcgattaagaacaatgcccatgctgtggatagggtgagttcattggagcgtgcagaggtcgctgcagaactcctagataccaagtggtcaacaaatctcccacgtagttcaaaacctaatggttcaaatgatgagccttccaagagcaacaatgatcagatggaaacctcaaaacctgtattttcggaacatagtttggatcatgggaaagagatggactctaactgtgacaatgctcactgcaattcatgcagccctcgtggaggaagaaacagttcagcagatgaaaccgatccgtgtttacaagccactattgtgaagaaagaggtggttgagatacacgcgcgtgagagcagcgacttcactgataatatcacttcaatcacacatcaacaagggtcagaatcttcgtcaaatgatctgggaacagataaacttatgcagcagtctgtcgatactcaagatgagttgctgcatgatgttgaagatgtaactgaaagggagacacatgcagaggaggttatttccaatgacatttttgaaatccatgttgttgagacagacattacaagtggtaagagcgaggtggattctgagattgttactgtggatccagaaccagatcgagctaaccagaattttacagatacaaattaccaaaattatggcaccacagatatttcatctgaaagacatgaggtttcattgatcccttctgcacaggatgcagttcaagagaaaatagttatcctcagcagttctgaggctgtggagggctcactagatgcagttccagagaaagtagtcattctcagcagttctgagactgtggatagctcatatgctgtgtcctgtattttggatgacacagttcatgatgcttctgatatctcacaggctgacggtgtacaacatgaggagcactctagtatctctgatgggagtacagaaaagctaatttctgaggaaagttcattagtatgctatggtgttcccagcaacaaaaaagacttggttaatatagctgttcaagaaagtaaagcctttatcttaaaaaatcctgcctcccaaatcttggaagagagtggtccaggtttggatgtatctacagacagtgtttccctttcacatgcagactcagctcctgatttagcttgtcagcatgtttctcctaatgttgaagatacaacaagttatgagcctggcattggtcctgaagatgtaacaaaaaactcagttgtggaaaatggagcatgcagcggggaacttgttgtttctgttattcagacctcagcgggagatggactgacaaaatgcattgctcatccagctgttttttctaataaaatagaagtagaaggctcaccaacttctgctggattttccagtttgatcagtgttgaagtgcaaaacacaaaactagaagatgacacaaacaaatctagttctgtgattggagatgaagctggttttgtgcctgaggctacagctgagcttgatgaagaagcagaaccagttatatcattatctgaatatacagaagaaattcagtttcaatttagtgatgctgaaaattttgcagatagaaaggccacggatgacatggtggctaacaaaacaacaggtgaagtagaacatgatgaatctgattgtgacacagagaaacaggaagaaggtgatgtaggtcttgtaaatgacttggagaactgttctgcgtcattaaagcctgtgagtagccctgtttctattcctgcaattgacttccagtcaggaaatagtaacagagaggctaaatctctaccaaatctccgttctcatatacatgatcttgaaaggtcttatagttttcagctaagccgctcactgcaatcaactgctgaaaataatggaattgatctagtcaagagcatgaattatgcttttcttgagcagaaatcagaagctattggtgatttttcagaagaaaataacagccctcctgaggttaccaacactgtagcacttgatggcaaccatgctgatgatctgaaagttgatgcgttcattccttttgcagaattatcactatgcagacacctgttatctgaaggcatgggggaggatgctgcttgcagtgcatttgattctgagaaggtaaccttagaggagttccgtaacatgaagcaatcactgatgcgaaacaacaaactagttgttaggattgctggccgctactttccctgggatgctgctgcacctatagtactcggtatgatttctttcagtgaggaacaagtttttgaacccaaaggaatgataaatgtggagcgagttgagcaaagtgcagctccaggtggcagctggagcatctggccatttagtttcagacgaacaaggactattactgctatccagccagtttgtgaaagtattgttgagacttctgtatccactcctaaagaattgacacattttaaagaactagatagagaaaggaataaatccagggtaaagaggattgagaggaaggtgcgatcactcactccaacatctgacgagcttgcatctcttgatctcagagagggcaggaacgtggtaacatttacgttctcaactgcaattgttgggaaacagcaggttgattgccacatatatttatggagatggaatacacgcattgtaatatctgatgtggatggaactatcaccaagtctgatgttcttgggcagttcatgccactagttggagttgattggtcccaaaacggagttgctcatttattttctgcaataaaggaaaatggataccagcttctatttctgagtgcacgcgctatttcacaagcccacatcacaagacagtttcttttcaacctaaagcaggacggcaaagcacttcctgatggccctgttgttatatctccagatggtctcttcccgtcactttacagagaagtcatcagaagagctccgcatgaattcaagatttcgtgtctagaggccatcaaagatttatttccacacgactcaaatccgttttatgctggatttggaaatagagacacagacgagcttagctacctcaaggttggtattcctatgggcaagatcttcataataaaccccaagggtgaagtcgcagtgaaccgacgggtcgatacaaagtcgtacacatccttgcatgctcttgtccacgggatgttccctccaatattgtcgtcatctgagcaggaggactacaatgcttggaattactggaagatgccattgcctgatgttgatttgtgaggtacaagtcgagtctgcacaacagcactgcactaattttatgatgtgccgtagtgatcatgagaaggccattacttggttggctacatgtggatgctcctgctcctgatataagttcctgcaagatggaattttgtatatataggatcataatagatgtagtagctatttcttgtgtctcctgttgttgttgttgttgtcgtcgtaggactggaaatcatacctccgtgtgtcctgtaactgaaggtacaaaatttactggatggagggatctgatagtatgttgcagccccccctttttcgtttcatccttgatgtaattgtggtaccgatgtattttgtacaagaacaaatcaataataatgcaatcgaaagcgagctgttcatacgcagacacaacatgttgcattgaccctaggtgcattcggtaactgaaaatcggagctgtgtatactgtggacatgtcatctttggtatg

SEQ ID NO: 212062 - DNA, 1719 bp, Zea Mays
agcgctgactcgtcgattagcattattagcagtttagcactagcgcctacggccctctcacctcgcctgctcgctacacgtccccagaaaagataccccagcacgcacacaccacgcgcccgcggccccgcgccggcgcaccaacacacccggccatcttctcccccttccctcccaattcaaggcggcccggaagctcctgcagccttccggaagggcttcgaggccgaggcgggcacgggatgtgggggcggcactactggggcggcggccggcgcccaagctgggcgcccggagggaacggagccggcaccggcggcgtggtggtgatgttcgcgtggctgtccagccaggagcggcacgtgcgggcgtacgtggagctgtacgcggcgcacgggtgggcgtgcctcgtctgccactccgacttcctcaccctgtttttccctgagaaggctgccatgctcgccgacagggtgattggggagcttgtcaaggtgctgaagattacacctgtacctgttgtgtttgcgtcgttttcgggagggccaaaagggtgcacatacaaggttcttcagtttttaaaggtttatttgttgaccgacagctgatcgagagaagatgtgaagggcaactaagcatggatgagtaccagctcgtacgagattgtctatgcggacaaatgtatgattcaagccctgtggattttgtcagtgacttgggcactcgcttcctcctcgatccaagtgtcctgaagatgtctgaacctcctcgtgtcttgtcatggatgactaagggcattgcctcaggtcttgatgttcttttcataaacaaatttgaagaacaacgtaaagattattgggaaacactatactcatcggtgcattttggtccaatactaatactctgctcagaggatgatcaacttgctacatattcagttgttcaaaattttggccagcatctgctagagcttggtggtgatgtgagcctaattaaatggcatagttctccgcatgtcggccactacaagcatcatcctgaggaatacagagctgctgtgacggagctcctaaagaaagcctcgacgctctacgcgagcagacgacaactcaacggacacgccgtgggcacaagcgagcacaccgacgcgcccgcgcctgcatccacctccaagtccaacccacacagagatgccgcgagctctgtcggtcgtagcaggctgattcaagcaccggccgatccagccggccagtttccttccataccgagctccatggagtgtcacgagagcagcagccaaggtccgccgcagccggagctgttgagcatgccgggcgtggagagctcgggcctgcgttgtggggtgctggggcaggcgctgtacggtgtctgtgttccgaaggacgtagaagaaggctgggacctcgcgccgccttccgcgtcgtcggatgggatggggaggcgcgtccgtgctgctgccgcgccgcctcgccgtggtagcttccgtccgatgagatgtgtacggcgctcgagattgtgatattgtgcgtgcgttttagtttaaaaattaaggaaaaattgaagggacggtggtgcggctgtcgtgagcggtgattgcacgaggagcactcccgattctgacggcgctcatcagtttcgttttcagagcattttactgattgccatgaataaaaaatatccttgaccagcggttgccat

SEQ ID NO: 212063 - DNA, 1612 bp, Zea Mays
agcgctgactcgtcgattagcattattagcagtttagcactagcgcctacggccctctcacctcgcctgctcgctacacgtccccagaaaagataccccagcacgcacacaccacgcgcccgcggccccgcgccggcgcaccaacacacccggccatcttctcccccttccctcccaattcaaggcggcccggaagctcctgcagccttccggaagggcttcgaggccgaggcgggcacgggatgtgggggcggcactactggggcggcggccggcgcccaagctgggcgcccggagggaacggagccggcaccggcggcgtggtggtgatgttcgcgtggctgtccagccaggagcggcacgtgcgggcgtacgtggagctgtacgcggcgcacgggtgggcgtgcctcgtctgccactccgacttcctcaccctgtttttccctgagaaggctgccatgctcgccgacagggtgattggggagcttgtcaaggtgctgaagattacacctgtacctgttgtgtttgcgtcgttttcgggagggccaaaagggtgcacatacaaggttcttcagctgatcgagagaagatgtgaagggcaactaagcatggatgagtaccagctcgtacgagattgtctatgcggacaaatgtatgattcaagccctgtggattttgtcagtgacttgggcactcgcttcctcctcgatccaagtgtcctgaagatgtctgaacctcctcgtgtcttgtcatggatgactaagggcattgcctcaggtcttgatgttcttttcataaacaaatttgaagaacaacgtaaagattattgggaaacactatactcatcggtgcattttggtccaatactaatactctgctcagaggatgatcaacttgctacatattcagttgttcaaaattttggccagcatctgctagagcttggtggtgatgtgagcctaattaaatggcatagttctccgcatgtcggccactacaagcatcatcctgaggaatacagagctgctgtgacggagctcctaaagaaagcctcgacgctctacgcgagcagacgacaactcaacggacacgccgtgggcacaagcgagcacaccgacgcgcccgcgcctgcatccacctccaagtccaacccacacagagatgccgcgagctctgtcggtcgtagcagccaaggtccgccgcagccggagctgttgagcatgccgggcgtggagagctcgggcctgcgttgtggggtgctggggcaggcgctgtacggtgtctgtgttccgaaggacgtagaagaaggctgggacctcgcgccgccttccgcgtcgtcggatgggatggggaggcgcgtccgtgctgctgccgcgccgcctcgccgtggtagcttccgtccgatgagatgtgtacggcgctcgagattgtgatattgtgcgtgcgttttagtttaaaaattaaggaaaaattgaagggacggtggtgcggctgtcgtgagcggtgattgcacgaggagcactcccgattctgacggcgctcatcagtttcgttttcagagcattttactgattgccatgaataaaaaatatccttgaccagcggttgccat

SEQ ID NO: 212064 - DNA, 1340 bp, Zea Mays
gtctcctccaaggatgaggcggaggctgcgccgcgtgccacgacgcccatggtctccgacctcctgcacgatgtccctaacacctccgaagctgtgccgagctcaggggcgaggcacgcagaggaggcctgcacctcagaggggtgggggaagatacccttcgggccactgcgcagcgacgcgattatcgtcgagccccctatcgcggggttaccggtgatctcgtccgctcccagccggatacctcgttccattcaaaggcgcccctggcgtgggtgtctaccgaaggcgatccatacttcattctcgacaacgtcaacgagcgagatgtctgggctgagttccaggcacaggaccattccatcttcccccgccgcgaacggggggtctgggaagcactgcagcgccaccgaaccatgttgcttcgatcgaacgagtagttggcctagaggagcgccgaagtggccaacctgacgtcccggtgcaagggactgaaggaggagggtgtagccgaccgcaaggaggcctgtcgactgagggctgaggtccttggtctgaaggcagaggcagaccaccgtgaggaggtgctacggtgggcgcaggagggcctccaagcggtgacggaggaacgtaactccctcgccaagtccctggaggacgactggtcctcgggtcaagccctggccgcccaaatagaaggtcttgagaagagtctggagggcatggcttggaccgtggagcaacagggggccgaggcggtggcagacctctttcaagacctcgatgtggtgggcatgccgcgggttggacccatgcggccttgcatgcaagccctgggcgacttcgtatggggtgagctccgcagggctgtccacctcgggtgaagcgagccctggtggtggtcgcttcccactacgagattgacctcgagcgggtgtgcgacggcttcgtacttcccgacaagcccgagctggctgctgctgaagggcagaggctgatggacgtcgtcgaggggccgaggactttgtgggctcgtcacttcgaggacgaggcggtgcctctttccccatcgcatgtggccgccgagcctcctgcgagacctcctccagcggcgtgaagatggccctagccatgcggggaattatcaatgtttttgtaatatatgctaagactctttgcaaatactaagtgtttaaactcatatccttttgttgtgtgtttttctgctgtcttgcgcctgtttccttaatcctaccgcggtgtccctgttagaacgcgagtttccctttggggagagagtagtgagtgaggaaactgtatccctgaggcgtaagtgttct

SEQ ID NO: 212065 - DNA, 1202 bp, Zea Mays
ctcaggggcgaggcacgcagaggaggcctgcacctcagaggggtgggggaagatacccttcgggccactgcgcagcgacgcgattatcgtcgagccccctatcgcggggttaccggtgatctcgtccgctcccagccggatacctcgttccattcaaaggcgcccctggcgtgggtgtctaccgaaggcgatccatacttcattctcgacaacgtcaacgagcgagatgtctgggctgagttccaggcacaggaccatcactgcagcgccaccgaaccatgttgcttcgatcgaacgagtagttggcctagaggagcgccgaagtggccaacctgacgtcccggtgcaagggactgaaggaggagggtgtagccgaccgcaaggaggcctgtcgactgagggctgaggtccttggtctgaaggcagaggcagaccaccgtgaggaggtgctacggtgggcgcaggagggcctccaagcggtgacggaggaacgtaactccctcgccaagtccctggaggacgactggtcctcgggtcaagccctggccgcccaaatagaaggtcttgagaagagtctggagggcatggcttggaccgtggagcaacagggggccgaggcggtggcagacctctttcaagacctcgatgtggtgggcatgccgcgggttggacccatgcggccttgcatgcaagccctgggcgacttcgtatggggtgagctccgcagggctgtccacctcgggtgaagcgagccctggtggtggtcgcttcccactacgagattgacctcgagcgggtgtgcgacggcttcgtacttcccgacaagcccgagctggctgctgctgaagggcagaggctgatggacgtcgtcgaggggccgaggactttgtgggctcgtcacttcgaggacgaggcggtgcctctttccccatcgcatgtggccgccgagcctcctgcgagacctcctccagcggcgtgaagatggccctagccatgcggggaattatcaatgtttttgtaatatatgctaagactctttgcaaatactaagtgtttaaactcatatccttttgttgtgtgtttttctgctgtcttgcgcctgtttccttaatcctaccgcggtgtccctgttagaacgcgagtttccctttggggagagagtagtgagtgaggaaactgtatccctgaggcgtaagtgttct

SEQ ID NO: 212066 - DNA, 1190 bp, Zea Mays
ggggcgaggcacgcagaggaggcctgcacctcagaggggtgggggaagatacccttcgggccactgcgcagcgacgcgattatcgtcgagccccctatcgcggggttaccggtgatctcgtccgctcccagccggatacctcgttccattcaaaggcgcccctggcgtgggtgtctaccgaaggcgatccatacttcattctcgacaacgtcaacgagcgagatgtctgggctgagttccaggcacaggaccatcgccaccgaaccatgttgcttcgatcgaacgagtagttggcctagaggagcgccgaagtggccaacctgacgtcccggtgcaagggactgaaggaggagggtgtagccgaccgcaaggaggcctgtcgactgagggctgaggtccttggtctgaaggcagaggcagaccaccgtgaggaggtgctacggtgggcgcaggagggcctccaagcggtgacggaggaacgtaactccctcgccaagtccctggaggacgactggtcctcgggtcaagccctggccgcccaaatagaaggtcttgagaagagtctggagggcatggcttggaccgtggagcaacagggggccgaggcggtggcagacctctttcaagacctcgatgtggtgggcatgccgcgggttggacccatgcggccttgcatgcaagccctgggcgacttcgtatggggtgagctccgcagggctgtccacctcgggtgaagcgagccctggtggtggtcgcttcccactacgagattgacctcgagcgggtgtgcgacggcttcgtacttcccgacaagcccgagctggctgctgctgaagggcagaggctgatggacgtcgtcgaggggccgaggactttgtgggctcgtcacttcgaggacgaggcggtgcctctttccccatcgcatgtggccgccgagcctcctgcgagacctcctccagcggcgtgaagatggccctagccatgcggggaattatcaatgtttttgtaatatatgctaagactctttgcaaatactaagtgtttaaactcatatccttttgttgtgtgtttttctgctgtcttgcgcctgtttccttaatcctaccgcggtgtccctgttagaacgcgagtttccctttggggagagagtagtgagtgaggaaactgtatccctgaggcgtaagtgttct

SEQ ID NO: 212067 - DNA, 2349 bp, Zea Mays
aaccaaacaaaaccaggttttccgacaacccagagagccaaagaaaggactaccaacaaccgcaaccgctcgcttcccagcacctccccacctttcgctccctccctccctccaattgcaggatcggcaccgatgcgattcgaccgcggcctcgcatccggtgcggaggtctgtcattggagggaggctcctctccgctgcgcgcgcgcgtcgcggcctgggcgagtttcctgctggttcctcgtccctcgggagagattttgcgatccttggcgttactgttcgattgcaaacagtattgctgcttctctgaggaggcattagggctatgggcagttgaactgaaccgccgcggcagaaatccattcgtgggagagagaaatcaaagaggagagtgagtgatcatggagcgcgtgattggagggaagtataagcttgggaggaagattgggagcggatcttttggggagctatatctcggtgttaatatacagaatggtgaggaagtgggaataaaattgaatcaagatataccatttttaaacttagagctgaagtgtttggttcaaggattcaccttttctttgggtggaaatggtatcccacacctcaagtggtatggtgtcgagggggagtacaatgttatggtgatcgatcttcttggcccaagcttggaagatttgtttaattcctgccacaggaatttttctatgaaaacagtactcatgcttgctgatcaactgataaaccgagtggaatacatgcattccaagggatttattcatcgtgacatcaagccagacaacttccttatgggcttaggtcggaaagctaatcaggtctatatcattgattatggacttgctaagaaatacaaggaccttcatactcataaacacatcccatacagggagaacaaaaatctgactggaacagcacgttatgctagtgtgaatactcatcttggaatagaacaaagtaggagagatgatctggagtctgctggctatcttctgctatattttttaagaggaagcctcccatggcagggtcttaaagctggcactaagaaacagaagtatgacaaaattagtgaaaagaaaatgcttacgtcagcagaggttctttgcaatcttacccgtcggagttcgtctcatatttcaactattgtcgctccctgcgatttgaagacaggccagactactcttttctgaagaaactgtttcgtgatgtatttatccgggaaggataccagtttgattacgtatttgactggactgtactcaagcaccctcaaatcggttccaacaacaagcttgttcaacaaccaagtgcaagaatggctggagttggaccatcagttgaccgaacagacaaagcctccgtgggacaagaggcccgggacagattcacgggtgctgttgaggcattcgccagaagaaatccaggctctggtcgccatggagatcattccaggcaccaaagccttgcagattcctttggcacatccaacgaagcagttgccgactcagagaaaacgcacatcttgtcctggggagggagctcgtcgaaaatgcccgcggcttcgtccagccggccgacctcctcgggggactgcagtgaccagaaccaccggtgggtttctggcagtagtggcggcagcgggcggccgtccacagtgcagaggcaccaccactcggcaggcgccgagaacagcaggtcgtccacgcgctcccccgtggcccggaacgcggccgagagaggaggctccggctcgcgggacagcacgacgttccggagcctcgagcgcctctccatcaccaccagcaggaggaagtgagctgccgaggaccacgccgacgatttctgtgagtgaaaggcggttactaggccgacatcttttgcgggatcgttgctctctgcagctgaagcaaatcggcaaatggatggacgggattgcagcgcaatgacctcgaggatggcctcctttacaagaactgccatgaaaatgctttctccaaaccgtaacgtataacgcttcccccaaccaaccagagggaagacaactccaaagtacaatgcaatcctgtttcacggcaagctttcactgttcacttgttttgccgttctggcactagtttctaaagtctccagcaatgtaatctatattcatcttctatgcctgtactttatagtctcatctaaaagattctctcttctatatctttctaatctgcagcagcgtcctctatatctcgtcctttatacatactagtcggttgcctatgcgttgtgacggctcacaataatacccacgtaaactatccgccaaaaagatctcaatatttt

SEQ ID NO: 212068 - DNA, 1180 bp, Zea Mays
caacacgttctgtcgttctcgcttgaggcggcccgcggccttctcgaagccctccgctcgctccgtgctcgtggctcccgcacgatccccacattccttggccggctccgcgctcgtgctctcgttgggatcgttgtcagttcagtggaaatgcattcttcggcaatgccacacccagtgatcagaggcacattgagaagccttttaaagtgaaggaggcagaacctgtgaatgtgacaaaaccttcaccacacaagctgctggttctaggaggaagtggtttcgttggatcacacgtttgcaaagaggctttggacaaaggtttagttgtctctagtcttaatagatcgggaaagccatccttaaatgaaccttgggctgacaaagttatatggaaccaaggcaacctccttgaaccagcttcattgaaggatgctatggataatgtttctgcagtggtatcttgtgtcggaggttttggatcaaattcattcatgtataagattaatgggactgcaaacatcaatgccatcagggctgcagctgagaaaggtgtaaagagatttgtatatgtgtcagctgcagactttggattagtgaattatttattgcaaggctattacgagggcaagagggcttctgaagctgaattgttgtcaaagtttacatatggaggagtgatactgaggcctggttttattcatggaactcgtcgagtgggcagtgtaaagatacctcttggtcttgtcggttctcctatgcagatggtgctccaaaatataaaacctttgactaggttaccacttatcgggccgctattgactcctcccgtcagtgctgcctccgtggggaaggtcgctgtgagagcagcgacggatccggtgtttcctcctggcatcgttgatgtctacgggatcatgcgttacagcgagcaaaactaagctgcctcattcaccgggcagtatatacatgccgctgtacttttgttacagctgtttctttgtttgttttacatgtactggtatccttctttaactcacttgtttacgagacgataaacattcaataaatatgtattttagcgacatgtctgtggtactgtttttttttaaaatattttatcgtatcttgagcactcaactgcaacgcgttttaaaaaaaatgccgtgctgatgaagct

SEQ ID NO: 212069 - DNA, 1383 bp, Zea Mays
caacacgttctgtcgttctcgcttgaggcggcccgcggccttctcgaagccctccgctcgctccgtgctcgtggctcccgcacgatccccacattccttggccggctccgcgctcgtgctctcgttgggatcgttgtcagttcaggtacggtggcgatgaggtcgtccgtggcccgcctgattcgctcctcctctgcctcgccctcccgtctcaggtgagagctcccgcccctcgtatgatgcgcgtctgcagttgtctcggcggacatgttcctggaaggaaagggttaagtttccagcaagatttggcatcgcgatggccgatgggtggcttatagtgacaattaggcattaagggaatttattctacttagtgcaaatcgattggagaggaaactgccatttgataacagttccagccagggcgggtcctgatattttggaaatgcattcttcggcaatgccacacccagtgatcagaggcacattgagaagccttttaaagtgaaggaggcagaacctgtgaatgtgacaaaaccttcaccacacaagctgctggttctaggaggaagtggtttcgttggatcacacgtttgcaaagaggctttggacaaaggtttagttgtctctagtcttaatagatcgggaaagccatccttaaatgaaccttgggctgacaaagttatatggaaccaaggcaacctccttgaaccagcttcattgaaggatgctatggataatgtttctgcagtggtatcttgtgtcggaggttttggatcaaattcattcatgtataagattaatgggactgcaaacatcaatgccatcagggctgcagctgagaaaggtgtaaagagatttgtatatgtgtcagctgcagactttggattagtgaattatttattgcaaggctattacgagggcaagagggcttctgaagctgaattgttgtcaaagtttacatatggaggtgctccaaaatataaaacctttgactaggttaccacttatcgggccgctattgactcctcccgtcagtgctgcctccgtggggaaggtcgctgtgagagcagcgacggatccggtgtttcctcctggcatcgttgatgtctacgggatcatgcgttacagcgagcaaaactaagctgcctcattcaccgggcagtatatacatgccgctgtacttttgttacagctgtttctttgtttgttttacatgtactggtatccttctttaactcacttgtttacgagacgataaacattcaataaatatgtattttagcgacatgtctgtggtactgtttttttttaaaatattttatcgtatcttgagcactcaactgcaacgcgttttaaaaaaaatgccgtgctgatgaagct

SEQ ID NO: 212070 - DNA, 1134 bp, Zea Mays
ttgtgcttcggaccatggcttcggttcttcatcggcggtgtgctctttacaaagccttagagctgcctctcctgcaaagtctgaacttgcagagatagtcccacaagagaaatcaccaaaagattccattcaaccaatgtcaccgagtccaaggtattctacctcaagatgaagggcgactaccacagtcaggtgcatagaggaaggatgctgcggggagcaccatgaatccctacaaagctgctcgagtttcctctgactgttcaccattattggaagcaggtcaggcagagagccttggaaccgaactcttggagatggtgcctagcagggaagaggagattaagttgaaagaataaagggaggatgctttgtcgacttttgtagttaatgattatgtgagacttcagtttaagggctcaacttttactggttcttggaagtcatttagtagccctaagatttcatcagcattcttagtagtaattgctatagtatcaaatgggattgtggtatgagttgctcgagtactaagtactaacgttgttgtacattgtgaagctaagtgggtaatatcaaaagggattaagatttatgtgtggtgcttactgtatttgtttttattattttattgtgctttgtacatgtaccgtcattcttactctggtgttcttttaatgcaaagtttgacacaatatatttttatacgagagaccgaaggttacttagtattgttttctgtttcttttatcgtctttgcagatctatgtttggatgatgaaaacagtgctactcgatgtgaagtccaccaatactatagtttaaattaagtctaagatcggtgctttagagggaattggtaagagccagcaagcacttttttttgctggaattatggtagcagtcaggtttcagatttctatgagttcggtgaataaaatgagcttatgggtgttgtcaatcttttttaatttcctgaagttatgataaaaatatatagggtacctattcaaacaatatggttgttaaccgccaaatattttttataacaagttatattgtattatgcagtagataaaaaagataatagtttgtgtaattgtttagctaaaacataattatcttgatataaag

SEQ ID NO: 212071 - DNA, 2283 bp, Zea Mays
taccacccccattgaagtgttgtcgccttttccttgggattttggcagccttttattcccaccatgcactaatttcagataaactaaaggctacaaaaggaagaatctcttatcttccgggtcaccaaaacaaatgaagttagtggtatagaaaagaaatacaacaccccatgatttcccattgaaacaaaaggaagacattcatatccatcattgcaattgcaaaagaaaaaaaatagcaggatgtgcaagctgttccaattgttttttcttttccaattcttagtccatgcaattgcctttatgcttctgcaatctgtctgattgatgattaatcaattaagttttgtaaaaggaattagttgcttagatctctggacttgaggagcaaaggaatcaactcgaggcagaactgaaaaagctactactacatcctgaatctgatgattcagctcaactttcctagattgagactgaaaagctgctagcccagttagttgagactgagatgaacagacgtttgaaggaggacacttacaaaggaaagaagtttaatgcattctgtcacttcttgggctaccaagctaggggagcactgcctgcaaagtttgattgcgattatgcctacgttttggggcatgtgtgctaccacatcatagctgccggattgaacggataacggatacatgactacagtgacaaatcttaagaatccagtgaacaagtggcgatgtggtgcgactcctatttcgtattactactttattcgcttgatgggacgcaaggcttcccatgtggcattggaatgtgctcttcaatcacatccaaacatggtcaaattttcaccattgatccaacctctgctacggcaatttccagcatcggcggtgtgctctttacaaagccttagagctgcctctcctgcaaagtctgaacttgcagagatagtcccacaagagaaatcaccaaaagattccattcaaccaatgtcaccgagtccaaggtattctacctcaagatgaagggcgactaccacaggtatactgttatcgctagcagatctagaccatgcaagttgtggtttgtagagatcaaaacttaagatctgtgtgtagatatttgtctagacaatgggagtgacaggatgctggtttttagtaaggttggttgcttatctatgaatttgcctgtatgatgcatgatcctgtgctgtctcctgtagtacatggttgaaatataaatttgtgttccatgttttttacccgccccctacacgtatctcttggatatctgatttctactcatgatgatttggcatgtaccttgctgagttcaagtcaggtgcatagaggaaggatgctgcggggagcaccatgaatccctacaaagctgctcgagtttcctctgactgttcaccattattggaagcaggtcaggcagagagccttggaaccgaactcttggagatggtgcctagcagggaagaggagattaagttgaaagaataaagggaggatgctttgtcgacttttgtagttaatgattatgtgagacttcagtttaagggctcaacttttactggttcttggaagtcatttagtagccctaagatttcatcagcattcttagtagtaattgctatagtatcaaatgggattgtggtatgagttgctcgagtactaagtactaacgttgttgtacattgtgaagctaagtgggtaatatcaaaagggattaagatttatgtgtggtgcttactgtatttgtttttattattttattgtgctttgtacatgtaccgtcattcttactctggtgttcttttaatgcaaagtttgacacaatatatttttatacgagagaccgaaggttacttagtattgttttctgtttcttttatcgtctttgcagatctatgtttggatgatgaaaacagtgctactcgatgtgaagtccaccaatactatagtttaaattaagtctaagatcggtgctttagagggaattggtaagagccagcaagcacttttttttgctggaattatggtagcagtcaggtttcagatttctatgagttcggtgaataaaatgagcttatgggtgttgtcaatcttttttaatttcctgaagttatgataaaaatatatagggtacctattcaaacaatatggttgttaaccgccaaatattttttataacaagttatattgtattatgcagtagataaaaaagataatagtttgtgtaattgtttagctaaaacataattatcttgatataaag

SEQ ID NO: 212072 - DNA, 1726 bp, Zea Mays
ctcttgaactggaggcgtgatggaggcgaagcaggcggcggctgcggtcgaccggctctcctccctcccggcggagctgcaggacgagatcctcgtccgcctcgacctccgggacgccgtgcgcacctctgcgctctcccgcacctggcgggacctctggaagtcgctctcggtgctctccctctccttccccgtcggcacgcagccctcagtcgtcgacagtatcctcctcccctacataggccctcgcgtctccctattcgacttctgcgtcaacgaggcgtctgtcggccgcatcgacgactggctcgtcgcgctctcccgctgccgcgttgagtccatccacatatctaacagactcggatcatgcgactacttcaacctccactcctcaatcttctcattaggtgatctcgtgtccctgcggctggaaggctgcaacatcccacccctccctgtaggattcgccggctttcctgcgctccaggagctagacctcgcctttgttaacttcccatcgaacgaggacaaacagttggaggctatcattcgtcggtcgcccttgcttcataccctgtttatgtgtaatgtgtgcatccctgatggttacccagactcagtgattgaggcgcccaatctccgtgtgctgtcattcgtttcagagtatgactatggatgccgatttggagagctgccgtgtctcgagtatgccgacattgatgcgttattctgtccgcagcatgaacatgattatggatttttccttgctcggtttgctcacgttcaaaggctcaccatcttctgtccagctgccgatgttaacatgccgtacacacttccattcaccttttataacctgaagaacttggagttatgtctgaacttcggtgaaatggactccattttgttcatgtttaccttgctaaggagctgtcgcaaccttcagggcatagaaatagagtcgcaggacatcgatcagagttttgaggcagattgggagttcttaaatgctctgtggactcatgacatgtgttccgatcttcaaactgtgcacatgatgtgtatcagttggcttccaaatgaaatttcatttatgaagcttatgctctctaaagcaactgttcttcgcacattagatgttgatagacaccctgctgattttgatgatcccataattgacatgctaacatgcaaaagagcttcagctcaagctcgtgtcctgtttggaggtttggagcaacagtggtagttgaggtggtgtattactgagtgcaagattggttcacttgaatgatacaagacccgctttccctgctccctgctgaagtgtttttttttgtttttctccatcatcaccatgatacacgaatcatgtagaaaatggcttatccagggaactggcatgatttgtttgtcttgttcagatgaagctgatttggtattggttgttcactagatcagtagagatattcgtggcagcaagcgcccagagtcgattggttaacgaagcatacctccaaacttgcctgagtaggtgaaattcggctacccattcgttagaacttgttgcttgccaagcagagctcatgcaataagcaatccatggggggttttgtttctagctaaatttcttctctgtttagtgaaagcttctcccctttacttcatactcctgtttgtattgttgtccggttccagttaacgtgccgaatctatttccaacatt

SEQ ID NO: 212073 - DNA, 1012 bp, Zea Mays
gtcgctgccaaaaggagaggcggagactcttgaactggaggcgtgatggaggcgaagcaggcggcggctgcggtcgaccggctctcctccctcccggcggagctgcaggacgagatcctcgtccgcctcgacctccgggacgccgtgcgcacctctgcgctctcccgcacctggcgggacctctggaagtcgctctcggtgctctccctctccttccccgtcggcacgcagccctcagtcgtcgacatcgcaggacatcgatcagagttttgaggcagattgggagttcttaaatgctctgtggactcatgacatgtgttccgatcttcaaactgtgcacatgatgtgtatcagttggcttccaaatgaaatttcatttatgaagcttatgctctctaaagcaactgttcttcgcacattagatgttgatagacaccctgctgattttgatgatcccataattgacatgctaacatgcaaaagagcttcagctcaagctcgtgtcctgtttggaggtttggagcaacagtggtagttgaggtggtgtattactgagtgcaagattggttcacttgaatgatacaagacccgctttccctgctccctgctgaagtgtttttttttgtttttctccatcatcaccatgatacacgaatcatgtagaaaatggcttatccagggaactggcatgatttgtttgtcttgttcagatgaagctgatttggtattggttgttcactagatcagtagagatattcgtggcagcaagcgcccagagtcgattggttaacgaagcatacctccaaacttgcctgagtaggtgaaattcggctacccattcgttagaacttgttgcttgccaagcagagctcatgcaataagcaatccatggggggttttgtttctagctaaatttcttctctgtttagtgaaagcttctcccctttacttcatactcctgtttgtattgttgtccggttccagttaacgtgccgaatctatttccaacatt

SEQ ID NO: 212074 - DNA, 2076 bp, Zea Mays
gcacggagcctttgccggcggcagcctagtacgctgtacggctgtagtcgctgccaaaaggagaggcggagactcttgaactggaggcgtgatggaggcgaagcaggcggcggctgcggtcgaccggctctcctccctcccggcggagctgcaggacgagatcctcgtccgcctcgacctccgggacgccgtgcgcacctctgcgctctcccgcacctggcgggacctctggaagtcgctctcggtgctctccctctccttccccgtcggcacgcagccctcagtcgtcgacagtatcctcctcccctacataggccctcgcgtctccctattcgacttctgcgtcaacgaggcgtctgtcggccgcatcgacgactggctcgtcgcgctctcccgctgccgcgttgagtccatccacatatctaacagactcggatcatgcgactacttcaacctccactcctcaatcttctcattaggtgatctcgtgtccctgcggctggaaggctgcaacatcccacccctccctgtaggattcgccggctttcctgcgctccaggagctagacctcgcctttgttaacttcccatcgaacgaggacaaacagttggaggctatcattcgtcggtcgcccttgcttcataccctgtttatgtgtaatgtgtgcatccctgatggttacccagactcagtgattgaggcgcccaatctccgtgtgctgtcattcgtttcagagtatgactatggatgccgatttggagagctgccgtgtctcgagtatgccgacattgatgcgttattctgtccgcagcatgaacatgattatggatttttccttgctcggtttgctcacgttcaaaggctcaccatcttctgtccagtacgctatttttactttgttctccttattatgtgctttgttataaatcaaggctgaaacgctagcgattggctcaagctgattacatagttcagaaatataacgtcgtctcctatacttgtgaaatagcatgaaaagctacactaattattaataataaaaaaagaaacaatcctttcattcctgccttacttccatctgcctgtggtcctttgtttcgcagaaatcccatccatatttctagaccttgtatggcttttatccactttttgtcacaggctgccgatgttaacatgccgtacacacttccattcaccttttataacctgaagaacttggagttatgtctgaacttcggtgaaatggactccattttgttcatgtttaccttgctaaggagctgtcgcaaccttcagggcatagaaatagagtcgcaggacatcgatcagagttttgaggcagattgggagttcttaaatgctctgtggactcatgacatgtgttccgatcttcaaactgtgcacatgatgtgtatcagttggcttccaaatgaaatttcatttatgaagcttatgctctctaaagcaactgttcttcgcacattagatgttgatagacaccctgctgattttgatgatcccataattgacatgctaacatgcaaaagagcttcagctcaagctcgtgtcctgtttggaggtttggagcaacagtggtagttgaggtggtgtattactgagtgcaagattggttcacttgaatgatacaagacccgctttccctgctccctgctgaagtgtttttttttgtttttctccatcatcaccatgatacacgaatcatgtagaaaatggcttatccagggaactggcatgatttgtttgtcttgttcagatgaagctgatttggtattggttgttcactagatcagtagagatattcgtggcagcaagcgcccagagtcgattggttaacgaagcatacctccaaacttgcctgagtaggtgaaattcggctacccattcgttagaacttgttgcttgccaagcagagctcatgcaataagcaatccatggggggttttgtttctagctaaatttcttctctgtttagtgaaagcttctcccctttacttcatactcctgtttgtattgttgtccggttccagttaacgtgccgaatctatttccaacatt

SEQ ID NO: 212075 - DNA, 984 bp, Zea Mays
cgcacctttcaagacgatgatagatatcctactgatggagacaagcaaatgcttgctaaacaaacgggtttaacacggaaccaggtatccaactggtttataaatgcaagggttcgtctttggaaaccaatggtggaagagatccacaaccttgagatgaggcaggtgcacaaacaccctgttctcgacaagggccagcacgtgctgcatcaccaaacccagcattcgttcgagagcagtggaaagccttctgacccttccgactctcagcttggccaaagcagcagcatcacgaggaaccacaacatccctgcgtcccagggatttgccgatgagctctccgagatgtcccattctattcagcaggggcaggtaaccttcgcatacaatgggatgtcggcgccacaccacagcctcgcttcgtcacagcaccaccagcaggccgggccgatgagcggcattggtggcgcggggaacggtggcgtctccctcaccctcggcctccaccagaacaacagagtctgcatagccgagccactcccggcgtccgtccctcccaacctcgctcaccgttttgggttggaggaggtcagcgacccctacatgatgggctctttcgggaaccaggaccggcatttcggcaaggagattggcggccatttggtgcatgattttgttggctgacatggcagctgctgctgcattgttgcttctggtcagctgatctgatctcagcttgctgatggtgcacaagcatgtatttgtaccactactagtatgttagaatggtatataagtgtatcacttggtggctttggcttgatcagtttgaatcaattcctgaggatggagaaaaaacattgctgaattggcgagtccttgttggtccaggcgtgctatcaaatgctatttgacttccaaggctagaagcgattaggtggtttgccttccctagttcacacttgtttggtctgaattgagatt

SEQ ID NO: 212076 - DNA, 984 bp, Zea Mays
atgattttgtcaagaaagaagtctagaatcagacggcagggaggtgcaacacatgttgacatagcatgtgacaaggacttagtaaagcttgccatggatcttaccaaccttccgatctgtgtctcatctgtagatccttcagcgttccattctgcagtacaagcaggagctaaaatggttgagattggaaactatgattctttttatgagatgggcattgagttctcctctgagcagatactgaagctaacaagggaaacaaggaagatgcttccagacatcaccttatcagtaacagttcctcacacacttagtttgccagatcagatgagactagcagagctactcgaagaggaaggagctgatataatccaaactgagggtgggaaatgttctagcccgacaaaacctggagtgcttggattgattgaaaaggcaacaccaacactcgccgcagcatactccatctctcgggctgttagtattccagtgatgtgctcgtcagggttaagctcggtgactgcaccaatggcagtaactgcaggagctgctggagttggagtcggttctgctattaacaaactcaacgacgttgtggcaatgatcgctgaggtgagaagcattgcgcaagcaatggagcttgcgccaagaatcgtgtccgaaaccctgagaacaattagttactagtggctaggaatacccttgccatttctgagcaaacttgagcagtcaataagaaagcaaaagagaggcatcgactctgcattttattctctctacgctgtcttttgcctgtggcagtgaatagcgcattagcatcatagaagtattagcttgatcaatggaagttgttcatgcgcttcttcatcgctgcaagtgttgtcatcttgtcgaactcacaataagcttagataagtgctgggtttgtgggaacatcgtttgtgcaatataaatgagatcttgcacctacaaatttgactcttc

SEQ ID NO: 212077 - DNA, 2915 bp, Zea Mays
gctcccggcagcacgtcgcctcgccccccactcccacgtctctgtccctctccctgccctcccccgtcttcccaaccaccacccacccgttcttttccagccaaaccaacgcacgcacacggcacaccctccttctggcagcagagcggcagccaatggccatcgagacggacgcggcggcggcgagggcgagggcgtcgggctcggtttcagatacggcgcccatgtccccggccgccgaggcggcagcggctgcggcggccccgggcccggcgcgcccgcgcgggtggctgaggaagctcatccccacggactacctgccccggagcagccggcgctggaggctggccgccccgtccgccgccggcgcgtccaggctcgcctcgtcgctctcccgctccctcaggtggaagcgcctcccggggctctcctccctcaccctgcgcagcggctccgcggcggcggcagtggacgccgtcgcgttccgcgtcatgtacgtcgtcgaggccgtcgtgctgggcctcgcgctctcctgcttcttcctctgctgcggctgccacctctaagctcccaccccctgcttttcttcccctagctcttcactactctggtcgtctccggctcgcggctcggcctccgcctcggcgtgtaacaaaaatgcccatcgtgttggttttttttctttcgatgatctccctgtctgtaaatttcctaccttttgctttcggtaggtaaaaaagaacacgaaaacttgcgatgcctatagttcaatttgcgttttgttggatgctgtgaacgcacgaaattgcgatctcggatactgggacccactgagttcttgtttgttcatgcaaattgctgccgctgtggcgctgtcccgttaaaaaaccaataccggaggacctggtcgccgccggcgcgagcctcgctacgcgccgtggccgcagcatccgacgtggtgttcaccatggtcggtaaccccggcgacgtccgtgcggtggtcctggagcacggtatgccgatatggtgccctcgcgggcctcgccatcgaagcgccgacatccgggggcgacgtcggcgcccaggacggcacgctcttcgcccatgcggcgacgaggccgtagtcgcttggctcgagccgctcttcaccttcctcggcagggcgacccgcatggggcagctggcagagcagcaagatcgccatccagatcgcggtgggcctcggcgagttcgtggtcttcgcccacctggcggggctcaacgcgccgctgttcctcctcgcggtgtccaagagcgcggctggatcgcgcgtcacgacttcttcggcaactgattgctccgccgcgagttcacgtcagaggtgggtggcagcgtgccgtacatcgtcaaagacctcggcatggcgctcgaggtcggggacggcggggaggagtccaacgtgctgcctggagcggcgctgtaccggcagatgttctcggcgatggtggccaatggcgacggcgacttgagcttgtagggactgatcaccgccgttgagcgcctgaacggcattggcgagtagagcgcagggctggtctccaaaatgcagcactggacttgaaaacttgtgtattttttctgaataaaatttggggccatgtcaatttgtcaaatcatgacggggctttacgtccgtcgtgtatcgcgtttgacttgctgattttcgtttgtcattttgccagacactaaaaaacatgtggattgtgaaataacaccgcagaaacaactgcaactacctcaactgaattatctgacggctgagggctagttcgcgaggactgtaaacaccaaggggcttcctgctgaaccgtgcaagatttttgacgtgtcagacagatatttgcaccgtcgacctctgctgctggcctgtcgctgcgtagtgtagtgtcatcttatctcttcctcctaccttcactctcaaaatcttcagggagtcgtagaggagcagcaggtgcaccaaaaggatggcagcgccaggctccctgcgacttctccaggccccgtccttcgctgcggccaagtgccagccggtgggtggccgggcatccgcgcggcgagcgccacggccactgttcgccgtgcgcgcctcggctgctgacgccgccaacagggatgccgtgctcaaggccttccgcgagaacagggctctcaagataatttccggtcttcagaactttgacaggagcagtgttgcatctgttgtcacagctgcagataagatgagactagcagagctactcgaagaggaaggagctgatataatccaaactgagggtgggaaatgttctagcccgacaaaacctggagtgcttggattgattgaaaaggcaacaccaacactcgccgcagcatactccatctctcgggctgttagtattccagtgatgtgctcgtcagggttaagctcggtgactgcaccaatggcagtaactgcaggagctgctggagttggagtcggttctgctattaacaaactcaacgacgttgtggcaatgatcgctgaggtgagaagcattgcgcaagcaatggagcttgcgccaagaatcgtgtccgaaaccctgagaacaattagttactagtggctaggaatacccttgccatttctgagcaaacttgagcagtcaataagaaagcaaaagagaggcatcgactctgcattttattctctctacgctgtcttttgcctgtggcagtgaatagcgcattagcatcatagaagtattagcttgatcaatggaagttgttcatgcgcttcttcatcgctgcaagtgttgtcatcttgtcgaactcacaataagcttagataagtgctgggtttgtgggaacatcgtttgtgcaatataaatgagatcttgcacctacaaatttgactcttc

SEQ ID NO: 212078 - DNA, 645 bp, Zea Mays
ccagagcaagaagagattgcgcggagcaaggtggccggggaggctctgtcgtgggaggacctcggcaggatgcggtacacctggttggcggcgatggagacgctgcggatggtgcctccggtgttcaccatgacgaggaagacggtggacgacgtcgagtacggaggctacctcatacccaagggctggcaggtgatccacgcggccaacatgacgcactgggacccggccatcttcccggagcccggcaggttcgacccagctcggttcgagaacccgtcggcggtgccacccttcgccttcgtgccgttcggtggcggcgcgcgcgtctgccccgggaacgagttcgccagggtggagacgctggtgaccgtgcaccacatcgtgacgcgcttcaggtggaagctcgccgccggctgcgaccgcagcttctccaggttcccgctgccgtacccgtctcagggactcctcatcgacatcgagcctattcagaaatgaatgatttgctttctcgattgcatttcgtccagttcgccttgtaaaatcaatatgccaatatgaaccatctgcgaatctacagttatattttgggtttgctcgacgtacaaaagttaactgaattttatatacagagaagaatcctag

SEQ ID NO: 212079 - DNA, 3404 bp, Zea Mays
caagggcgctgcgcgctagcagaggcgctgagctgagctctcagccatggaagtggtcgatctctcccccacgtcccgccccctctcaccgctcctctccaccgcacccgcccgccgcctccgcctcctccctccccgctgcgtcgtcggcctgcgcgcctctccccggacccgagcctcagtagaacccgctacccaggaattgggaacagcggatgcagtggagtggagtggggatgccatacgtcggcgtttccttgaattttatgcagcccgtggccacaagatccttccgagctcgtcgcttgtgcctggcgacccaactgtgttccttaccatagcgggaatgcttcagttcaagcctatattcctcggcaaggaacctaggcgtgtgccacgcgccactacctctcagaagtgcatacggacaaacgacattgaaaacgtgggtcgcactgctcgacatcagaccttctttgaaatgcttgggaatttcagttttggtgattacttcaagaaggaagcaaccacatgggcatgggagctggcaaccaaggagtatggattgcctgcagaaaggttgtggattagtgtttttgaagatgacaatgaagcattcaacatctggcacaatgaggttggtgtgccaaaggagcggatacagaggatgggtgcagaagataacttttggactagtggcgcaactggaccttgtggaccttgctctgaaatttattatgatttctatcctgagagaggatcatcagatgtggatttgggcgatgatagccgattcattgaattctataatcttgtctttatgcaatataacaaaaaagacgatggatctctagaaccgttgaaacaaatgaacattgatacaggaatgggccttgagcgtatggcacgcattcttcaaaaggttccaaacaactatgagacagacttgattttcccaattatagaaaaggcagctagcatggcgatggtgtcctatgcaaaagctgatgatgccacaaagacaaatctcaagataattggagatcacatgagagcagttgtttatctcatatcagatggggtaattccctcaaatatcgggagaggatatgttgttcgaaggctaataagaagagtagttcggatgggtagattgataggaataagaggtgacgggcatggaaactctgaaggtgcatttttaccttcactagctgaggtagtgatcagccttagcactgagatagattcagatgttgaatcacgacggagatcgatccttggagaacttcaaagggaagagatgcgatttgttcagactttggaaagaggagaaaagttattagctgaacttctggatgaagctttattaaatgctggtaataatggaaacaagccttccttatctggaaaaaatgttttccttttgtacgatacatatggtttcccagtagagattacagctgaaatagccagtgaacaaggcgttactgttgatattgagggatttgatattgaaatggaaaaccagaggaaacaatctcaagctgctcataatgtagtcagactttctgtaggaaatgagaccgagatagtaaagaacatcccggatactgaatttttgggatatgattctctctctgcttctgctgtcattaaaggtctcctagttaatggaaacccagttaatgaagtttctcaaggttctgaagtagaaatattattagaccggacaccgttctatgctgaatcgggtggtcaagttggagataatggtttcttatatgtgaatggaggggaagatagaagacaaacaacagttatagaaatcaatgacgtccaaaagtctctgggaaatatatttgtgcacaaaggcatgattaagcaggggtctgtagaggttggcaaggaagtagatgcttctgttgatgcaaaattgaggcagggggctaaggctcatcacactgcaacacatctactacaatctgctcttaaaagcgtagttggttcagaaacttcacaggctggttcccttgtggcgtttgaccatctccgatttgacttcaatttccatcgcccactttctgaagaggaattaacaacaattgaagcacttataaaccaatggattggcaatgcagcacatgttgagacaaaagtcatggctttgcaagatgcaaaaaatgctggtgcgattgcaatgtttggagaaaaatacggtgaacaggtcagagtcgtagaggttcccgggatctcattggaactctgtggtgggactcacgtcagtaatactgctgagattcgtggtttcaagataatttcagaacaaggaatagcttctgggatcagaaggatagaagcagttgcaggtgacgcttttgttgactatgtgtgtgctcgggacaattacatgcggcgcttatgcttatcccttaaggttaaggctgaagatgtgaacagtagagtagaaacaattcttgaagagctaagagcaaccagaaacgtagcatcatctctacgcagcaaaattgcagtgctaaaagcagcttctcttgcaagtagagctacaactgtggagccccagaatgtcaggattgtggtcgagaacatgggtgatgtcgacgcagatgggctgaaaagcgccgcggagtatctcatagataccctcaaagaccctgctgcggtgattttaggatcaagcccaggggatggtaaagtcagcctggttgctgccttcagccctgcaatcgtcgaaatggggctgcaggccgggaagttcgtgagtggcatagccaaactctgcggcggaggcggtggaggcaagcccaatttcgcccaagctggggggcggaagccggagaacttgcccgacgcccttgagaaagcccgagctgaaattgtggcacgggtatcaggttcgagctgattctccgctgcctcacacctgatactggaagtatagggataggattcatatgaaatgtatatgtaattgtcattggcattctaagcgaaaacacttgtatttctccctaccttgccgtgtacgctttctgcagatgacggagcaaattttgtagcttgtaattgtaactagtggccgaacagaacggggaaaagatcaaatcttcacacagcaaaactactgctcatgtttaatctaatcttaaaaacataagaaattatttgtcacatgatcaactaatagtctaatacctagactagaccaaatacatctgatcaagtcagccagccacgtgcgtccaagcaaagattgagcacgtcctagacattcaactctgatttcagtcattttaactagtgaaattgctagatttagtgggacctaactgtgtccatagctagttaatccgagaggactttaagcaaaacagagaactgat

SEQ ID NO: 212080 - DNA, 2379 bp, Zea Mays
gggcgctgcgcgctagcagaggcgctgagctgagctctcagccatggaagtggtcgatctctcccccacgtcccgccccctctcaccgctcctctccaccgcacccgcccgccgcctccgcctcctccctccccgctgcgtcgtcggcctgcgcgcctctccccggacccgagcctcagtagaacccgctacccaggaattgggaacagcggatgcagtggagtggagtggggatgccatacgtcggcgtttccttgaattttatgcagcccgtggccacaagatccttccgagctcgtcgcttgtgcctggcgacccaactgtgttccttaccatagcgggaatgcttcagttcaagcctatattcctcggcaaggaacctaggcgtgtgccacgcgccactacctctcagaagtgcatacggacaaacgacattgaaaacgtgggtcgcactgctcgacatcagaccttctttgaaatgcttgggaatttcagttttggtgattacttcaagaaggaagcaaccacatgggcatgggagctggcaaccaaggagtatggattgcctgcagaaaggttgtggattagtgtttttgaagatgacaatgaagcattcaacatctggcacaatgaggttggtgtgccaaaggagcggatacagaggatgggtgcagaagataacttttggactagtggcgcaactggaccttgtggaccttgctctgaaatttattatgatttctatcctgagagaggatcatcagatgtgttgtttgcaggatttgggcgatgatagccgattcattgaattctataatcttgtctttatgcaatataacaaaaaagacgatggatctctagaaccgttgaaacaaatgaacattgatacaggaatgggccttgagcgtatggcacgcattcttcaaaaggctcatcacactgcaacacatctactacaatctgctcttaaaagcgtagttggttcagaaacttcacaggctggttcccttgtggcgtttgaccatctccgatttgacttcaatttccatcgcccactttctgaagaggaattaacaacaattgaagcacttataaaccaatggattggcaatgcagcacatgttgagacaaaagtcatggctttgcaagatgcaaaaaatgctggtgcgattgcaatgtttggagaaaaatacggtgaacaggtcagagtcgtagaggttcccgggatctcattggaactctgtggtgggactcacgtcagtaatactgctgagattcgtggtttcaagataatttcagaacaaggaatagcttctgggatcagaaggatagaagcagttgcaggtgacgcttttgttgactatgtgtgtgctcgggacaattacatgcggcgcttatgcttatcccttaaggttaaggctgaagatgtgaacagtagagtagaaacaattcttgaagagctaagagcaaccagaaacgtagcatcatctctacgcagcaaaattgcagtgctaaaagcagcttctcttgcaagtagagctacaactgtggagccccagaatgtcaggattgtggtcgagaacatgggtgatgtcgacgcagatgggctgaaaagcgccgcggagtatctcatagataccctcaaagaccctgctgcggtgattttaggatcaagcccaggggatggtaaagtcagcctggttgctgccttcagccctgcaatcgtcgaaatggggctgcaggccgggaagttcgtgagtggcatagccaaactctgcggcggaggcggtggaggcaagcccaatttcgcccaagctggggggcggaagccggagaacttgcccgacgcccttgagaaagcccgagctgaaattgtggcacgggtatcaggttcgagctgattctccgctgcctcacacctgatactggaagtatagggataggattcatatgaaatgtatatgtaattgtcattggcattctaagcgaaaacacttgtatttctccctaccttgccgtgtacgctttctgcagatgacggagcaaattttgtagcttgtaattgtaactagtggccgaacagaacggggaaaagatcaaatcttcacacagcaaaactactgctcatgtttaatctaatcttaaaaacataagaaattatttgtcacatgatcaactaatagtctaatacctagactagaccaaatacatctgatcaagtcagccagccacgtgcgtccaagcaaagattgagcacgtcctagacattcaactctgatttcagtcattttaactagtgaaattgctagatttagtgggacctaactgtgtccatagctagttaatccgagaggactttaagcaaaacagagaactgat

SEQ ID NO: 212081 - DNA, 2442 bp, Zea Mays
cgctgcgcgctagcagaggcgctgagctgagctctcagccatggaagtggtcgatctctcccccacgtcccgccccctctcaccgctcctctccaccgcacccgcccgccgcctccgcctcctccctccccgctgcgtcgtcggcctgcgcgcctctccccggacccgaggactcggctgcgttggaggtagtctcagcagaaggcattctttttgtaagaacggattcttcgcaacaagcagttcgtcagcctcagtagaacccgctacccaggaattgggaacagcggatgcagtggagtggagtggggatgccatacgtcggcgtttccttgaattttatgcagcccgtggccacaagatccttccgagctcgtcgcttgtgcctggcgacccaactgtgttccttaccatagcgggaatgcttcagttcaagcctatattcctcggcaaggaacctaggcgtgtgccacgcgccactacctctcagaagtgcatacggacaaacgacattgaaaacgtgggtcgcactgctcgacatcagaccttctttgaaatgcttgggaatttcagttttggtgattacttcaagaaggaagcaaccacatgggcatgggagctggcaaccaaggagtatggattgcctgcagaaaggttgtggattagtgtttttgaagatgacaatgaagcattcaacatctggcacaatgaggttggtgtgccaaaggagcggatacagaggatgggtgcagaagataacttttggactagtggcgcaactggaccttgtggaccttgctctgaaatttattatgatttctatcctgagagaggatcatcagatgtggatttgggcgatgatagccgattcattgaattctataatcttgtctttatgcaatataacaaaaaagacgatggatctctagaaccgttgaaacaaatgaacattgatacaggaatgggccttgagcgtatggcacgcattcttcaaaaggctcatcacactgcaacacatctactacaatctgctcttaaaagcgtagttggttcagaaacttcacaggctggttcccttgtggcgtttgaccatctccgatttgacttcaatttccatcgcccactttctgaagaggaattaacaacaattgaagcacttataaaccaatggattggcaatgcagcacatgttgagacaaaagtcatggctttgcaagatgcaaaaaatgctggtgcgattgcaatgtttggagaaaaatacggtgaacagagtcgtagaggttcccgggatctcattggaactctgtggtgggactcacgtcagtaatactgctgagattcgtggtttcaagataatttcagaacaaggaatagcttctgggatcagaaggatagaagcagttgcaggtgacgcttttgttgactatgtgtgtgctcgggacaattacatgcggcgcttatgcttatcccttaaggttaaggctgaagatgtgaacagtagagtagaaacaattcttgaagagctaagagcaaccagaaacgtagcatcatctctacgcagcaaaattgcagtgctaaaagcagcttctcttgcaagtagagctacaactgtggagccccagaatgtcaggattgtggtcgagaacatgggtgatgtcgacgcagatgggctgaaaagcgccgcggagtatctcatagataccctcaaagaccctgctgcggtgattttaggatcaagcccaggggatggtaaagtcagcctggttgctgccttcagccctgcaatcgtcgaaatggggctgcaggccgggaagttcgtgagtggcatagccaaactctgcggcggaggcggtggaggcaagcccaatttcgcccaagctggggggcggaagccggagaacttgcccgacgcccttgagaaagcccgagctgaaattgtggcacgggtatcaggttcgagctgattctccgctgcctcacacctgatactggaagtatagggataggattcatatgaaatgtatatgtaattgtcattggcattctaagcgaaaacacttgtatttctccctaccttgccgtgtacgctttctgcagatgacggagcaaattttgtagcttgtaattgtaactagtggccgaacagaacggggaaaagatcaaatcttcacacagcaaaactactgctcatgtttaatctaatcttaaaaacataagaaattatttgtcacatgatcaactaatagtctaatacctagactagaccaaatacatctgatcaagtcagccagccacgtgcgtccaagcaaagattgagcacgtcctagacattcaactctgatttcagtcattttaactagtgaaattgctagatttagtgggacctaactgtgtccatagctagttaatccgagaggactttaagcaaaacagagaactgat

SEQ ID NO: 212082 - DNA, 3480 bp, Zea Mays
ctagcagaggcgctgagctgagctctcagccatggaagtggtcgatctctcccccacgtcccgccccctctcaccgctcctctccaccgcacccgcccgccgcctccgcctcctccctccccgctgcgtcgtcggcctgcgcgcctctccccggacccgaggactcggctgcgttggaggtagtctcagcagaaggcattctttttgtaagaacggattcttcgcaacaagcagttcgtcagcctcagtagaacccgctacccaggaattgggaacagcggatgcagtggagtggagtggggatgccatacgtcggcgtttccttgaattttatgcagcccgtggccacaagatccttccgagctcgtcgcttgtgcctggcgacccaactgtgttccttaccatagcgggaatgcttcagttcaagcctatattcctcggcaaggaacctaggcgtgtgccacgcgccactacctctcagaagtgcatacggacaaacgacattgaaaacgtgggtcgcactgctcgacatcagaccttctttgaaatgcttgggaatttcagttttggtgattacttcaagaaggaagcaaccacatgggcatgggagctggcaaccaaggagtatggattgcctgcagaaaggttgtggattagtgtttttgaagatgacaatgaagcattcaacatctggcacaatgaggttggtgtgccaaaggagcggatacagaggatgggtgcagaagataacttttggactagtggcgcaactggaccttgtggaccttgctctgaaatttattatgatttctatcctgagagaggatcatcagatgtgttgtttgcaggatttgggcgatgatagccgattcattgaattctataatcttgtctttatgcaatataacaaaaaagacgatggatctctagaaccgttgaaacaaatgaacattgatacaggaatgggccttgagcgtatggcacgcattcttcaaaaggttccaaacaactatgagacagacttgattttcccaattatagaaaaggcagctagcatggcgatggtgtcctatgcaaaagctgatgatgccacaaagacaaatctcaagataattggagatcacatgagagcagttgtttatctcatatcagatggggtaattccctcaaatatcgggagaggatatgttgttcgaaggctaataagaagagtagttcggatgggtagattgataggaataagaggtgacgggcatggaaactctgaaggtgcatttttaccttcactagctgaggtagtgatcagccttagcactgagatagattcagatgttgaatcacgacggagatcgatccttggagaacttcaaagggaagagatgcgatttgttcagactttggaaagaggagaaaagttattagctgaacttctggatgaagctttattaaatgctggtaataatggaaacaagccttccttatctggaaaaaatgttttccttttgtacgatacatatggtttcccagtagagattacagctgaaatagccagtgaacaaggcgttactgttgatattgagggatttgatattgaaatggaaaaccagaggaaacaatctcaagctgctcataatgtagtcagactttctgtaggaaatgagaccgagatagtaaagaacatcccggatactgaatttttgggatatgattctctctctgcttctgctgtcattaaaggtctcctagttaatggaaacccagttaatgaagtttctcaaggttctgaagtagaaatattattagaccggacaccgttctatgctgaatcgggtggtcaagttggagataatggtttcttatatgtgaatggaggggaagatagaagacaaacaacagttatagaaatcaatgacgtccaaaagtctctgggaaatatatttgtgcacaaaggcatgattaagcaggggtctgtagaggttggcaaggaagtagatgcttctgttgatgcaaaattgaggcagggggctaaggctcatcacactgcaacacatctactacaatctgctcttaaaagcgtagttggttcagaaacttcacaggctggttcccttgtggcgtttgaccatctccgatttgacttcaatttccatcgcccactttctgaagaggaattaacaacaattgaagcacttataaaccaatggattggcaatgcagcacatgttgagacaaaagtcatggctttgcaagatgcaaaaaatgctggtgcgattgcaatgtttggagaaaaatacggtgaacaggtcagagtcgtagaggttcccgggatctcattggaactctgtggtgggactcacgtcagtaatactgctgagattcgtggtttcaagataatttcagaacaaggaatagcttctgggatcagaaggatagaagcagttgcaggtgacgcttttgttgactatgtgtgtgctcgggacaattacatgcggcgcttatgcttatcccttaaggttaaggctgaagatgtgaacagtagagtagaaacaattcttgaagagctaagagcaaccagaaacgtagcatcatctctacgcagcaaaattgcagtgctaaaagcagcttctcttgcaagtagagctacaactgtggagccccagaatgtcaggattgtggtcgagaacatgggtgatgtcgacgcagatgggctgaaaagcgccgcggagtatctcatagataccctcaaagaccctgctgcggtgattttaggatcaagcccaggggatggtaaagtcagcctggttgctgccttcagccctgcaatcgtcgaaatggggctgcaggccgggaagttcgtgagtggcatagccaaactctgcggcggaggcggtggaggcaagcccaatttcgcccaagctggggggcggaagccggagaacttgcccgacgcccttgagaaagcccgagctgaaattgtggcacgggtatcaggttcgagctgattctccgctgcctcacacctgatactggaagtatagggataggattcatatgaaatgtatatgtaattgtcattggcattctaagcgaaaacacttgtatttctccctaccttgccgtgtacgctttctgcagatgacggagcaaattttgtagcttgtaattgtaactagtggccgaacagaacggggaaaagatcaaatcttcacacagcaaaactactgctcatgtttaatctaatcttaaaaacataagaaattatttgtcacatgatcaactaatagtctaatacctagactagaccaaatacatctgatcaagtcagccagccacgtgcgtccaagcaaagattgagcacgtcctagacattcaactctgatttcagtcattttaactagtgaaattgctagatttagtgggacctaactgtgtccatagctagttaatccgagaggactttaagcaaaacagagaactgat

SEQ ID NO: 212083 - DNA, 1311 bp, Zea Mays
atgagtaccgctaatcgctaccaacacatcaagtcaactaagcctgttgtaggcaaagcaagaaaattgaaggatctcatgataaaaagtgacaataggatatgtgctgactgtggtgcacctgatcccaaatgggcatctgctaatattggagtgtttctttgcttaaaatgtggagatgttcatagggcacttggacctgacatctcaaaggttttatctgtaactttggatgattggtctgatagtgatatcgactccatggttgaggttggtggaaactcacatgcaaattcaatttatgaggcttttcttccaaaagatcacctaaaacccaaaccagattcaacgatggaatatatgacaaaaattataagagctaagtatgagacacaagattttttgaagccaagtctacgcatttcatcaagatcatcttttaaatctaccacctctatgaagagtgtagatatcaatttctctagcacttcaaggaaggacatctctaaagctcaatcaacggttaaaataagtgatctgaatccggtatggaatgaagtgcttaagatatctgttcctcgaaattatggacctctaaaacttctagagaactacttagatgatgattatcttgtgtttgattgccctggccagattgaactcttcacacatgttccagttctgcggaactttgtcgagcacctgaaacggaaaattttcaacgtttgcgctgtttaccttcttgattcacggtttgtcagcgatgtaacaaaatacattagtggttgcatggcttctctatctgctatgattcagcttgaacttcctcatatcaacatcctttcaaagatggatctgatctccaacaaaaaagatgtagaagagttcttctttcacagctgaatcggcagatggcaccttggtttggcaagttgaacaagtgtttagctgaactggttgatgattacagcatggttaatttcattccacttgatttgagaaaggaaagcatcatacaatatgtgctatcttctatcggcacctgtatccaatatggggaagatgcagatgtgaaggtcagggacttcgaagaagacgaagactaaccactagatgctataggaggtgcaaactggttgctagcagtagtgtagtgcggagtgacactttgggactgtgtatggcgcaggcatgcaaaaacatcgtaggatgctcatgacagctatctggtctatgtaagacgaactaaagcagatatttggcaagtcctagtaaaacgtgtgtgcgccttgatggtcctgttctccctca

SEQ ID NO: 212084 - DNA, 898 bp, Zea Mays
accacccaaacccaagcagagaagcagagacacatttggctcactcactcacactcactcgctcatagattgtcctgtccgtccatcatctctagctagcagcttccagtgagagcggcaagcgacaccacaaccagacaacacaccaccaccgagctgtgagaataagttcgcagacaggatgggcaagctgtggacgatcctcactcacctccactccctagcaggccctttgtcagttcagttccgatcggtgatgctgagaactgagaaccgtctgctgctcttcgttccctttttgcaggccaacggtgatgctgctgtaccctctgtacgcgtccgtgcgggcgatggagagcccgtccaagctggacgacgagcagtggctcgcctactggatcctctactccttcgtcacgctcatggagatgctcctcgagtccctcatatactggatccccatctggtacgagctcaagctgctgttcatcgcgtggctcgtgctccccaacttcaggggcgccgccttcatctacgacaagttcgtgcgcgagcagctccggaagcacggcctcaccgccgccggctccgtcaagtcgtcgtcgccgtcgtccaaggacaaggacaagcccaagaacaagttcctcgccttcgtcacgcccaagaaggatcatgaagcttactgaagtgggttgcagtgatcccattcctggaccatgtcccggcaacctgtagtgcactccactagatttctgttgtgtttgttctcgacttgaaatagagcccgttcgatgtgtgtgtggccattctgtatgtgtgagcatcaactctaacatggaatggagacaagtgccaactttcggtgctgatgatgatgtgaatgtgtgaaatttatgtc

SEQ ID NO: 212085 - DNA, 2435 bp, Zea Mays
atcatgttgatcggcggcttgggcgctgtgtgatgatagaatggagcgcattgctctcgtctgcacgccgttctggcctcgctcgccagctcgggcggctccacgtctttgtcctgcagcagggggcagtggagatgaccgatgaggccatctcccgcttccctgtcagctctggaatgagatgcggcacgatctcgttgccctgttactccgcgccagctccatctccgtctccggcggcgctcgcgcagcacagacgctccacccgctggcgctcaagtccgggcgcgcctcggaggctcgcgtggcgaccgcgctggccgtggcgtacgcgcggtggggcctcgtcgcgcacgcacgccgcgtgttcgacgaagcgccgcgcagggacctggtcctctacaacgccatggtctcctgctatgcctcccacggtctcgcgcgcgaggcctgggcgctctttgccgccgcgcggcgctccgggatcgcccccgacgggttcaccttcagcgccctgctccgtccgccgccgcgccgtggccgccacccaaccgccggcgccgtcgatgacgggctgctgctcaggatgggagccctggcgcacagcctcgtgctcaggctgggtctcctcgcagacgtggtggttgccaccgcgctgctcgacatgtacgccaagtgcggccgggttgacgaggcgcgctgggtgttcgacgctatggcggtcaggaacgtcgtctcatggaacgcgatcgtagtctgctatggtcgggttggtggaggcaaggacgctgttgagctgttccggtggatgctgagagacgggagctgctgcccggatgagctcacgcttgccagtgtgctaagctcgtgcgccagcgtggcggcagcaaacgaggctactcaggttcatgcttatgccataaagagggggtttcacaggtttctgcaggtggccaatgctgttatcacagcgtacggcaagaccggttttgctcgagaggcggggcaaatgtttgctatgatctgcgacccagatgtagttacgtggtcctgtatggtttcgtctttggcgtaccttggactatgcaaggatgcagttcatgtgtttgagagaatgctccaacaaggcgtacagcctgacagcgtcgccttccttggggttctttctgcctgcagccatgccgggctcgttgaagaaggcctgcactatttccttatgatggcgaggggctacaacatcgatccaaattcacagcaccttgcttgtctggttgatctcttggggagagctggtaggattcaagatgcttacaacattgttatcaagctttcttgcgagaacaatgctgatatcgttggagctttccttggtgcctgtaagctgcggggcaaaattgagttggcaaagtgggctgccgataggcttttatgcctggaaccaagtgaggcagtaaattatctgcttatgtctaacgcatttgctgctgcaggagcttggaacgagcttgcagaagtaagaagtgtgatgagacataggtgtggcagcaaggttcctggttgtagttggatagaggtaggtggaacagttcagacatttgtctccaacgatgtggtgctccatcagtcgattgaaatgcaacaaatggtgcaacttactatttcggaagcacaaaaagagtgcaacgaagacacaacttgtggtgatccaattttggttcaagaatgattagtttggcatctacaatcgtcccagagcttaccaatgtgatgtttctcatgtaagtggtgcctagactcataaaggaatacgttgaggaagtatctactcaactgaaaatggtctgtgattctgattcagacgagttgcctcttgaagagaaactcgcatttatgcatgagacaagacatgcctttggtagaacagccttgctgctaagtggaggtgcttcattatgatcctttaatgtgggtgttgttaaaacattggtagaacataaacttttgccaaggataatttcaggatcaagtgttagctaaataatgtgttctatagtagcaacaagatcatggcctgagctggagagctttttttgaagaatggcattccttgagatcagggcttctggaggcagctttgctgtcatctgccaaggcagcttaggcatgacaaatttctagccgaaaaccactgtgttctggatgaagaactatcggaaagagagaatttgcagccaagacttacaattgcaattggagtaaggaccggtgaaaagaaagtactccagcacatttttggtatttttaaaaacaaaaaggaggaattagacgacctagagtactaccaggaaagaagactcaaggatcttggtttagaaggaaggtagagtttattttttggtaaaaatataagattgtgcttgtattttatcctcatt

SEQ ID NO: 212086 - DNA, 904 bp, Zea Mays
caaattttggatctcttcgccgcaggaacggacacgaacacgatcgcggtggagtggacgatggccgagctgctccggcacccggccgtgatgtccaaggtccgcgcggagctgcgggacgcgctgggctccaagccgtgcccggacgagtcggacgtcggcaggctgccctatctccgcgccgtggtgatggagagcatgcgactccacccgccgagcccaatgctggtgccgcacctggccatggccgacggcgcggaggtgggcggcttcacggtgcccgccggcaccaaggtgatcataaacctatgggcgatcatgcgcgacccggcgtcgtgggcggagcccgaggcgttcgtgcctgagcggttcgtgggcgcgagcgacgcggacttccgtgggacggaccggcttgagttcatgccgttcggggccgggcggagggcgtgccccggcgcgcccatggccacgcgggtggtgacgctgctcctggcctccatgctgcacgcgttcgagtggaggctgcccgaggggatgaagccatgcgacgtggacgtcagggactggttcggcacgtcgctcaacatggtcacgccgctcaaggccgtacccgtgccttcgtcccggtgatgcactgcggcggcttgctgtgcatgtccaggatatggttctacttagcccagtctcggcgaagacttctatagcgctgcgttataactatccgacaggtttcatcacgatgaaattgtcgctttataatttccctgttaaatcattaaatttggtaatgtatcagtgttaaatgtaaataaaactaagacaaaatttcaccgaaactggccttactatgtcaggtcctgtttaaatgttctaaaacttatgatataattgagaataagttcct

SEQ ID NO: 212087 - DNA, 4362 bp, Zea Mays
cgggtcacatcaaacgtttgacttttaaataggagtatgaaatatagacccaaccaactgaactagattcgtctcgtcttttaattttcggctgacaaattagttttataatccgactacatttaatacccggaacggaggttcaaacattcgatgggacatggctaaattttagcgggttgtgcgatacggcccaagtgtggttcagcaacgccgaagaaaaatcagacaagaagcccctccggccctcgccctccctagtccctattcgccgcgcccgcgcccgcgccgtctcgaggtccgccggtctccttccgccgcaagctttgctccattccaccgccgcctcttccgcctccgtcggcaaaatgccggtctacagcatccgcggcgtcaacgtcgacttccccttcgacgcctacgactgccagatcacctacatggaccgcgtcatcgagtccctgcaacaggggaagaacgcgctgctggagagtcctacgggtacggggaagacactgtgcctgctgtgtgcgtcgctcgcgtggcgccgcactttcggcgagttcctgcgggtcgggcgtgggggcggtgggactaagcagttgccctacgggagtcagccgtccgctagccagcagtcagaggactctacgtctcagaagcagcagcagtcgcggtacccagtcatcatctacgcctcacggacccacagccagcttcggcaggttatcaaggagctcaaggctaccagctacaggccgaagatggcagtgctaggttcccgtgagcagatgtgcatccacgacgaagtgagcaaactccatggaagagcacagaacaatgcctgtcacttcctctgcaagaaacgacggtgccctcataataaccatgttgctgagttcataaaaaacaaacctgagcttgggaatgagccttttgatatagaagatttgataaatattgggaggcataagggcccgtgcccatattacatctcccgggaactttcaaagtcggttgatattttgtttgccccttacaactatcttattgatccgggaaaccgtcgttccctaaatggcataccatgggacaatgcagtacttatatttgacgaagcacacaacttggagagtatatgtgcagatgcagcctcttttgatttatttccgaataacctcacagcttgcatagcggaagctcatgaatgcatcaaactgtgttcagcaaagaggtccattgaaaattctgctgataaacaatttgatcctgaaaactatgcaatcctcaaagctcttttaatggcacttgagaaaaaaattgctgagctgttaattggatccgagttgggctacacaaaagctgggagttacatatacgattttctctctgaactgaacattacatcagacacatccaaaaaactgattgagacaattgattgtgcttctttgctactagaggaaggaaattctgctcaaactgggccaggggtccaggcaaaggctgcagtgtctagattggagtcaattagggacatgttagacataatttttaggggtggtggtcaaaaccatgcaaaatattatcgatttcatgtgaacgaatctcaacaaacacatggagatgcattgaaatttttgggtaagtcttcaaggacccttagttggtggtgtttcaacccggggctggcgatggaagaatttctcaagttgggtgtgcgctctatcatattaacctcaggcaccttgtctccgttggattcactagccatggaactaaaccttgaattcccagttagactagaaaatccgcatgtcatttcttcagaccaagtctgggttggagttgtgcctgtcggcccttcgggacatgctcttaattcttcttatcgtacgcgtaatactatacaatataaacaagagttgggcactgcaatagtaaatttcgcacgcattgtgccagacggactccttgttttcttcccttcatattctatgatggacatgtgtgttgacttctggaaaaataggaaccattcaaattcagcgtctgagaacacaatttggcagcggatctgtaagcacaagcagccagttatagagcctaggcagtcatcaaactttcagagtgcaattgaggattatagagccaaattacacgattcttcttctggggcaatattttttgcagtttgtcgtggcaaagttagtgagggtcttgattttgctgatcgtgctgggagggcagtaatagttactggaatgccctttgctactccaactgatgccaaggttcggctcaagcgcgagtatttggataagcaggggacaccatctaataaaaacacaaagatgttgacaggagaagaatggtatgtgcaacaagcagcacgggctgtcaatcaggctgttggacgtgttatcagacatcgccatgactatggagctattatttattgtgatgaaaggtttgtgtggccaaattatcaatctcagatgtcatattggctccgacctcatataaagtgctactcaaagtatggggaagtagtccaaggattgacccgattttttcgagataaagcttcttcagatcctttgacactagagccaacagattgtaatagaggccaacaacagggactgtttcttgagcctatttttaagccagctttcggccggagcgagggtcatgtgatcttgagcgatttcaagtttatgcagcaacttctttgccagacaaagctgagagacaatatgccctacctgcttatcactccagattgtatagcaccaccagcaaacaaacacatgcttaaagagaagctatcagatttggctgccagtgcacaagatgagtgcccacaaatcacattatcaggaaattcaaccatgagaagaagtaacttcatgaagttggctcagatcactcctgctaatcgttcaacccttactacaaaacacaactttgtgtctacatctacgaagcacaacctcccagaagaccagctgtcacaggataccaatgttgatattactgttgacttggcaatacaagggcatttgaaggaacataccttcaagtctttagggcttaagaaagctaaaacaatggacagatccaaagatgctgttgttttagatgacgtctcttcaaaattgcctcaaaatatagggtcaagagctttggccagataccaatgtggtggacctacacctgaatcaaagaaaagcactatagcaacagcatgcggaaagaatgatggggcctgtgaaaaaactgaaggccaggaatctaactcagggccagccttcttgaagctggttcaagaaaagcttagtcctgcagagtacacagagtttgttgaatacatgaaggccttaaaattgaaaactatgcataccaaggactcacttgaagcaataactaagcttttttcgtccccaggaagacttccacttcttgaagggttcagggtttttgttgcaaagaaccatcttccattatatgagcagcttgttcgaagacacaataatgtttctagtacatgacaaccacttctgctatgttcgcaggcatattcagtttttttgtttgtgccatgtatttcattaagtgataagtacagttttggttgttttcaacacttaactgtttatcaacggaacattagcagattcttgggtgcatgcaattacttttggaatgtgttatggtgcttctgtaatctaaggaaaagaaatggacctgaaaaaaaaaactctatttaagcttgctaatcatataagtagagtacctattgatcatttcaaatacattgaacatttctttatttggaaacaaaatccggactactataccatttatagttacactgttaatctctagctgccattgggcctgaccagtgctcgacactgtttagcaatccttcatgtttatgccagcatgaacttcaacttttcccctgtttttcctgaaaaataaaggtctatcaaatccctttggcaaaaaggcatcctgttttttctaagtttttgataaccgtagggtttctttggattttttttcatatgataaaatcatgaaacttaatagtggctgggtttagcttactgaatatagatgataaaatttccagaagcagtgctgtatttgcttagatgttactaatttgtggctgtattaccttctctttataaattagaattatgccttaggtaatagaagtacaccattttatgtcactcaagaaacaacagaagtacaccgtttggcgcgtcactcaagaaaggacactccgtgttagattatttaaatgatgaacaggtatgccggacaattgttaggagagttaac

SEQ ID NO: 212088 - DNA, 3104 bp, Zea Mays
cgggtcacatcaaacgtttgacttttaaataggagtatgaaatatagacccaaccaactgaactagattcgtctcgtcttttaattttcggctgacaaattagttttataatccgactacatttaatacccggaacggaggttcaaacattcgatgggacatggctaaattttagcgggttgtgcgatacggcccaagtgtggttcagcaacgccgaagaaaaatcagacaagaagcccctccggccctcgccctccctagtccctattcgccgcgcccgcgcccgcgccgtctcgaggtccgccggtctccttccgccgcaagctttgctccattccaccgccgcctcttccgcctccgtcggcaaaatgccggtctacagcatccgcggcgtcaacgtcgacttccccttcgacgcctacgactgccagatcacctacatggaccgcgtcatcgagtccctgcaacaggggaagaacgcgctgctggagagtcctacgggtacggggaagacactgtgcctgctgtgtgcgtcgctcgcgtggcgccgcactttcggcgagttcctgcgggtcgggcgtgggggcggtgggactaagcagttgccctacgggagtcagccgtccgctagccagcagtcagaggactctacgtctcagaagcagcagcagtcgcggtacccagtcatcatctacgcctcacggacccacagccagcttcggcaggttatcaaggagctcaaggctaccagctacaggccgaagatggcagtgctaggttcccgtgagcagatgtgcatccacgacgaagtgagcaaactccatggaagagcacagaacaatgcctgtcacttcctctgcaagaaacgacggtgccctcataataaccatgttgctgagttcataaaaaacaaacctgagcttgggaatgagccttttgatatagaagatttgataaatattgggaggcataagggcccgtgcccatattacatctcccgggaactttcaaagtcggttgatattttgtttgccccttacaactatcttattgatccgggaaaccgtcgttccctaaatggcataccatgggacaatgcagtacttatatttgacgaagcacacaacttggagagtatatgtgcagatgcagcctcttttgatttatttccgaataacctcacagcttgcatagcggaagctcatgaatgcatcaaactgtgttcagcaaagaggtccattgaaaattctgctgataaacaatttgatcctgaaaactatgcaatcctcaaagctcttttaatggcacttgagaaaaaaattgctgagctgttaattggatccgagttgggctacacaaaagctgggagttacatatacgattttctctctgaactgaacattacatcagacacatccaaaaaactgattgagacaattgattgtgcttctttgctactagaggaaggaaattctgctcaaactgggccaggggtccaggcaaaggctgcagtgtctagattggagtcaattagggacatgttagacataatttttaggggtggtggtcaaaaccatgcaaaatattatcgatttcatgtgaacgaatctcaacaaacacatggagatgcattgaaatttttgggtaagtcttcaaggacccttagttggtggtgtttcaacccggggctggcgatggaagaatttctcaagttgggtgtgcgctctatcatattaacctcaggcaccttgtctccgttggattcactagccatggaactaaacctaaccattcaaattcagcgtctgagaacacaatttggcagcggatctgtaagcacaagcagccagttatagagcctaggcagtcatcaaactttcagagtgcaattgaggattatagagccaaattacacgattcttcttctggggcaatattttttgcagtttgtcgtggcaaagttagtgagggtcttgattttgctgatcgtgctgggagggcagtaatagttactggaatgccctttgctactccaactgatgccaaggttcggctcaagcgcgagtatttggataagcaggggacaccatctaataaaaacacaaagatgttgacaggagaagaatggtatgtgcaacaagcagcacgggctgtcaatcaggctgttggacgtgttatcagacatcgccatgactatggagctattatttattgtgatgaaaggtttgtgtggccaaattatcaatctcagatgtcatattggctccgacctcatataaagtgctactcaaagtatggggaagtagtccaaggattgacccgattttttcgagataaagcttcttcagatcctttgacactagagccaacagattgtaatagaggccaacaacagggactgtttcttgagcctatttttaagccagctttcggccggagcgagggtcatgtgatcttgagcgatttcaagtttatgcagcaacttctttgccagacaaagctgagagacaatatgccctacctgcttatcactccagattgtatagcaccaccagcaaacaaacacatgcttaaagagaagctatcagatttggctgccagtgcacaagatgagtgcccacaaatcacattatcaggaaattcaaccatgagaagaagtaacttcatgaagttggctcagatcactcctgctaatcgttcaacccttactacaaaacacaactttgtgtctacatctacgaagcacaacctcccagaagaccagctgtcacaggataccaatgttgatattactgttgacttggcaatacaagggcatttgaaggaacataccttcaagtctttagggcttaagaaagctaaaacaatggacagatccaaagatgctgttgttttagatgacgtctcttcaaaattgcctcaaaatatagggtcaagagctttggccagataccaatgtggtggacctacacctgaatcaaagaaaagcactatagcaacagcatgcggaaagaatgatggggcctgtgaaaaaactgaaggccaggaatctaactcagggccagccttcttgaagctggttcaagaaaagcttagtcctgcag

SEQ ID NO: 212089 - DNA, 2194 bp, Zea Mays
tggcgcccggcatggggcactccatgaatgaataaccggagtgtcgcttccggtggaactgccatggacgcccgcggagctgacgactctgttcgatctgttcaagggatgatgcttgtggaagagcttatgtactaaaattcaatccaccgtaagctatcaaaccaaaaaatgaaaatgctcgtttgcacgcttgcaaataagagccccttgcaccacagtcgacgatcaggaccgaacacggagaaaagccacactctgcgactgctcacgccaccacctttgtttgtttgaggaaattctaagcaccacctggccaggctgaaactctagcgcgactggctttttccacggcccggcccgtcaaatccatgtactgtactcgttgtcgcggagaacgcgcccctgccacctccgcgcgggcacggcacgtcgtagtaaaaccctagaaaaacagtagcccaccgcgccggcgagccgaagcgagcgcggagctaaggatgccgcggaccaccgtggtagagagctccggctgcccgccgctccgcgccctcaccaccgacatcctcggcctcgtcaaagtcgtcgaggcccacgcgaggccggcgggcgccgccaaggtcgtcgagacgtggggcgcgcctgacgcttcccgtgccatcgttgctgcctccctcgccgatcgtgccgccgaccccgtcttggctgtggcgaggaggaacggcgtggttgagctgctgaatcccttgaatggaagtgctctggctgctgtcaagaccgcggggtcagcgccaaatgacagtggcgctgaaggtgatcccctcgccgcactgcatcttttcgcaagacagacttcggactcgatcttaggcacatttcttgcctgcacggagaaggggaaagcttctatcaggtccatcacgaaagaaaatgcagattcgggttcggatgttgggccatcagccacatgggatgtgtgcaatggggccaatgtgcaattttgctcagtagatcatggcgaaagctatgtgatatttggagggcatagaagtgaacttgtgggatatcacatctagtagtaagacatggtctgctaaatctccccgagcaaatagtcttggcatattcactcgaccttggttcactgctggaaccttcttgtgcaagaatgatcatcgtaaaattgttgcctgcacaaataatcatcaggtccgcttatatgatactgcattgcaaagaagacctgccgtctctgttgattttagggagtcaccaatcaaggcagttgctgctgatccaaatgggcatgatgtctatattggcacaggaacaggggaccttgcttctttcgacatgagaacagggaaattgctgggatgctatattggcaaatgcagtggaagtattagatctattgttaggcatccagagctacctttgatagcatcttgcggactggatagctacttacgtatctgggacacaaacacaagacagttgctatctgctgtctttctgaagcagcaccttacaacggtggtccttgattcacatttttctgttgaagagcctggagagatgaaattcaagcaattggagtctttagtggaggcggaggctgaagtccgaaaagaaaagaagaaaaagaagagcagaccaactgaagaggacgaagaacaagttggagtggtcgaccatagtgataataatggtgaaatgtatgctagaaaagaaaaaaagaaaaaaaagaaaaagaagagtagaactattgaacgggacgaggagccagacaacgatggtgaaatgtgcagtcccaagagaagaaaatctgtagaaagaagcaaatgcctgaagaagagcaagaaacagcaggtcgcatagaacatagaacaagtaccatttatctcagtatttgcattcgcttgattttgcagaattacacaattttgtgctgtagttgttttgaacagtatattccttttgaaactatgcaagggaatttcgccgtccattctacgagatacttttttttatggctgcaactgcatatgcgtcactaggggcgtgttttatttgtggatatttctggtgaaagtatctggtccactagttgggttttgttgcgttttgctgattaataggagcactatattattgtgactaaattaaaatgtattttgcagaggtaaattaa

SEQ ID NO: 212090 - DNA, 3830 bp, Zea Mays
ccgtccccaatctgcgctgccccctttttctccaattcaattcctcttcgtcgcctcgcgcatgggcattcctcgtgcgccgcggcagcgcagttaacgccagcgcgcgtggcttcacccggtcttgccacgacccgttgcaatcctgattcccttcctctccagaattcctcctcccatgtgcgtggatctcggggcccgtgcgggctagggtttatggctttggtcaatccatggcgtgcggtggcgaggtcgcgctgtcgcttcttctttaatgcgcgctgatccccatggacgccgagtccccacgggacgcttatggtttcgcggtgcggccacagcatctgcagcgtttccgcgagtacgccaagatttacaaggaagaggaggaggagagggcgcacagatggagagacttcttggacaggttggctgatgcagcgaatgtgcccactacacccagcgtttcaccatatgcatctaccggggatcctgcgtcaggtgcaggacaggcacaagagaatagcggcatcggaatacattgtgatgatgaagaggagggatctgagaatgcagaacataacaacaacttggaaagcccaaaggaatccgatgccagtgctgaatcacgagaagcaaatggtaaatcagaagatctgaaagatgtaactaacttggacaaactgcaagagaagactggtagcagcagctctacagaagcaatcaaagccttagagggcttgatggaaacaaatggggactttgaagaactaaaagatttgaatggaagctcagaagaattggaagaagagaataatggcaacatggaaaagctggtagagctcttcttggataaggggttgttggatgaactgaagcccataaaagttgagtcccagcggcgggtacgtgcagcacttagcatcattgacaaaatgatgagctctcgggtagtgaagggtggtaatggtgcaaatggtattcatggaaacgatggagcacagcttacttctattgaagaggaaggaaggactgcagaagcgagtgatgacggagatccagctgaggttgagtcttgtgttgcagagaaggtggaacttggacaggagacaactcatgattctacaggtactgctttggatggaggcaatgatgggtcctattttccttggagggaggagcttgagagcttggttcgtggaggtgtaccaatggctcttagaggagagatatggcaagcatttgtgggtgttggtgctcgaaggattcctgggtactacaacaaattgcttgatgacaggactgagacattggatgaaaaggatcttgtggacccagtggtcaacgaacagggaagtgcacccagaaaagttacccagcctgagaaatggaaaggacagatagagaaggatttgccacgaacatttccaggacaccctgcattagatgaggatgggaggaatgctttgaggcggttgttaaccgcatatgcaaggcataatccatcagttgggtactgccaggccatgaacttttttgctgggctatttttgttattcatgcctgaagaaaatgcattttgggccttagtaggggttattgatgattattttgatggatactacactgaagaaatgattgaatctcaggttgaccaactcgtccttgaggaggttgtacgagaaaggttccctaaattggccaaacatatggaattcttgggagttcaagtgggatggataactggaccatggtttctttcaattttcatcaatatgcttccatgggaaagtggtcaggttttatacagtgtcttggttctttcattatgatatgtgttattccaatatttttgttggtagttcactgctgtaatattggttaatccccttctggttcactaacatttaaatctcactatcagcatatggaaaattttcttatgtctttgtaggttatattctgttaccatatgtgtgctatcgatatctaagtaagactttacctctcttatagtacttcgcatttgggatgtcatcctttttgaaggaaatcgcataatgttgttcaggacgacacttgctttgctggatttatatgggcctgcactagtgaccacaaaagatgccggagatgcaattacactactgcagtctcttgctggatctacatttgacagcagccagcttgtattgacagcttgtatgggttttcaatcagttagagaaatgggattgcaagagttaaggaaaaagtacaggcctgaaattttaactgcaatggaggaaagatcgaaagaccgtggctcctggaaagataagaaggggttagcaaccaaactttatagctttaaacatgatccttcatatgtgtgctcaccagttaagtccaaggaagggctagatggttcaaaggtgaatggagagactgggccagcaaatcttgagacctaccttagtactagttctatactggataatgatttggatcagggtgttgatcttcaagatcaggtgtcatggctaaaggttgaactatgcaagctgctcgaggagaaaagatcagctgatctcaggagtgaggaattggaaactgctttgatggagatggtcgagcatgacaacagacgtatgttgagtgcaaaggttgagaagcttgaaacagaggcatatgaactgcgcaaagctttttcagacaagcaagagcaagagcaagtaatgcttcagatcttgttaagaatggagcaagaacagaaagtggcagaagatgcccgcatagccgctgagcgagatgctgctgaacaaaaacacgctgctcacttgctccaggagaagtatgaagcagcaatgacagcactttcacaaatggagaagagagctgtaatggcagaaacaatgctggaagctacaaagcaataccaggttgggcaggttaaagccaaccaatctttcacttcaagttcacctcgtgcagaccatgttcctgcgaagataaatcaagaaccaaaccaaactgcacctatcaggagaatcggcctgctttctaggggacttggatggcttgacaagggcaagggaaggcagaattccaatgaaacatctggagcctaaactcatctaaagtccaggatgaagtcatagctcccaacaagatctggattgttcattaacgcttggattgcttgatcaccgtaagagtgttgaaatcagcatcgatacatgttttctcgggaagattcagctggtatattccatgaagttttgcaggaagtgtatcttgtatcatattgagttcaattgtcagataaagttttgttggtaggtcagaaaggcttctgcaagtcatcggtgtaaattttcttttattagttccattaagattgtcaatagttagtgttccaaataggagaaagaaaagaacgacttactacacacaagaaaaatttctgttagattagttacagtatcatggagttgttctggagaagagcatgttttttttatctcttcagaaatgtcaaaaccaccgaagagattctctctctgtatttttgtctgatacgtgtggctcatacattcttcagtcacagttgacatgtttgatgtaaggcaattattgtcacgaggattctgattacgaatacaacagcagaaactccactatagggaggcgttttggaaagttaattgttgtcagttcctcacaatgttattcaaaaataattttggtaaaagcatgctgtgttcctagttccccctcttgacctgtgcaggctcatgctgcacgcccgtaaacaccttccacctgattggatgcctgagcacgccaag

SEQ ID NO: 212091 - DNA, 1700 bp, Zea Mays
atggggagtgaggaattggaaactgctttgatggagatggtcgagcatgacaacagacgtatgttgagtgcaaaggttgagaagcttgaaacagaggcatatgaactgcgcaaagctttttcagacaagcaagagcaagagcaagtaatgcttcagatcttgttaagaatggagcaagaacagaaagtggcagaagatgcccgcatagccgctgagcgagatgctgctgaacaaaaacacgctgctcacttgctccaggagaagtatgaagcagcaatgacagcactttcacaaatggagaagagagctgtaatggcagaaacaatgctggaagctacaaagcaataccaggttgggcaggttaaagccaaccaatctttcacttcaaggttaacttccactttccaagcatctagatcacttagactatctccagcagactttctatcccactccttatcaaactcctctctgcaaacagtgcatctataatacaaaacagtgttatacacgcccgcgtgcagggcgttgctggagttggtcttattggaagtctattacttcacattcgcatgtctacttcatgtgtcccgctagctattgcttgccttggtttcttttccccttcaattatactccctccatattttcttatttgacgttttgtagttcatttttgtactgtttggcgtcaaatataaaaagatggaggcagtattaatttttcatgtgtccaacaaacatttgattgatatttttactgttaatttaagaagcttgaactctaaattcatactacaatacttcatttacttggaatcttctgtagttcacctcgtgcagaccatgttcctgcgaagataaatcaagaaccaaaccaaactgcacctatcaggagaatcggcctgctttctaggggacttggatggcttgacaagggcaagggaaggcagaattccaatgaaacatctggagcctaaactcatctaaagtccaggatgaagtcatagctcccaacaagatctggattgttcattaacgcttggattgcttgatcaccgtaagagtgttgaaatcagcatcgatacatgttttctcgggaagattcagctggtatattccatgaagttttgcaggaagtgtatcttgtatcatattgagttcaattgtcagataaagttttgttggtaggtcagaaaggcttctgcaagtcatcggtgtaaattttcttttattagttccattaagattgtcaatagttagtgttccaaataggagaaagaaaagaacgacttactacacacaagaaaaatttctgttagattagttacagtatcatggagttgttctggagaagagcatgttttttttatctcttcagaaatgtcaaaaccaccgaagagattctctctctgtatttttgtctgatacgtgtggctcatacattcttcagtcacagttgacatgtttgatgtaaggcaattattgtcacgaggattctgattacgaatacaacagcagaaactccactatagggaggcgttttggaaagttaattgttgtcagttcctcacaatgttattcaaaaataattttggtaaaagcatgctgtgttcctagttccccctcttgacctgtgcaggctcatgctgcacgcccgtaaacaccttccacctgattggatgcctgagcacgccaag

SEQ ID NO: 212092 - DNA, 1246 bp, Zea Mays
atggggagtgaggaattggaaactgctttgatggagatggtcgagcatgacaacagacgtatgttgagtgcaaaggttgagaagcttgaaacagaggcatatgaactgcgcaaagctttttcagacaagcaagagcaagagcaagtaatgcttcagatcttgttaagaatggagcaagaacagaaagtggcagaagatgcccgcatagccgctgagcgagatgctgctgaacaaaaacacgctgctcacttgctccaggagaagtatgaagcagcaatgacagcactttcacaaatggagaagagagctgtaatggcagaaacaatgctggaagctacaaagcaataccaggttgggcaggttaaagccaaccaatctttcacttcaagaccatgttcctgcgaagataaatcaagaaccaaaccaaactgcacctatcaggagaatcggcctgctttctaggggacttggatggcttgacaagggcaagggaaggcagaattccaatgaaacatctggagcctaaactcatctaaagtccaggatgaagtcatagctcccaacaagatctggattgttcattaacgcttggattgcttgatcaccgtaagagtgttgaaatcagcatcgatacatgttttctcgggaagattcagctggtatattccatgaagttttgcaggaagtgtatcttgtatcatattgagttcaattgtcagataaagttttgttggtaggtcagaaaggcttctgcaagtcatcggtgtaaattttcttttattagttccattaagattgtcaatagttagtgttccaaataggagaaagaaaagaacgacttactacacacaagaaaaatttctgttagattagttacagtatcatggagttgttctggagaagagcatgttttttttatctcttcagaaatgtcaaaaccaccgaagagattctctctctgtatttttgtctgatacgtgtggctcatacattcttcagtcacagttgacatgtttgatgtaaggcaattattgtcacgaggattctgattacgaatacaacagcagaaactccactatagggaggcgttttggaaagttaattgttgtcagttcctcacaatgttattcaaaaataattttggtaaaagcatgctgtgttcctagttccccctcttgacctgtgcaggctcatgctgcacgcccgtaaacaccttccacctgattggatgcctgagcacgccaag

SEQ ID NO: 212093 - DNA, 968 bp, Zea Mays
gtaaataattgcaacgatctggagagtttctgaaaaaacccggcatggttcttttagcagatgtttggtcagatttggtgaatcccccctcccctctcacgctccaccactgatcatggggctactcagcattatccgcaagatcaagcgcaaggagaaggagatgcgcatcctcatggttggcctggacaactcggggaagacaaccatcgttctcaagatcaatggggaggacaccagcatcattagcccaacccttggattcaacatcaagaccatcaagtaccacaaatactctttgaacatatgggatgttggaggacagaagacaatcaggtcttactggagaaactactttgagcagactgatggattagtttgggttgttgatagttcagacataaggaggcttgatgattgccgtgctgaactccacaatctcttgaaagaagagagactagttggagcttcattgttggtttttgcaaataagcaagacatacagggagctctaaaaccagatgaaattgcgaaggttctgaatctggaagtgatggacagaagcaggcactggaagattgtgggctgcagcgcttacacgggagaggggcttctcgagggcttcgactggctggtccaggacgtcgcttctcggatctacgtcctagactgatgctatttgccgcgtcagtcatcctagactgatgctatttgtcgcgttggtgctacttgagcatcattagagtttggtgcgtgcattaaagcctgtactaaggccctgtttgtttagggtttatggttttagggtttagggatttgtgttcactcttactcgcttcggatttgcggtggtatttgtttgcttgtgttacattgaggtaaatctaaacgatcatgagttcatttctctttatttacatgtcagattaagtttttcccaacgtgagtagttatatacttatatttac

SEQ ID NO: 212094 - DNA, 1171 bp, Zea Mays
ccgaacagaacgcctaagtcgtatcctcacacgatcccgtcaagactgtaggggtgaaaatcctttccttccgccctattctcgtaggatctcgtcgccctcttgaacagaatctcgtcacgactagcccctacccgatgccatgtaagggcttgttcggttaggggtggattgaggaggattggaggggattaaattcccttctatacaaatttaaatagaagatgatttaatccccttcaatccctctcaaaccccttcaaaccgaacaagccctaaggtgaacctatcctacctggtgccatacaatgtggacgtgacgagcccttgcctgatgctagcaatcaaattggtgatcgaacaacgatgtcagaacaggagccatcagaacaatcagtccctgccgccaaagtctcagatcagcccaacgtcaatgatatgttccctccgccttttttttgtcacacgacatcatctccatagaggaagtagatattcgcgggcttctgaatcctggttctaagcctgatcaacaaagagacgacgtcgagcaagagagggatgctacgtgatgatgtggatgcatcacaaaaagatggacacataattgcaaaagaaaatttattattggagaagtccactggtgcccatgaatgatgtcatgagaaggaagatgtcaagcgcctataacaactttgaagataattttaaaatggccaagacctcggaagacggcatgaacctattaataaaaaattggaatctctgtcattgttgtttcagcctacatctcgcgccaaataggaggagcaagagagttctattgggatgtccattctggagaatgtacatgtccatccacctagtgatattcgttcaaaggggaagtgcaagaaaataatatggcatctgacaaaaacaaaaagaagcatagtccatgtacaagcaaatgcacaatatgcaaacatcttggacaggatcgacaaaattgttcgaagaaaggatcagcaacaccataagtttttagtagcatcggtttaaactttttgtcttatatacaaatctgtcatatattttctatggatttttagataaagcggttgtttttgtataatatggttacataagtttagcagcaccatatgtttgttcaacatacgctaatggtcag

SEQ ID NO: 212095 - DNA, 670 bp, Zea Mays
aaagggatcctttcccacttccggagaaagagcggaaacctctcaccgaagttgaacagtttgtgttgcatgttgatgagagggcagtgcagagatcagaatttgatacattgataaaagagaaagaaaagacttacaaaaggttgagagaggagaacgaattcgcgcacaagatcgaggaagagaaggcattgaagcagctgaggagaaccatggtgccacatgctcggccgctccccaagtttgacaggccattccgaccacagaaatcgacgaagcaggtgacaaggccgaagtcgccacagcttcaggtggatgagcgaggggcgaggaggcacgctttgatcagatgatcaccgccgttgtttatctatcttgtactacactgattgtcatgcgcggtcaagatcatatctcaatcttgccgtcgatctgttgttggttactagattctttcttctgctgaccagtgaccatatgtagagcaggccaggccctaataacagcaatctttgtcagcacaacgcagctgacacggtgtatgcccttgccctgtgtgtgtttgtgtgccagtgtgtgtgtgtatgtttgtgtaagtgtaatatgattacctcgatggtgagacttcttaatccgatgatggcttgatatagagcttgtgttgacccgt

SEQ ID NO: 212096 - DNA, 2740 bp, Zea Mays
cccgaccgttggagaccccaacccctaaatgcagtaatgctcacccgcaacgttcttctcccaatcggttccacctgatgcatcccccgccgacttccttcttcttcatcatcgtctcttcatcgcttcaggaggccgccgcataattagagataggacttagagatataataacccccagctcctgatccccaagccctaggcgtaggattccacgtccatcgatggcgctggacacggggacggcggcgggtatcgacgaggcgtacgagttctccgcgcccaggttcttcgacttcgtcgtcgaggaaacggaggaggccgtacgtgccgccgagagctggttcgaggctgcccgcagccacgccccctcgccgttcaacccaaggatcaaggaatcgagggcggaggtcaagctcgcggtcctctgtgatttcgcgcaagccgaggagccggctccagaggtaaataaacagaaggagccagctgacgaaatgtcggggccgcctgcggctcaagaagagagagatgaatcgcccccgtctctggagttcctctcggcgacggacctttctgtaaaatcagcagatggtggttctaccagcacgcttaagatgcagacgcgttatcctgcccctcctaccaatgttgcccctgcgagttcgacatgtgacagctcttcagtgaatactgatgcgcgcacgccgaagatgcaggtaaacatgtgcagagcaggtcctacggctgcttcgacgaatgtcaagaggagcgtgatgatcaagggtggccgtgatttggtggggactggaaaggcagccactgctggcgctgaaattgctcaagagaaccaagcggtgaagaggcagaagctcgatgatgggagagccagacagatactcaatgtcaagactaaggtgctgcctcataaggcgagagctgatttagctggaagcgaaatgaggaggtcccatgaggatatgcgctctgcgaaggaagcagatccatatgtatcagctgcagaattggttaagaagtttgaatcagggaccagagagcttagcatcactcacagtagatgtcgttctcatgaggatgctgcatcacagcgaagcctgcgaaggcctaagcttatgttaactagacctaaggaacctgacttccagacttcccagagagttcgaacagtaaaagtgaagagctctgcagagatagaggaggaaatgttggcaaagatacccaagttcagggcacggccattcaacaaaacgattgctgaagccccttcgttccctccacttccaaggagaaccccacagatacctgaattcaatgaattccatcttaaaacaatggagagagcaagtcgatatgcggacacctgttcagaagtttcttgtgcagatactatccagagtcaaaataagacactgaaatcgagacaagcaaagccaccacaacttcatacagcaatgagagctcggccaccaagtgtgaaaagttttcaggaacttgaactggaggagctggagaaggcccccaagttcaaggccaagccattaaacaaaaggattcttgagagcaagggagacattggtgtatttttccatccaaagtctcaggtcacagctcccaaaaaattccatttttctaccgatgttcgcttgggccctccatcagttgctgacttatttgacaagctctctcttcactctgaatgttcttcaaacagcaacagacaagatgtgcccagacgcaccataccaaaccctttcaatctacaaacagaggaaagaggtcatttaaaagagaggcagctagaagcacatctcttacaaaagaagatggaggaggaaaaggccagggttcacaaagctaatccttacccatacaccacggactacccgacgatgccaccgaaacctgagccgaagccctgtacaaggccagaaggctttcaactagagagttcggtgagacatgaactagagcagcgaaggctgatggaagaaaaacagagaatggagagtgaagaggctcagaggagaatcttcaaagctcaacctgtaatgaaagaggatcctttcccacttccggagaaagagcggaaacctctcaccgaagttgaacagtttgtgttgcatgttgatgagagggcagtgcagagatcagaatttgatacattgataaaagagaaagaaaagacttacaaaaggttgagagaggagaacgaattcgcgcacaagatcgaggaagagaaggcattgaagcagctgaggagaaccatggtgccacatgctcggccgctccccaagtttgacaggccattccgaccacagaaatcgacgaagcaggtgacaaggccgaagtcgccacagcttcaggtggatgagcgaggggcgaggaggcacgctttgatcagatgatcaccgccgttgtttatctatcttgtactacactgattgtcatgcgcggtcaagatcatatctcaatcttgccgtcgatctgttgttggttactagattctttcttctgctgaccagtgaccatatgtagagcaggccaggccctaataacagcaatctttgtcagcacaacgcagctgacacggtgtatgcccttgccctgtgtgtgtttgtgtgccagtgtgtgtgtgtatgtttgtgtaagtgtaatatgattacctcgatggtgagacttcttaatccgatgatggcttgatatagagcttgtgttgacccgt

SEQ ID NO: 212097 - DNA, 2676 bp, Zea Mays
gcctgggcgcgcagtgttcaaacctcccgaccgttggagaccccaacccctaaatgcagtaatgctcacccgcaacgttcttctcccaatcggttccacctgatgcatcccccgccgacttccttcttcttcatcatcgtctcttcatcgcttcaggaggccgccgcataattagagataggacttagagatataataacccccagctcctgatccccaagccctaggcgtaggattccacgtccatcgatggcgctggacacggggacggcggcgggtatcgacgaggcgtacgagttctccgcgcccagcgttcaacccaaggatcaaggaatcgagggcggaggtcaagctcgcggtcctctgtgatttcgcgcaagccgaggagccggctccagaggtaaataaacagaaggagccagctgacgaaatgtcggggccgcctgcggctcaagaagagagagatgaatcgcccccgtctctggagttcctctcggcgacggacctttctgtaaaatcagcagatggtggttctaccagcacgcttaagatgcagacgcgttatcctgcccctcctaccaatgttgcccctgcgagttcgacatgtgacagctcttcagtgaatactgatgcgcgcacgccgaagatgcaggtaaacatgtgcagagcaggtcctacggctgcttcgacgaatgtcaagaggagcgtgatgatcaagggtggccgtgatttggtggggactggaaaggcagccactgctggcgctgaaattgctcaagagaaccaagcggtgaagaggcagaagctcgatgatgggagagccagacagatactcaatgtcaagactaaggtgctgcctcataaggcgagagctgatttagctggaagcgaaatgaggaggtcccatgaggatatgcgctctgcgaaggaagcagatccatatgtatcagctgcagaattggttaagaagtttgaatcagggaccagagagcttagcatcactcacagtagatgtcgttctcatgaggatgctgcatcacagcgaagcctgcgaaggcctaagcttatgttaactagacctaaggaacctgacttccagacttcccagagagttcgaacagtaaaagtgaagagctctgcagagatagaggaggaaatgttggcaaagatacccaagttcagggcacggccattcaacaaaacgattgctgaagccccttcgttccctccacttccaaggagaaccccacagatacctgaattcaatgaattccatcttaaaacaatggagagagcaagtcgatatgcggacacctgttcagaagtttcttgtgcagatactatccagagtcaaaataagacactgaaatcgagacaagcaaagccaccacaacttcatacagcaatgagagctcggccaccaagtgtgaaaagttttcaggaacttgaactggaggagctggagaaggcccccaagttcaaggccaagccattaaacaaaaggattcttgagagcaagggagacattggtgtatttttccatccaaagtctcaggtcacagctcccaaaaaattccatttttctaccgatgttcgcttgggccctccatcagttgctgacttatttgacaagctctctcttcactctgaatgttcttcaaacagcaacagacaagatgtgcccagacgcaccataccaaaccctttcaatctacaaacagaggaaagaggtcatttaaaagagaggcagctagaagcacatctcttacaaaagaagatggaggaggaaaaggccagggttcacaaagctaatccttacccatacaccacggactacccgacgatgccaccgaaacctgagccgaagccctgtacaaggccagaaggctttcaactagagagttcggtgagacatgaactagagcagcgaaggctgatggaagaaaaacagagaatggagagtgaagaggctcagaggagaatcttcaaagctcaacctgtaatgaaagaggatcctttcccacttccggagaaagagcggaaacctctcaccgaagttgaacagtttgtgttgcatgttgatgagagggcagtgcagagatcagaatttgatacattgataaaagagaaagaaaagacttacaaaaggttgagagaggagaacgaattcgcgcacaagatcgaggaagagaaggcattgaagcagctgaggagaaccatggtgccacatgctcggccgctccccaagtttgacaggccattccgaccacagaaatcgacgaagcaggtgacaaggccgaagtcgccacagcttcaggtggatgagcgaggggcgaggaggcacgctttgatcagatgatcaccgccgttgtttatctatcttgtactacactgattgtcatgcgcggtcaagatcatatctcaatcttgccgtcgatctgttgttggttactagattctttcttctgctgaccagtgaccatatgtagagcaggccaggccctaataacagcaatctttgtcagcacaacgcagctgacacggtgtatgcccttgccctgtgtgtgtttgtgtgccagtgtgtgtgtgtatgtttgtgtaagtgtaatatgattacctcgatggtgagacttcttaatccgatgatggcttgatatagagcttgtgttgacccgt

SEQ ID NO: 212098 - DNA, 1173 bp, Zea Mays
agcggcgcttcagcctgtggtcggtgctttcgtccataaaaagtggggaggacggctcggggagcttgacgacactgcacacctctcaccagtccccacacggccacaccacacccagctgtccccatcgcgcgcacactctctcggtctctccctcccagtcccagcgtttgcggtccagtccagagagctcgagcagccatggcggctcccctgttcctcctcctcctgctgctggctatgttcacaggctcagcagacgcggcgttctgcgtgtgcaagacgggcgtgcccgaccaggcgatgcaggcggcgatcgactacgcctgcgccaagggggccgactgcgcctccgcctccaagggcgcgccctgctacggcaacggcaacaaggtggccgtctgctcctacatctgcaacagctactaccagagccgcagcgccacgggcgccacctgcgacttcaacggcgtcgccacgctcaccggcaccgaccccagctccggcacctgcaagttcgcctccggccccagcagcgcaggcaccggcggtggcatgggcgctggcgcgggtaccggcggtggcatgggcgcaggggtcgcgacccccgggagcgccctgagcccaccgttcggcggcactggcgcgtacggcccgtcaggggcaggcagcacggactacaacgacgccgtcgccccgcgcgccgccgggctgcacgtggtggctgccctcgctctcgccgtcgccgtcgccgcacctctccaccgctaggggcggtgccatggcaactgggagctggcgggcacgacactcgcagacgggatcccgcctcggcggcccgccagcgcgggctctggtcgatgtccggcgttagtgcgtgcgcgtacctgatgaagtgatgatgggttttgatcgaccagccgtcagcgtagtgcggtcacggggtttacagtgttattcgaactgacctctctgcttcctcgtgctagtagtggtggctgccatgtgtgtgtgctgctggtagagaactagggattctttttttttcttctgtcgcttccttgcttatatgtcccgtcgtgttaggctgtgtttactatgcagtgtttggtggtggccgctttccatgagaatatttggtgtgcgcgctcatgttgcactgcacgtttggcc

SEQ ID NO: 212099 - DNA, 3839 bp, Zea Mays
atggatcgcgccacgccgcgcgtttgcggccgccgcggcgtatcccaagcggcggtggaagctgcgccgtcctcctcccgcgcgcgccgccgcgataaggcgccggccgttgtcatggaccttggcgacgacgactgcggcggtggcggggccaggaagacggttggtggcgctgcaggtaggtgcgagggatccacgaaggctcctttgcctctgctgccgccgatgatggtgccggcgggagcggtggcgctgcggacacgatcgaggaggcgggcgatgctggcggcggcagtggtggaagaggcgccaacgaagaagaagaagaaggaaggagcgatcccagatgccgcggaggcgccccgtggccacgggagcaaggccgctgctacctcgatggcgacgtcgagccataagcggcgcgctgggacctcgaggtcgacgtcgagagataagcggcgcgcgcgctcgggacgtgcctcggagccagctcgcgtgggccgcgcgcgcaagcgcaaaaggaacgagttggaggcccccgctcggagagaacgtgtgaaggcgccatgtgtcagtgaaagtgatgacaacagcgggcgaggcgatgacgcttctcatgacggggatgcggagcctcgcgtcggggtcgccattggcactgatctggttaacggggatcatccggcagctaaagaggtagtggaaggtgctggtgacgaggacacaggggacggagggaacagtggcctggcatcgactgctgatgtgtttgctgaggagatggcaccctttgaagatgactacgatgatgagatgttggaggagcagcttgttggagatgtgattcgtgcttacagtaatggcagaaacttcgattcagatggagtggattgggaggcagaggatgagatggagttcaatgacgatgctgacaatagtgattttatggatgatgctgacgatagtgattttatggatgatgcttatgaaggtggcaattccaaaccaattcaaaatcatgctaagttggaaatacaagactgggtgaaccagaaagttgttttgagtggagggaggtgtgaggcgaggggcgagggggatctggaggaagaattggatgtgggaaaggaagcagatgaggaggacgtggaaccaaagagtgaagcggctccaggttctgataaaagggtcttgcagttagaaatcctaggttccgatgaggaaatcaaggtgcttgaaaatatgagtagtgccccatccaggaaggcgtcagttcaatcgaagttaccaactattccatcttgtgttgcatggagaacccgatcatcatggggggtaaatcaagatagactatcgtacgatacatattttgaggaattatctgatgagccaaaagaggatgatgatgatacagaggtggaacttgatgaagttgaggatgacaacaatgacgatgacagtagtgatgcttatgataaagatgacgaagagaaggaggaagaggaagaagaggctgaaagaagaaaacttaataacaggatttgcacatccgatgaagacatgatcaatattactgttcctacatcaagatatgatatgtttaagaaaaaaaattcctcaagatatgatattgagtgggtggaggatgaagatgcaagtgttgatatgttacagccagtttcctttaagaaagatagcagctggaagcctgtggctgttggcaacgacacatttactgagcaacaaaagcgatcacgatttacttgggagcttgagaggaggaaaaagcttaagcttgagatgaagacaaatcctttgcatgagcgggatttggactcagatccgaactcatcaggttctgaccagatcagaaagtatggtttcaaaagtgatgggagtcataaagttgataggaaaaagaagcatacatcgcccaaatcgggcaagaaacccagcagcgcaatcatactaaagcggcagtctcttttgaagcttttggtagataaaatgagtggtgataaaagtttagcatcttttccatttgatcagaatcctcagcttcagtttattttcaaagaaatgcatccattggtattttcatttggagatgaagatctagtagcagctgacaggccagagcaagatgttggattggatatgttatgggctgactttgactttgctttagagtctgagaatatcggtacttattatgatgatgagtgtcaagaaggcaatcaactagatttttctcttgccccagtaacaccctgttctcgtgggaagcatgaatttgttattgatgatcaaatagggatcagatgcaaatactgttccttggtaaacctggagatcaaattcatgtttccatcactggtgtcagtgtttgccgagaaatcagcatggccaaatgacaaaggcgtgaaaaatacactgatgtttcatgatctttatgaacaaggagtcaatgacactgaacaatctcaagatattcatcaatatggaacggtgtggaatcttattccaggggtcatcagtactatgtatgagcatcagcgtgaagcatttgaatttatgtggacaaatttagttggtgatattagacttgatgagataaagcatggagcaaaacctgatgttgttggtggatgtgttatctgtcatgctcctggaacaggaaagacacgattagctattgtgtttatccagacatacatgaaggtgtttccagactgtcggccagtgattattgcaccacgtggtatgctctttgcttgggatgaggaatttaagaaatggaatgttgatgttccttttcatatactaaacacaactgattacactggaaaagaggatcgggagatatgcaagttaataaagaaagaacataggacagaaaagttgacaagactagtcaaactgctttcatggaacaaaggtcatggtattcttggaataagttatggtctgtacacaaaactgacctctgaaaaacctggctgcacagaagaaaacaaagtgaaggtgacaaatatgataggcaagcagaaaaggatcacttatccaagttggtcttctctacagaagacgagttcaataatgttaggaacatgttatctaaagctgaaatggagcactgttctaagtttatctcagaagataaagttttggaggagatgacttcccacgatcaacttaaaggaatgtttttgaagatccattatccaccaactgagtcaaacattgtctatagttacaatcaaattgctactgagtgaagtcggtggtaatagtcagtaccagattgtttgtctatatctatggctaggcatgcgtgggaggaccctgcaggcttcattttctttattattgtctaccgcacaatgaatctgcaattttgtatcttgggaaggactaaaagcagaagttaataatgggtggcagagccacaatgtacatggtggttcacaaggttgtgggcattacgatgcccatacctatatccaaatgtcatgtctaataataaaactattggacctttttggcggttcaattttatttacataaaagacagcctcaattcgaatacataggctctgccccctttcagcattttgggtgttccactttcattgcgttattatccttgctatcaaccgtagttcatgaggtgcactgatacatatattctctactacagatatgttatttatagatcatatatgatctcatgataccaggaatactgaaaaatggcatcatgccttcttaccaacagtatcagaagagaaaatattctctttctttttatgtttgcattgtcaaactacccacctaag

SEQ ID NO: 212100 - DNA, 3534 bp, Zea Mays
atggatcgcgccacgccgcgcgtttgcggccgccgcggcgtatcccaagcggcggtggaagctgcgccgtcctcctcccgcgcgcgccgccgcgataaggcgccggccgttgtcatggaccttggcgacgacgactgcggcggtggcggggccaggaagacggttggtggcgctgcaggtaggtgcgagggatccacgaaggctcctttgcctctgctgccgccgatgatggtgccggcgggagcggtggcgctgcggacacgatcgaggaggcgggcgatgctggcggcggcagtggtggaagaggcgccaacgaagaagaagaagaaggaaggagcgatcccagatgccgcggaggcgccccgtggccacgggagcaaggccgctgctacctcgatggcgacgtcgagccataagcggcgcgctgggacctcgaggtcgacgtcgagagataagcggcgcgcgcgctcgggacgtgcctcggagccagctcgcgtgggccgcgcgcgcaagcgcaaaaggaacgagttggaggcccccgctcggagagaacgtgtgaaggcgccatgtgtcagtgaaagtgatgacaacagcgggcgaggcgatgacgcttctcatgacggggatgcggagcctcgcgtcggggtcgccattggcactgatctggttaacggggatcatccggcagctaaagaggtagtggaaggtgctggtgacgaggacacaggggacggagggaacagtggcctggcatcgactgctgatgtgtttgctgaggagatggcaccctttgaagatgactacgatgatgagatgttggaggagcagcttgttggagatgtgattcgtgcttacagtaatggcagaaacttcgattcagatggagtggattgggaggcagaggatgagatggagttcaatgacgatgctgacaatagtgattttatggatgatgctgacgatagtgattttatggatgatgcttatgaaggtggcaattccaaaccaattcaaaatcatgctaagttggaaatacaagactgggtgaaccagaaagttgttttgagtggagggaggtgtgaggcgaggggcgagggggatctggaggaagaattggatgtgggaaaggaagcagatgaggaggacgtggaaccaaagagtgaagcggctccaggttctgataaaagggtcttgcagttagaaatcctaggttccgatgaggaaatcaaggtgcttgaaaatatgagtagtgccccatccaggaaggcgtcagttcaatcgaagttaccaactattccatcttgtgttgcatggagaacccgatcatcatggggggtaaatcaagatagactatcgtacgatacatattttgaggaattatctgatgagccaaaagaggatgatgatgatacagaggtggaacttgatgaagttgaggatgacaacaatgacgatgacagtagtgatgcttatgataaagatgacgaagagaaggaggaagaggaagaagaggctgaaagaagaaaacttaataacaggatttgcacatccgatgaagacatgatcaatattactgttcctacatcaagatatgatatgtttaagaaaaaaaattcctcaagatatgatattgagtgggtggaggatgaagatgcaagtgttgatatgttacagccagtttcctttaagaaagatagcagctggaagcctgtggctgttggcaacgacacatttactgagcaacaaaagcgatcacgatttacttgggagcttgagaggaggaaaaagcttaagcttgagatgaagacaaatcctttgcatgagcgggatttggactcagatccgaactcatcaggttctgaccagatcagaaagtatggtttcaaaagtgatgggagtcataaagttgataggaaaaagaagcatacatcgcccaaatcgggcaagaaacccagcagcgcaatcatactaaagcggcagtctcttttgaagcttttggtagataaaatgagtggtgataaaagtttagcatcttttccatttgatcagaatcctcagcttcagtttattttcaaagaaatgcatccattggtattttcatttggagatgaagatctagtagcagctgacaggccagagcaagatgttggattggatatgttatgggctgactttgactttgctttagagtctgagaatatcggtacttattatgatgatgagtgtcaagaaggcaatcaactagatttttctcttgccccagtaacaccctgttctcgtgggaagcatgaatttgttattgatgatcaaatagggatcagatgcaaatactgttccttggtaaacctggagatcaaattcatgtttccatcactggtgtcagtgtttgccgagaaatcagcatggccaaatgacaaaggcgtgaaaaatacactgatgtttcatgatctttatgaacaaggagtcaatgacactgaacaatctcaagatattcatcaatatggaacggtgtggaatcttattccaggggtcatcagtactatgtatgagcatcagcgtgaagcatttgaatttatgtggacaaatttagttggtgatattagacttgatgagataaagcatggagcaaaacctgatgttgttggtggatgtgttatctgtcatgctcctggaacaggaaagacacgattagctattgtgtttatccagacatacatgaaggtgtttccagactgtcggccagtgattattgcaccacgtggtatgctctttgcttgggatgaggaatttaagaaatggaatgttgatgttccttttcatatactaaacacaactgattacactggaaaagaggatcgggagatatgcaagttaataaagaaagaacataggacagaaaagttgacaagactagtcaaactgctttcatggaacaaaggtcatggtattcttggaataagttatggtctgtacacaaaactgacctctgaaaaacctggctgcacagaagaaaacaaagctaggcatgcgtgggaggaccctgcaggcttcattttctttattattgtctaccgcacaatgaatctgcaattttgtatcttgggaaggactaaaagcagaagttaataatgggtggcagagccacaatgtacatggtggttcacaaggttgtgggcattacgatgcccatacctatatccaaatgtcatgtctaataataaaactattggacctttttggcggttcaattttatttacataaaagacagcctcaattcgaatacataggctctgccccctttcagcattttgggtgttccactttcattgcgttattatccttgctatcaaccgtagttcatgaggtgcactgatacatatattctctactacagatatgttatttatagatcatatatgatctcatgataccaggaatactgaaaaatggcatcatgccttcttaccaacagtatcagaagagaaaatattctctttctttttatgtttgcattgtcaaactacccacctaag

SEQ ID NO: 212101 - DNA, 1807 bp, Zea Mays
ccgaagtctcatcttttgactaggcgcgtcaccgattcggtatctgctgcttttctggatcttgacgagtcctggttcgtggctgcactgcgggtaccacttgacgacgtcgatcgtggccccggcgctgctgagcctgccgttcgcgttcgcgtcgctggggtgggcggcggggacgatctgcctcgtcatcgccgcggccgtcaccttctactcctacaacctcatctcgctcgtcctggagcaccacgcgcggcagggccgccggcagctccgcttcagggacatggccacggacatactaggtcctggatggggcaaatactatattgggccgatccagttcctggtgtgtttcggagcagtcgtcgggtgcactctcctggccggacagagcatgaaggcaatctacctgctagccaaccccggcggcacgatcaagctgtacgtgttcgtggccatcttcggcgtcttcatgatgatcctggcgcagctgccgtccttccactcgctccgccacgtcaacctcgtctccctgctgctctgcctcgcctacagcttctgcgccgtcgccggctccatatacctaggaaactccgataaggcgcccccaaaggactactccatctcaggtgacgcccagaaccgtgtgttcggcgtcttcaacgccatcgctatcatcgccaccacgtatggcaacggcatcatcccagagatacaggcaacagtggcggcgccggtgacggggaagatgttccgggggctgtgcctgtgctacgcggtggtggtcacgaccttcttcagcgtggccatctcggggtactgggcggtcggcaaccaggcgcagggcatcctgctgagcaacttcatggtggacggcgcggccgtgatccccaagggcctcctcctcgtcacccagctcttcacgctgctgcagctctcggcggtgggcgtggtgtacctgcagcccaccaacgaggtcctggagggcctcttctcggacgccaagcagggtcagtacgcggcgcggaacgtggtgccgcgcctcgtgtcgcgcacggtggccgtcgcgctggccaccaccgtcgcggccatgctgcccttcttcggggacatgaactcgctcatcggcgccttcggtttcctgccgctcgacttcgccgtgccagctctcttctacaacgtcaccttcaagccgtccaagaagggattcgtgttctggctcaacaagactatcgccgtcgtcttctcggggctcgccgtcatcgcgtccgtcgcggcggtgcggcagattgccttggacgccaaaacttacaagcttttcgccaacgtgtgaggagagcccaaactcaagcaactacaaacgccctagatgtttttgtggtgagcgttttgtggtggtgtacgatctacgatggtacgaacacgcgaaaaaaagtgttttcctgcttggctaagtaagctaagaactagtataataccccgacggcatacgaatcatatttctaaaaaaatctatatattaaagctgggcgctaagggtatgtttgtttccgcttatagattatataatctggattataatctaaattatataatatagattataatctagatatattataatctatatgtagttgtttggtagtttagattatataaatgtagattatttataaagacaacaatatccttgtttatttatttgaggtgagaaaagaaggatgtcatatattgtaatttatatttatataaccatgggtagtgggtcttttgccaaaataatctcaaataagctagacttgag

SEQ ID NO: 212102 - DNA, 3591 bp, Zea Mays
atggaacttgacccggtagccgaggccgagcacgaggagcacttgttggaaacccataacgaggaagaagatgctgctcaagccctgttcggttgtagctctgctgctctccgtcgggatgctgcagcggctccttccggcgatgttgggggaacgggctccggcagtgcgacccgtaccgaggcaagcacggataaccaggggcctccagttctccagtctgggaggactttgaacaggtgttcaactttgagaatggtaagaggtctttccgtcatgaaggtcattgagataaaagatgagatgaccacagcctccgacctgacccttgtctacgtggctatgctatacgaagttaggatatgttaaaaaaaacttaagtaagccaggtgtgttgctgctgctcgcgatatgcaaaggtcgttcgactgttttttaaaaaaaaaacatgccaactcgcttctcttccattcgtgtgctatcttgattgagcgtagtttgtatcagtgttctcagtgtgcgggcccgggaagagaagcgcgggaagtagatagaatcgacgcgggcccgccctgggccgcccgctctattccattgagcgcatcatcacataccgagccgaactgaacactgagctgcggtgcagaaggataaacgcgagcatggcatgatggtgcctttagaagccagaacgccgaacgcgcatgcgtggcgcgaagcttgcttgccggtgaatggtgatgggctgtgcgttgtgtatccaagtcacacgggcatacagtatatatcatcattgcgagctgcgacggcaaattggtttcgctccctttcacaacacgaaaatgtccgatcgtatacgtgtggccctgaaaaggggacgggaaaaaagcctttcttagcggatgcggatcgtctggtcagtcagtccccaaccaaataaataaaactcacctgatatgccgatcgttttctcatcatatggaaatcgaaacatctcgacttcgcagctgccgatcgttcccgtacgtgttgccatgcggccatgcccatgatgtcgcttttcaagctcccgcgcccgtggcaatacaagcgcatgcgcatccggcgtcccggcggcgagtcgagaggacggcgtcgcattgaggaggcagtgtaagcaggcggcgccatgcacggttccttccttgcccgtgcccccgcgatgagattcagatgtcgctttggcgagacgacgagatcgtcagagggagatcgatcatcgccgggcccgccaccaaaagaaagaggcctcggactgttgcacatgcagacatgcagtagtgcatgcatgtactggaggggactttgattggtttggcggcctctgcatcgctgcctgcctgccaccaccaaaatagaccgaaatttagtgggcggaaaaacgcatgggacgctttctgcacttggaaacagcacgcatcggactatggtcggaggatccctgggccgtcgtcccgatcacgatcggtgtcgccaacgaacaggccatcgcgtgtccgttcaatccaaaccctccaccatcagaaaaggctagaaaggtaactagggttcgctacgtcgcccaccgtctccacccaggaccgccgccctcatccgtctcccctgtcttcctcgccctcgtctacctcgtgctcgtcggaaaaaacagctcaggaccgccgctcgtctgtttggttgaagtcgaagcacccaggaccgccgctctggacctcgcgtggttgaagtcgaagcaccagtggcctctccttggtttcactctcctcgcgtaggatctgctaccaggaacgcccgtgaagcgagcgctgctgccagcgatgtcagagaagcgagcgcttgttcttgcggctacctgcttgagatgtgaccagaatccattgatatagtgtactcggtgcatggcagctacctgcttcctcactttttcatcacaagtttgttttgggatctttcgcctcaagtttcatctagctaccttcaacaaatccttcaatctccatggctacatcggtacttctcctattccaccttatgccactactagtagtgtttttattcttgagtagagcattttgctttcaactagcatgtctaattgcatataaattacatattctagatatcaaatcaatatactaacgaggaggaaattaaaaggaagagaaagaagcgaaagagagttgttgtattagctgtgtctattatggctataattgcaaattggtatcaacggaggagacctagacacatcgtagatgctaacgaagttcaagagagaaatgtcgagtgcagaaaacaaatgctacgtaatatgtaccagggttcaaatgtctattgctatgacagtttgcgcctaactaagagatcttttagtgacttgagtgccatcttacgggaaaagagtggcctacaggataccctaaatgtgtcggtagaagaaaagtttgcaatttttctgcttatagtaggtcataacaccaaaatgaggctgatccgtagcacttatgggtggtcccttgaaccaatcagtcgacacttcaacgaagtgcttagagggattctatctttaagtcatgagttcatcaagcttcctaatccagaaaccactctacctgaggatccaaagtggaaatggtttgaggactgcctaggtgcactagatggcacacatatcgatgtgaatgttccattgactgaccaaggtaggtacagaaataggaagcaacgaatcaccactaatgtattaggggtttgtgatcgacaaatgaagtttttgtatgtcttggctggatgggaagggtcggcttcggattcacgcatactacgtgatgccatgtcacgggaggactcatttgttgttcctagtggtaaatactatctagtggatgctggatatacaaatggtccgggatttcttgccccgtaccgatctacacggtaccacttgaatgaatgggctattcaaggcaacaatccatctactgcgagagagttattcaacctacgccatgcaacagctaggaatgtgatagagagaacttttgggctattgaagatgagatgggcaatcttgaggaccagctcatattttgatttagaaaaccagattaggatcatccatgcttgctgcatattgcataattttttaagggatagacaaagagatatggacgatattctaatacatgaagttgatagtctcatctctgctgctcctgctgaaaatcaaggagaaatgagtatgattacgcatgttcaatcaactaatgagtggggttattttagagacaccaaagctagtgaaatgtttgttgattatcaagcgaggcgtggtcaaagctcatagttgacaagaaaacaaggggctatgttccttggaatgatgagatggataaggtactccttgatacatttgtggactattacaataaaggtgatagatgtcagaatgggtggaagtctcatgtatacacagctgctgtgaagaatgtttgtgagaagtgtaatgtcaccattacaaaggaaaatattagctctcgcagcaagacctttgat

SEQ ID NO: 212103 - DNA, 1116 bp, Zea Mays
gcgatcactgcgtactgttgagttgtaaaggaaaatgtccaaattacctcccaagttttgcctatgtccgggcaatcacagccgcaggaacaaggaaaaatgagtccatctttggtgagcttcacacccagattaagaacaagaaattgacagttgatgtcaaagcaaactcagaatcagatcttttgacaacaatcactgtcgatgagtttggtactccagggctaaaatcaattatcaatttggttgttccagaccagaggtcagggaagcttgaattccagtacctacatgaatatgctggtgtgaatgcaagcgtcgggcttaattccaaccctatggttaacctttctggtgcctttggaagcaaagcactatcagtcggcgttgatgtctcatttgatacggcgactagcgatttcaccaagtacaacgctgccctgagcctcaccagtccagatcttattgcttcccttcatctgaataaccacggtgataccctggttgcgtcctactaccacttggtaaagaaccattcaggcactgctgttggagctgagttgtctcacagcatgtcgagaaatgagagcacgctaatcttcgggtcccagcactcgctggatccccacacgactatcaagacacgtttcaacaactacggcatggccagtgcccttgtccagcatgaatggcgtcccaagtccttcgtcaccatctctggtgacgttgacactaaggcgattgagaagagcacgaaagttggcctatccttggtgctcaagcactgaagtgccgagtgtttttgggctctaggaatttattttcggttcagttggattggaataaacatggtctggagtcatctttgcggcaccattttgatcttgaactatatatttttttcactctctgcatgatcaatttcataggaaaatattaggattaattgactttatgtttcaattctcagcgccctgttaataattctgttgattgagaccaattgttaaacttgtgaaatatataatggtgattactttgggtttacatctatgttcattcattggtcagtcattccttcggatgtctggataatagtgggattgtttactgtgg

SEQ ID NO: 212104 - DNA, 2322 bp, Zea Mays
atgccttcatcgaccacgctcctcgctggctcggtattcgaccgcttcatcccgccactctacgacgacgaccgctacaccacgccacaatcgtctatcggtactatcgccaaccctgacgacgacctcctctaggagctcgatgggttggacgaggacgccgcgagcgccaacgcggctgacgatgattcagacgctgtccacgtccatgcgccgctcaaccccgacgtgatgctcgactcgaacgtcgacactagtggatcaccgtgctacccgtgcctccccgagggcgcgacgctgttccgtcggaacccggatgagaagatccacgatgggctcatcggcggcatcagccagcacatctggagcatcacggacgaggtcgaacacacgacctcagggctggtccagacgctcatcgccatcgacaggcacttcgacctcatcatcaaggcgaggatcaagcacttggatccgttacctccgctcgtccccaacaccgacgcagaggaggaggttctcacgaccacgtccaccaggtgttcgagaatgggcctcaaccgtggcgcatacttcgtccccaacctcctcgtggtctgcatcatgggcgcgcccaaatccaacgaatacagcaccaaccgcgtcctgcaccgcacgcggctacagcgccgtccgctccagcacctgaccgtcgaccctgtcagcgccgtccacggcggcgacgactatgagctgtcccacagcgagtcaggcagtgttctcgcgatcgccgcgtttcccaactcgcacgagaagatccgttgtcagctcgtcaacaggacgaggctggcccgcgacgtccgcctcatcttatccctgacatcgttgaacaaggtgctcagccttcacatgagcacacatgacttcgactgcgccagcgtcgacaggaagtcttgcttgcgggcgtacacgccgacgagcatggaggacgaggttggccacttcagcctcgacgccaaggagtacatcctggatgagcactccaagttcctcaacggcgagctcatgaaccaactcctggacccgctccccctcgatccttacatcgaagctgctctatccccgttaatgcgtgcagcgtcagcatctgatcgggtgtcttcgctgaagaattatcaccacacactagggttatgcgaccattgggctgagaagaggtttaatggtcacaaatgtgtgcagttccacgccatcgaagaggcatcgtttgtcaaggaaatcacgacaatcgtttgtcgagctggttcaggaattggtgttgctaacagatctgcgtgggagggcgagggccgcggcgattccaccttcaccgtggcgagattagcggggtggggggcgaagacgttctcggacccgcttcgcgctctgcctcgccgcggcgttctcctcctcgtcatctccccgactccccctgtcaacaataccgtcttctccccgctttctctcgacgtcgcgctcagcctcctcgccgccggctcgggcggcgccacgcgcgaccagctgctcgccgcgctcggcggaagcgatgggccggacgcggccgacaacctgcacgcgctcgccgagcaggtggcgcgggtcgtgatggccgacgggtccgaggcgggcggcccgcggatcgtgttcgcggacgccgtcttcgccgacgcgtcgttgaagctgaagccggccttcgaggaggtcgccgtgggaaagtacagggggccgagatccactccgtcgacttccagaaaaaggccgcagaagctgctgctcaagtgaacgcatgggcagagaaggccaccggctgctcaaagctttgagcagctcggacgcttcgaacccagaggactccggcttccacaggttgtccgagctgcccaaagctttggggctccggctgccttttagcccggaagaagcagatctgtcagggctcgtcgctgatccgcccgtgccacccaggttctctgtctcgtcgtccgtcttccacaggtcagttgtggaagggaccgaggctgctgcggcatcggcggtcgtaatgaggaggggtgctgcgcgtgggagccgcagggtgtggtgctgttcgtcggccatgtggtcaatcccctaatcgcttgaacgcataataagtggctttgtcttgtctgaaacaaacaaaggttgtgggatgatccatgtagctcatgactgcttcgctgcgtactccgtatgatgaattgatgattgcgtatcaggctcaatgccgagttttattttgttaatttttttaaattaggagggaaacaaacaagccgttaaact

SEQ ID NO: 212105 - DNA, 1326 bp, Zea Mays
ggacccgttaaatttatagtttaagtgaggtcgaagatccatgatgatgatttatctctacggggaactatgatagagaagaaatatcactccccataagaaacaaggatagagaaaaaatattcctcccaaaagaaataaggatagagaaaaaaatattcgcccctatagttaacaaggatagagaaaaaatatccctcctaggaattggtgaggcatgaaaaacttttttcacaggaacgaggaccaacggaaaagtttccgtttccctgctcgagccgctcccccgtcctcttccttcctctcgagtagcctgccctcgcaaaaccctaaccctagctgcggacgccgtcgccgcctccgcgcccaaccgatgtctgattctgaggcgtccccaccgcccactccggccgccgcaacgcccgcagcgctggtggagacctccccgtcctcggcgaggaaggaagaactgctgcctgtggaggaaaagatctcggaattaagtgaatcacaatcagagcttctagggaggctccgtgggcttaaggaggatttgctgagttggaggagtaatttagactcccaagtgacgaaatacaaagtggaactctctgacatcaagagtgcactcaataatgaaatagagcagcttcgctcagatttccaagagctgaggaccacccttaagaagcagcaggaagatgtgtcacttagcttgaagaatttggggcttcaagatgctaccgaaaatgatgggaacaaaggaaatggagacggcacaaatgaggtcttgtcagctaacttggggaacttgaaactggatggttcttctgaaaactatgatgaaagcagagagtcaaaggaggacaaggtggaaaacaccgacactgctggtgatggcatcgtcgacaaagctactaaggagacgagctcaactgatgaacaattctaacacaggaaactgaactacactgttcgtgtctcagctgtagaaattctaggaacatcgatacatgagttcctgtaagagagcgagtccatgctttgctatggctcagtcgggttggttatggaactctattgggacctgtgagtcgtgaggatccaaatctcctctagaattgtgtaccaattgaaagttacgatatggtatcatggacatttgctcacctgaatgcatttcagctggtttgtcgtttgcaatatccaagcctccaaggccatgattttattagacctacttgaaatggcggtaggtgatgtactgatgtggattttgtacgaggaatagtggaataaggtattctggtgggtttgttgttggtc

SEQ ID NO: 212106 - DNA, 3610 bp, Zea Mays
ctctctcctcaccctttctcgacgaacccgtcccacaagcacgcgcgacgcgagccaaggaagacgagagcgaggtggagagagagagagagaggaaaaccctgccccgtccaggcagccgtcgtcgacgcaaacggcggaggccacagagacgccacgcgagggagccccgccgcagcagcacccgcgccgtcccaattcggcgccccgatcgccggatctcctcgccggcgccggggccctcgatcgccctctccccatgcccgtgcccctccgggggtttcattgcgcgggcgccggccatgtcggacctcgcttccagctgcaaggataaacttgcgtattttagaataaaggagctcaaagatatcttaaatcagctggggttaccgaagcaaggaaagaagcaggaccttgttgacagggtattggctattttatcagatgagcaaggtcaacatcatcatggatggggaaggaaaaatgctcttacaagggaggcggtggcaaaagttgttgatgacacatacagcaggaaaatgcaagtatgtgctcctgaccttccctctagaagccacagtggatcagatttcagtcatttcaggcccaaagaggaagcgcctgacttctaccatgtggatactaaggtccgctgcctttgcaatagcacattgctaaatgacaatatgattaagtgcgaagatggcaaatgccaggtgtggcagcatattacctgcgtactcattccagataagcccacggagggtgctggccctgatattccacctcatttttattgtgaactgtgccgactgaaacgggcagacccgttttgggtgactaccggaaatccattactacctgtgaaatttatgtcatctggtgttggaaatgatggagcaagtgtacctcaaattgtggagaagactttccaactttcccgagcagatagagaaacagttcagagacaagaatatgatctccaggtttggtgcatccttataaatgacaaagtccagttcaggatgcaatggcctcaatatgcagaattgcaagtgaacggtattcctgtacgagtaatgaccaggcccggttctcagttactagggataaatgggcgggatgatgggccactggtaaccacatgcagtagagaagggatcaacaaaattagcttatctagagtggatgctcgaaccttttgctttggagttcgaattgttaggaggaggactgttcctcaggtattaaatttgatcccaaaggaaggtgaaggggagtcttttgaggatgctcttgctcgtgttcgtcgctgtcttggaggtggaggtgctacggacaatgctgatagtgatagcgacctggaagtggttactgaatctgttacagtcaaccttcgttgccctaatagcggatccagaatgaggattgctggaaggttcaagccttgtgttcacatgggctgttttgatcttgaaacttttgtggaattgaatcaacgctcacgcaagtggcaatgcccaatatgtttaaagaattactctctcgagaacttgatgatcgatccttatttcaaccggattacatctttgttgcacaattgcagtgaagatgttaatgagcttgatgttaaacctgatgggtcatggcgtgtgaagggtgatgccgctaccagagatctatctcagtggcatatgcctgatggtactctttgtgactcaaaggaagatacaaaccctggtgtcgttagtgttaatgagttcaagagagagggtacttctgatggacatagaactttgaaacttggaattaaaaaaacccctaatggattatggcaggttagcagtaaaccagatgataagaaacccgtggttagaaatcacatccaaaacaacacggggtactcaataccaaacatagtacctatgatcagtagccccactgggagttgcagagatggtgaagatgtaagtgtgaaccaagaagggggtggtattcagtttgatatatcattgaaccaagagtttgacagttttgcgcataactttggtcaaacatacaatacagaggataggcaacaagagccacaacataatgctgcagatgtcattgttcttagtgattctgatgaagaaaatgacccgattgttcgcctgccagctgtctatgcaaatactcctacaaatggtgacagtttccctttcgtcactgatgctgctgtatctggatatcctgaagggtaccaggaggatgctggggttggtacaagtggccttggtttattgagcaacaatactggtgattttgaaataaataactggcaaatgcattcttatccacaaccagagcaagggttccagttttttgggactgatactgatgttggcaatccttttgttggtccgcataattcctttagtattacaccagaagactactcccttgactgtaatgttggcatagaggatccatctgcagctcacgatgtctcaatttgccgaaacagtaatgatgtgcatggaagcttggttgataacccattggctttagcaggtgacgatccatctttgcaaattttccttccaagtcaaccttctactgttccccttcaggaagaactgagtgagcgcgctaatactccaaatggagtccaccctgatgattggaggatatctcttacgcttgcggctggtggagggggtaatgaagaacctacaagtgttgatggcctaaaatcacagccaaaagttccatcaaaagaggcaggagttgaacctttacttgatgctgcctgtcaaccatttccaggatcatcgaggttaacttttgaaggcaggcatcttagcttctgctctcccaagcatgaacaatgacagatgtaatggatctaatctaaacccgagaaggattgaaaatatattttctcatcctcgccaaccacgaatcttgatttttattgtggagggctatcaagttattctggttgatacaaagagaaacaccagtgtggatgctttattgcattaacctggtaagattcaagtgttctatatgatccaagtgggatctccatagagttcatctaatggttggtacaggatattttctaactgggagtggtttaacgtggctagtggagcaggctgtacattttccctgacatttactgggtataaggaatagggggccatcacttggcacaagacaaatacatgtgaatgttttgtgtgtaccatcattgtatttagggttcgggtgttaatttagatgtttatgaccctgatgtttgatggaaaataaattattccttgatgaagcggcggtcaatgaacagagcccttcggttttcagtcggagctactgacccttcatctgttcctgtggtgaagtggttgctgccgcttccgtggtgggaccaaccatgccgaagtcgtgtctagcagagggcaatcaatctccttggtgtctagcaggtttctttgtgcatcatgctgtattattctggtgtcctttgcaggtggtggtggattgtatcggtgttgtgaacccttctgattgaaaggtgctgggatggagtactggtatgaagaacttatcttctttcagaaca

SEQ ID NO: 212107 - DNA, 4594 bp, Zea Mays
gatacgtccgccgcggcggctgaataggagagagaaaccgccccccctctctcctcaccctttctcgacgaacccgtcccacaagcacgcgcgacgcgagccaaggaagacgagagcgaggtggagagagagagagagaggaaaaccctgccccgtccaggcagccgtcgtcgacgcaaacggcggaggccacagagacgccacgcgagggagccccgccgcagcagcacccgcgccgtcccaattcggcgccccgatcgccggatctcctcgccggcgccggggccctcgatcgccctctccccatgcccgtgcccctccgggggtttcattgcgcgggcgccggccatgtcggacctcgcttccagctgcaaggataaacttgcgtattttagaataaaggagctcaaagatatcttaaatcagctggggttaccgaagcaaggaaagaagcaggaccttgttgacagggtattggctattttatcagatgagcaaggtcaacatcatcatggatggggaaggaaaaatgctcttacaagggaggcggtggcaaaagttgttgatgacacatacaggaaaatgcaagtatgtgctcctgaccttccctctagaagccacagtggatcagatttcagtcatttcaggcccaaagaggaagcgcctgacttctaccatgtggatactaaggtccgctgcctttgcaatagcacattgctaaatgacaatatgattaagtgcgaagatggcaaatgccaggtgtggcagcatattacctgcgtactcattccagataagcccacggagggtgctggccctgatattccacctcatttttattgtgaactgtgccgactgaaacgggcagacccgttttgggtgactaccggaaatccattactacctgtgaaatttatgtcatctggtgttggaaatgatggagcaagtgtacctcaaattgtggagaagactttccaactttcccgagcagatagagaaacagttcagagacaagaatatgatctccaggtttggtgcatccttataaatgacaaagtccagttcaggatgcaatggcctcaatatgcagaattgcaagtgaacggtattcctgtacgagtaatgaccaggcccggttctcagttactagggataaatgggcgggatgatgggccactggtaaccacatgcagtagagaagggatcaacaaaattagcttatctagagtggatgctcgaaccttttgctttggagttcgaattgttaggaggaggactgttcctcaggtattaaatttgatcccaaaggaaggtgaaggggagtcttttgaggatgctcttgctcgtgttcgtcgctgtcttggaggtggaggtgctacggacaatgctgatagtgatagcgacctggaagtggttactgaatctgttacagtcaaccttcgttgccctaatagcggatccagaatgaggattgctggaaggttcaagccttgtgttcacatgggctgttttgatcttgaaacttttgtggaattgaatcaacgctcacgcaagtggcaatgcccaatatgtttaaagaattactctctcgagaacttgatgatcgatccttatttcaaccggattacatctttggtaggttttcatctcacattttatgcctttcgccagaatttgttatgtgagttgatttctgttttcattttgatgtagttgcacaattgcagtgaagatgttaatgagcttgatgttaaacctgatgggtcatggcgtgtgaagggtgatgccgctaccagagatctatctcagtggcatatgcctgatggtactctttgtgactcaaaggaagatacaaaccctggtgtcgttagtgttaatgagttcaagagagagggtacttctgatggacatagaactttgaaacttggaattaaaaaaacccctaatggattatggcaggttagcagtaaaccagatgataagaaacccgtggttagaaatcacatccaaaacaacacggggtactcaataccaaacatagtacctatgatcagtagccccactgggagttgcagagatggtgaagatgtaagtgtgaaccaagaagggggtggtattcagtttgatatatcattgaaccaagagtttgacagttttgcgcataactttggtcaaacatacaatacagaggataggcaacaagagccacaacataatgctgcagatgtcattgttcttagtgattctgatgaagaaaatgacccgattgttcgcctgccagctgtctatgcaaatactcctacaaatggtgacagtttccctttcgtcactgatgctgctgtatctggatatcctgaagggtaccaggaggatgctggggttggtacaagtggccttggtttattgagcaacaatactggtgattttgaaataaataactggcaaatgcattcttatccacaaccagagcaagggttccagttttttgggactgatactgatgttggcaatccttttgttggtccgcataattcctttagtattacaccagaagactactcccttgactgtaatgttggcatagaggatccatctgcagctcacgatgtctcaatttgccgaaacagtaatgatgtgcatggaagcttggttgataacccattggctttagcaggtgacgatccatctttgcaaattttccttccaagtcaaccttctactgttccccttcaggaagaactgagtgagcgcgctaatactccaaatggagtccaccctgatgattggaggatatctcttacgcttgcggctggtggagggggtaatgaagaacctacaagtgttgatggcctaaaatcacagccaaaagttccatcaaaagaggcaggagttgaacctttacttgatgctgcctgtcaaccatttccaggatcatcgaggttaacttttgaaggcaggcatcttagcttctgctctcccaagcatgaacaatgacagatgtaatggatctaatctaaacccgagaaggattgaaaatatattttctcatcctcgccaaccacggtctgttaggcctcgtttgtgtttgtcattagattctgattcagagtagttcggacatcacactgggatagctgaatttgctattaatctggcaaagttggcttccagaatcttgatttttattgtggagggctatcaagttattctggttgatacaaagagaaacaccagtgtggatgctttattgcattaacctggtaagattcaagtgttctatatgatccaagtgggatctccatagagttcatctaatggtaaggacagatgattagcctcttcatgtgatggatttgctgctatgttttatgaactatttcattgcagtttttgtgattcaagtagctgagttgtaattaaacatgttgaacttcaatgccctatgaaataaaaatgaagttgaccaggataaaaagaagcaaacaaaaactggtaggatctgatcagcaatcaaccgaatgatcgtagcctacacttatccttctaatgctatctatatatgcttgattttgtgtagggttgtctccagaaagcttgcttgttacttatatcccacacacttgcgcgcacgcaacccggcctttgtccctctcttgcctctcactgctgctgcccctcgctattcttctctgatcgatttctgtcatggcttcattctggttcagctgccgctgtagcgggatgacccaggtttgccgcagatgacccaggtgggactatgcggtggccggcagccccagatttggtgggggatgagataggaggtggctgcatggcctttcttgttggttttctatcgatttcctatgttgtgctctctaatcctctcagctctctacttttggctaggcgtcaaggacgcccacgcgatgccttaaaaacactgcttatgtgaatattgtttcaaaatacgtctgcttgattgtttagcatgaattgagtcgatgtgagtgcctgtagtttctttgctagtccaaccgacgtggtaactgatatgttttatgtatttcaggttggtacaggatattttctaactgggagtggtttaacgtggctagtggagcaggctgtacattttccctgacatttactgggtataaggaatagggggccatcacttggcacaagacaaatacatgtgaatgttttgtgtgtaccatcattgtatttagggttcgggtgttaatttagatgtttatgaccctgatgtttgatggaaaataaattattccttgatgaagcggcggtcaatgaacagagcccttcggttttcagtcggagctactgacccttcatctgttcctgtggtgaagtggttgctgccgcttccgtggtgggaccaaccatgccgaagtcgtgtctagcagagggcaatcaatctccttggtgtctagcaggtttctttgtgcatcatgctgtattattctggtgtcctttgcaggtggtggtggattgtatcggtgttgtgaacccttctgattgaaaggtgctgggatggagtactggtatgaagaacttatcttctttcagaaca

SEQ ID NO: 212108 - DNA, 643 bp, Zea Mays
cctggacctctccttcttaggtctgtgcatgtgacgccggttgcaaaagagggaaataaatggaactgtcaaacttggatgaggacatccaaatggtgaactgttgttggggcccaccttgctgccttattatgcgcagtttggcaatgtgacctggtatagagagctgtagcggtgacagaagacaaactcaaatggaggtgcttctttctgggtagcacaggggactaatgacagtatgggcgccaggtgattggtgtggcgtgattacagtactacacgcaactggttacaacattgaactgtcaagattacatagctgaaaaaggtaaccgctgagcagtctcggagggaacatcggataaaggctggccagcttcgtgttgtaggacgactggacgagatagcattgtcggccaggccgagatggaagtgtccagcgataatcagtggatcatgagttcacgagagaagacccttgatgatgtcttagatcttgttccgttgcgtctggatcaaagagtccatgcagttatctcatgcaactattcttgaagagtccatgcgggctattcttgaagagtccatgcgggcacgtgatttactaatggagcagaatgttgccctggatttagctcgaaga

SEQ ID NO: 212109 - DNA, 1910 bp, Zea Mays
acctgtcaggttgttagtggggattaactttagaagaagggattaacttcctctggcccacacgtcagccaccacgtgcatcgtccggccggtgagggaccaccgcggcagctatcctcggcgccgcgctcacgattccggaatcactccccacgcgattcgatcctctcgccggcccaggcatcgtagaatccccccaccgaaaaaaatcaagcgggcatacaaagagcgcgtgcgcagtgcttggaataggtgggtcgaacttcgaaggggttcgaggacttcagctatggcatctgtgggacgtgcaggacgaggagggaaaggagatggagggaagggagaagggtcgctggctcgcagggcgtggaggcagtacctgctccagctccagcaacatcctctccgcacaaagctctttggttttgcgtatggtggcccatttggacatttcttgcacaaaattttggattacatcttccaagggaagaaggataccaaaaccatagcaaagaaggtgttgctggagcaagtgacatcttctccctggaataacatattgttcttgttctattatggatatgttgttgagaggaggcctttgaaggaggtgacgaccagggtgaagaaacaatacccttctgtgcaactcagcgcttggatgttttggccgatagttagttggataaaccaccagtacatgcctttacaattccgagtgatcttccacagctttgtcgcatgttgttgggggattttcctgaaccttcgtgcaagggccatgtctctgaagcaggcctagatggtttagaaggaacgtatagcatcgtagctcctgcccggtgctaactaaagcagccgaagaaggaggacgctggatgctgtatcctgtactgttacaaaaaccgttgtttatttcctggtagtagtcggtttatttgattgtcaacgcatgcgaagacagattatgcttttgtaaaaaaaaaaattgtgatgggagcaaagtatggtgaattcggttagctttgaggaccagttcgtattcgttcattcattgttcagctaaatggtcatgggactgttccagcgtccaccgttcttgctttgctggtaatcaaacctgttgcctgaccggatgctcttggcagctccattcagacattggaccttgaaggattcagaacttcacactgggcgactggctgcaattcgccgtgcaggaccgcctgcaattcaaactggttgtcacagcagacaccacaagagacctaattaaaccagacaagttcataccaactttcgtgaaaaacattctaacttccttagcagtcaaaatatattatatctgatcaaaattatagaaactacaacagcataattaattatacttatttcatgttataaatgttattatttcatcatatgaatttggttaaaccggagatgctttgacttttagtagagtttgggtaattcataattagagatggatggaccgatggagtatatcgttctgtttgttttttttttttttggtcgttgaaaccgttaacgtggactgaccgtgccgccgtctctgaaccgaagcaagaacaagtcgttgcccagatggctgctggctgctcgtaatgggcaaccgtaggcttgacaattcaattacactacaaatgaacatcggctttcaaggcgttcgtttgcaacgtcgtcgctcgtcagcctgtcttgccaagaacccgcgtgaaaaccggactgtcttgccaagaacccgtctgaaaaccggactgaaccagctccggactgaaccagctgaggctttgttcggctattgatattacatgtgtattggagtgtattgggtgtgattgtcatgtattttgacttattatggatttaaatcgtttcaatcccac

SEQ ID NO: 212110 - DNA, 2206 bp, Zea Mays
cggctcgctgtcttctttctatcgctcacaaccaacaaccatagcccacaggccgccggcggccgccagccgacgtcctcccatttcgctccccctcctccgctgcggtcgagcaaaagttccggccatccggcaatcccccggcacccggcggttcaaatcgtatctttctgacctgacgcggctacgacgtcgctcctccggtcccttcgatccggtggggtccgtttctttcaagcgcggcctcgctggccgcctcgtggcagtgaccgtcgaaccctctataaatcccgtgccccgagcacccttcctcgatcacacaacccaaagcagccacagcagcctccttcctcctctcactctcgctcgtgctgcgctcgctacctcgcttcgcattccattcgaggagagcggtgagaggggaggaaaggcaagatgttcatcgagagcttccgcgtcgagagcccccacgtgcggtacggcccgacggagatcgagtcggagtaccggtacgacacgacggagctggtacacgagggcaaggacggcgcctcacgctgggtcgtccgccccaagtccgtcaagtacaacttccggaccagaaccgccgtccccaagctcggggggatctcatgggcgaccaaggacaaggtgcagcaagccaactactacggctccctcacccaggcctccaccatcagagtcggcagctacaacggggaggagatctatgcgccgttcaagagcctccttcccatggtgaacccagacgacattgtgttcggaggctgggacattagcaacatgaacctggccgactccatgaccagggccaaggtgctggatattgacctgcagaagcagctcaggccctacatggagtccatggtgccacttcccggtatctatgatccggacttcatcgcggctaaccagggctctcgcgccaacagtgtcatcaagggcaccaagaaagaacaggtggagcagatcatcaaggatatcagggagtttaaggagaagaacaaagtggacaagatagttgtgttgtggactgcaaacactgaaaggtatagcaatgtgtgcgctggtctcaacgacacgatggagaatctactggcatctgtggacaagaacgaggcggaggtatcaccatcaacactatatgccattgcctgtgtcatggagggggtgccgttcatcaatgggagcccccagaacacctttgtgcctgggctgattgatcttgctataaaaaacaactgcttgattggtggtgacgacttcaagagtggacagaccaagatgaaatctgtcttggtcgatttccttgttggtgctggaataaagcccacctcaatcgtgagctacaaccacttgggaaacaacgatggcatgaacctgtctgcccctcaaacattcaggtccaaggagatctccaagagcaacgtggtggatgacatggtctcgagcaatgccatcctctatgagcccggcgagcatcccgatcatgtcgttgtcatcaagtatgtgccgtacgtgggagacagcaagagggctatggacgagtacacctcagagatcttcatgggcggcaagaacaccatcgtgctgcacaacacctgtgaggactcgctcctcgccgcacctatcatccttgatctggtgctcttggctgagctcagcaccaggatccagctgaaagctgagggagaggacaaattccactccttccacccggtggccaccatcctgagctacctcaccaaggcacccctggttccccctggcacaccggtggtgaacgctctggccaagcagagggcgatgctggagaacatcatgagggcctgcgttgggctggccccagagaacaacatgatcctggagtacaagtgagccaagtggcgtgccctgcagcgcgaggttagctgctggaagggaactagaaaggcgagattagctgtgggattgtgttgggcttgtcgtgttttcttttgcgttctttcctagtcattgctgttgcgcttttgtatttgtcggacccgtaactaccagggctctgctattagcggcacggagcctgtaattgtattgtatgataatgtgatcgagggtgctacttcccctcggcattcctagtgttggttaaaagtcgttcgacagcaacttatcgacccaccactgacttcaccctatccgccgg

SEQ ID NO: 212111 - DNA, 1722 bp, Zea Mays
caaattccagcagggacgatgagcagcagacagaactcattacactagcaaattgatactaggattactgggtgatgcttgtggggtggggaggcaacaacgggtccacgctgacggctggggtcattgccaacagggaggggatctcatgggcgaccaaggacaaggtgcagcaagccaactactacggctccctcacccaggcctccaccatcagagtcggcagctacaacggggaggagatctatgcgccgttcaagagcctccttcccatggtgaacccagacgacattgtgttcggaggctgggacattagcaacatgaacctggccgactccatgaccagggccaaggtgctggatattgacctgcagaagcagctcaggccctacatggagtccatggtgccacttcccggtatctatgatccggacttcatcgcggctaaccagggctctcgcgccaacagtgtcatcaagggcaccaagaaagaacaggtggagcagatcatcaaggatatcagggagtttaaggagaagaacaaagtggacaagatagttgtgttgtggactgcaaacactgaaaggtatagcaatgtgtgcgctggtctcaacgacacgatggagaatctactggcatctgtggacaagaacgaggcggaggtatcaccatcaacactatatgccattgcctgtgtcatggagggggtgccgttcatcaatgggagcccccagaacacctttgtgcctgggctgattgatcttgctataaaaaacaactgcttgattggtggtgacgacttcaagagtggacagaccaagatgaaatctgtcttggtcgatttccttgttggtgctggaataaagcccacctcaatcgtgagctacaaccacttgggaaacaacgatggcatgaacctgtctgcccctcaaacattcaggtccaaggagatctccaagagcaacgtggtggatgacatggtctcgagcaatgccatcctctatgagcccggcgagcatcccgatcatgtcgttgtcatcaagtatgtgccgtacgtgggagacagcaagagggctatggacgagtacacctcagagatcttcatgggcggcaagaacaccatcgtgctgcacaacacctgtgaggactcgctcctcgccgcacctatcatccttgatctggtgctcttggctgagctcagcaccaggatccagctgaaagctgagggagaggacaaattccactccttccacccggtggccaccatcctgagctacctcaccaaggcacccctggttccccctggcacaccggtggtgaacgctctggccaagcagagggcgatgctggagaacatcatgagggcctgcgttgggctggccccagagaacaacatgatcctggagtacaagtgagccaagtggcgtgccctgcagcgcgaggttagctgctggaagggaactagaaaggcgagattagctgtgggattgtgttgggcttgtcgtgttttcttttgcgttctttcctagtcattgctgttgcgcttttgtatttgtcggacccgtaactaccagggctctgctattagcggcacggagcctgtaattgtattgtatgataatgtgatcgagggtgctacttcccctcggcattcctagtgttggttaaaagtcgttcgacagcaacttatcgacccaccactgacttcaccctatccgccgg

SEQ ID NO: 212112 - DNA, 1586 bp, Zea Mays
gggagggatctcatgggcgaccaaggacaaggtgcagcaagccaactactacggctccctcacccaggcctccaccatcagagtcggcagctacaacggggaggagatctatgcgccgttcaagagcctccttcccatggtgaacccagacgacattgtgttcggaggctgggacattagcaacatgaacctggccgactccatgaccagggccaaggtgctggatattgacctgcagaagcagctcaggccctacatggagtccatggtgccacttcccggtatctatgatccggacttcatcgcggctaaccagggctctcgcgccaacagtgtcatcaagggcaccaagaaagaacaggtggagcagatcatcaaggatatcagggagtttaaggagaagaacaaagtggacaagatagttgtgttgtggactgcaaacactgaaaggtatagcaatgtgtgcgctggtctcaacgacacgatggagaatctactggcatctgtggacaagaacgaggcggaggtatcaccatcaacactatatgccattgcctgtgtcatggagggggtgccgttcatcaatgggagcccccagaacacctttgtgcctgggctgattgatcttgctataaaaaacaactgcttgattggtggtgacgacttcaagagtggacagaccaagatgaaatctgtcttggtcgatttccttgttggtgctggaataaagcccacctcaatcgtgagctacaaccacttgggaaacaacgatggcatgaacctgtctgcccctcaaacattcaggtccaaggagatctccaagagcaacgtggtggatgacatggtctcgagcaatgccatcctctatgagcccggcgagcatcccgatcatgtcgttgtcatcaagtatgtgccgtacgtgggagacagcaagagggctatggacgagtacacctcagagatcttcatgggcggcaagaacaccatcgtgctgcacaacacctgtgaggactcgctcctcgccgcacctatcatccttgatctggtgctcttggctgagctcagcaccaggatccagctgaaagctgagggagaggacaaattccactccttccacccggtggccaccatcctgagctacctcaccaaggcacccctggttccccctggcacaccggtggtgaacgctctggccaagcagagggcgatgctggagaacatcatgagggcctgcgttgggctggccccagagaacaacatgatcctggagtacaagtgagccaagtggcgtgccctgcagcgcgaggttagctgctggaagggaactagaaaggcgagattagctgtgggattgtgttgggcttgtcgtgttttcttttgcgttctttcctagtcattgctgttgcgcttttgtatttgtcggacccgtaactaccagggctctgctattagcggcacggagcctgtaattgtattgtatgataatgtgatcgagggtgctacttcccctcggcattcctagtgttggttaaaagtcgttcgacagcaacttatcgacccaccactgacttcaccctatccgccgg

SEQ ID NO: 212113 - DNA, 981 bp, Zea Mays
cgtggtttgggctgattgatcttgctataaaaaacaactgcttgattggtggtgacgacttcaagagtggacagaccaagatgaaatctgtcttggtcgatttccttgttggtgctggaataaagcccacctcaatcgtgagctacaaccacttgggaaacaacgatggcatgaacctgtctgcccctcaaacattcaggtccaaggagatctccaagagcaacgtggtggatgacatggtctcgagcaatgccatcctctatgagcccggcgagcatcccgatcatgtcgttgtcatcaagtatgtgccgtacgtgggagacagcaagagggctatggacgagtacacctcagagatcttcatgggcggcaagaacaccatcgtgctgcacaacacctgtgaggactcgctcctcgccgcacctatcatccttgatctggtgctcttggctgagctcagcaccaggatccagctgaaagctgagggagaggacaaattccactccttccacccggtggccaccatcctgagctacctcaccaaggcacccctggttccccctggcacaccggtggtgaacgctctggccaagcagagggcgatgctggagaacatcatgagggcctgcgttgggctggccccagagaacaacatgatcctggagtacaagtgagccaagtggcgtgccctgcagcgcgaggttagctgctggaagggaactagaaaggcgagattagctgtgggattgtgttgggcttgtcgtgttttcttttgcgttctttcctagtcattgctgttgcgcttttgtatttgtcggacccgtaactaccagggctctgctattagcggcacggagcctgtaattgtattgtatgataatgtgatcgagggtgctacttcccctcggcattcctagtgttggttaaaagtcgttcgacagcaacttatcgacccaccactgacttcaccctatccgccgg

SEQ ID NO: 212114 - DNA, 1442 bp, Zea Mays
tgccgcgccacttctcagctcaaagaccgtgtgtgtcaaagagagaaccagcacacagcagagtagcacctgatcgatcgatctcctactactagctcgttcgctttcacaaccagggagcagcaatggcatctgctgctactactctcctcaagtcgtcattcctccccaagaaggctgaatggggatccaagcaccagctggttgccgctcatcccaggccggcgaccgtcgtcgtctccatggttgcccgcgctagcgcctacgctgacgagcttgtccagaccgcgaaaaccatcgcgtcgccgggaaggggcatcctcgccatggacgagtcgaacgcgacctgcgggaagaggctcgactccatcggcctcgagaacaccgaggccaaccgccaggcctacaggaccctcctcgtcagcgctccaggcctgggacagtacatctctggtgccatcctcttcgaggagaccctctaccagtcgaccgtcgacggcaagaagatcgtcgacgtgcttagtgagcagggaatcgtgcctggtatcaaggtcgacaagggtcttgtgccactcgctggctccaacaacgagtcatggtgccaaggtctcgatggccttgcttcacgtgaggcagcctactaccaggccggtgcccgcttcgccaaatggcgcactgttgtcagcatccccaacggtccatctcaactagccgtgaaggaagctgcctggggcctcgcccgctacgccgccatctcacaggaaaatggtctggtgccgatcgtggagcccgagatccttctggatggcgagcacggcatcgagaggaccttcgaggtggcgcagaaggtgtgggcggagaccttcttctacatggccgagaacagcgtgatgttcgagggcatcctgctgaagcccagcatggtgacccctggtgccgagtgcgaggagaaggccaccccggagcaagtagccgagtacaccctcaggctcctgcgcacaaggatccctcccgccgtgccgggcatcatgttcctgtccggcgggcagtctgaggtggaggcgacccagaacctgaacgccatgaaccagagccccaacccgtggcacgtgtccttctcctacgccagggcgctgcagaacacctgcctcaagacgtggggcggcaggcccgagaacgtcaaggcggcgcaggacgcgctgctgctgcgcgccaaggccaactccctggcgcagctcggcaagtacaccggcgatggcgaggccgcggcggcaaaggagggcatgttcgtcaagaactacagctactaattaaagacgacggcgatacaccactcctgctgctagtacgttcctcgatcgggggcggtgccgttacaggtgacgaatcttgcttcaaaatccttcttcatattctttagacgctcatcaacttcttcgtct

SEQ ID NO: 212115 - DNA, 1675 bp, Zea Mays
cgcaggccggcctcggttagcggcgcccacccattcccctccccgctcgctacatataggtgacccatcccattatacatacccaccggccggcgtcacagacacgcgagcagagcacagacacagagcacacagcacagaggcagccaccaccacaggcactcacccgcaccgctcggtcaccgaggagtggaggagctttgcagtcgcagcagcagcagtacagtgtgtgagtgtgaagggactagagcagggcacacagcgcaggccgcatgggcgaggcggaggtggagaagcccaaggaggcggcagaggaggagaagaagaaggaagacaagcccatggacgccacggcggcggcggaggacaagcccaaggacgccgcggcggcggaggacaagcccaaggacggggaggagaagaaggacgacgcgccccctccccccccgccgccgccgccgcccgaggaggtcgagatgcgggtctacatgcactgcgagggatgcgcccgcaaggtcaagaagatcctcaagcgcttcgacgccgccggtgatcgccgtggtgctgaaggtgcacatgcactgcgaggcctgcgcccaggggatcaggaagaggatcctcaagatgaaaggcgtgcaatctgcagagccagacctcaaggcgtcggaggtggcagtgaagggcgtgttcgaggagtccaagctggcggagtacgtgtacaagcgcaccggcaagcacgcggccgtcgtcaagtccgagccggtcccggcgccaccgccggagagcggcgccggcgacaacacgggggccaaggaggaggagaaggggcaggaggaggagaaggagaaggaaggaggaggcgatggcggtggcgaggagaagaagaaggaagggggcaaggaggaagagaagaaggacggcgagaagcaggaggaggagaaggagggcggcggtggcggcgagaaggtggaggaaaaggagggagataaagacgctgccgctgccgccgccgccagcatgtacatgcactacccgaggttcccgttcccgggaggctactacgcgccgcctccggggtacgtctaccagccggtgtacccggcgccggcgtacgcggcgtacgcgccgccgcaccaccagcccatggcgccgcagatcttcagcgacgagaaccccaacgcatgctccgtcatgtaactaaaaaacagaaggagccttggcgagagagggggagaaaaggaaaaaaaaagaataataagaaggtgggaagagcgagggagctgcgtgcataagccagagccagaggtagggagggaggtcccctgagagaaatgcagcatccagcagtgtcccctgagcgaagcaaatgggcaactttgtttgaaacaaaacaaaaatacccagctttttcggggggggggggggggggaggaggggcgggtagatttcgctcttattttttttcttctttcttttgtaattttaacccttcctttcatcttttttttcctggtgtaaagtaagcgtggactttgtcggtttatggacgctagctatctttatgtaggatgatgccttggcatgtactgcttgcagcttcagacttcatatataaaactgtatgtattataaatttgtacccctttctctggttggtaacagcatgcttgcgttc

SEQ ID NO: 212116 - DNA, 2008 bp, Zea Mays
gtgatcttatattcctatactccgtatataccactcagtcgacttcaaattgtgctcgatgatgagggctatactcctcggtgctctttcccatctgtgtcatcatgcaaagaaattgaagttacaccttctagttctgtctatcactgtaaaattggtgctgttgatgctgctgcaaagatacgatatctggatactcgtagggtctcaaatgatgaagttaaactttttgaatacaagcttctgggggaagtaaggatgctgggtgcgctaaggaagcacagatccatagtggacatatatggacaccaactttcatctaaatgggttcaagtcgatggtgataaagaatataggatattgcagtctataattttaatggaatatgtaaatggaggttctcttaagggatatttgacaaagctactgaaggagggcaagaagtgtgtccccattgatctgtcagtttacattgctcgggaagttgcttgtgcattgttggagatgcacaagaagctagttattcacagggacataaaaagtgagaatgttttgattgatttggaccccaagaggaatgctggtgcacccattgtcaaactatctgattttgacagatccgttcctttgtattctttgtcccatacatgctgtatatctcagcttggtacacacccacctgatgtttgtgttggaacaccttgttggatggctccagaggttgttaaggccatgcatgaaaaacaccactatggactggaaatagatatctggtcatttggatgttttttattggagatgcttacgcttcagatgccttaccagggactttctgacactgaaatatatgatctgatactgaggaagaaacagaggccaaggctaactcaggaactagaagcattctggacaatggatgagccagctacgagactcaagttagggatcacatctgatgctcatgcagataaattgagacacctgatagatctcttctaccagtgtaccagaggacatgcatccaggcggcccaaagctgtgcaaatttacaactcactgtgctccttgcccacatgttacgacatgaggtgaacgttctgatactgtatgaacgcgaaacttgatgcagaagtgcaggggaaggtcaaggcaggacatctagccagcctcagagggtttggtgctctaacccgaacatttcaccgtgagttggccttcaggtgctgccaggcagaacatgagaagtgggaccaaggctagcggctgtggtcgccagagctcctcctgagttggtcagttttgtagcggcacggcatctgcgtccacttgtagtcatcatcagttggtcagttttgtagtggcacggcatctgcgtccacctgtagtcatcatcatgtatgtgttatcacatccattgtttccccttttcatggttgctgccatcacaatggggtttaagttatcaaattaggtcattggtgccccaggggcatttgtctgctagaccgctgcatttacttctctatgtgtattgtattgtttatatctgtttagaaaaaaatgactgttgtccatgtaacaattgatgacatctgctatgtgttattgcgaggttatttgtttatgctgattttaccagccattttcgggcatgagctcttgggaaacctgtatcgtgtacagtctcgacagacaagaatatactgatgaatcttgatttatgtgtcagtcttttcaccatttattatatatatgctcgcctacatttaaaacttagtttgttactttcttttttattaaggtcgacacaaattgattaaattcgttaagatgcgcttgaatacatataacttccggcatacgaatagtataagacgttatttgagacagagcttattagtaagactcttggtcatatataacttcttttttttccacaattttaccgcagactttatattcattacttcacgcaaaacatcaaaagataaacggatctgtaatgtgg

SEQ ID NO: 212117 - DNA, 4364 bp, Zea Mays
gtgaaggcaaggctcggcttggagtttcgtcttccctttctcggactccgagtcccatctggccatcacgccgtatcacgcgttcctctcctttttcttttccttattacagacaaagacttttcccactcccgttctctgtctctctcctgctcgttccccctttgtctagcccgtacgaaaccctaggctccgccgcccaaaacctcgccgccgcgccgccgtacggcggcgccccatggccccggccttctccgtccctgacgcagaagacctcccagcccgcagatccgacgcctccgacgtcgcaggcaacgtctgggacctcgccaccctccccacgccccccgccggcggcggccgcgaaatatacatctaccgcaacacgtttaacctcgtcccgcgctccatcggcggcagagcccgcggtctcaggtcgcttaagttcttcggcaacgatgtggaggtgctacccgcggattccggggacgagctggacgggctcgaaagcctccaggtcaaggtgtccgcgcccagggtctcaggggcgccgctccgtcggatgcaggctctcaaggagctcgagctctcaatggtgccgcccaggccatcctcgtgctccatactggcggaggttgcccggctcaagtgcctcaccaagctcaccatttgccacttctcgattaggtacctccctcctgagattggttccctcaagaagctccaagaacttgacctctctttcaacaaattgaaaaactttcctaactgtataattgagttgagtgcattgaagtttctcaaagtgaccaataataagttggtggatgtaccctcgggaatctcctctttgagatgtcttgaaagccttgacttatcaaacaacagattgacttctcttggttcagttaaacttatttctatgcttacgctgcagtatttaaaccttcagtttaataggctctcccattcctatgtaattccttcatggatatgctgtgacatgaggggaaatgttgaaaatactatgaagggttgcaagttaaagtacacaggtgtagcaaccatgaacagtttagcagaacctagtacatcgagtcatgcttgtgacagcgcccttttatgcgtgcaatcagaatcttcgccaaatttgaaacaccatgctccacataaaattaagaagggctggaggagacgggattgcttgcaacaacgagctcgtcaggaacgtctggagtcgagcaggagcaagctgaatgaaaaatacatagatgaaatggctgtgaacatggctgaagatgaatgcccttctagtttgcatgatatggaaaataagctaggcatcagaacaattgatgaagaaacttcagtacaggattcgttgaaagaaacaagttctatatctgaagatctattttcaatagttgacgatgacttggatgggcttacgaaggattgtggcacgatggtacaggatcactatgatgaggagaaacctggattcaatatgagaggttacaatgatgacaattcttgtatcagtggggagcctgcttgtttcagcagaagcagggtttgcagtgttgaaaaggaactagatgatactgcttcatccgtccatgatgttggtgagattgctcgagacaattcttcagtgacacccaagtttgctttaaaatctaaaaggcaccctgatatggacagcaatcctaaaccaagcaaatgccctcgaccaattgatgaacgctcaaaactttcatataaatacagtgtggaatcattttgcagcatagatgaccatctaccagatggtttttatgatgcaggccgagatatgccattcatgtcattagaggagtatgaaaggagtcttgggctgtatgcacgggaggttattctcttggacagagaacaagatgaagaattggatacaattgcttcttcagcacaattactgctatctagtttgacaaggccaagctcttgtgaaatggaggaagatgcaggccatgatttactgagggcatcagtgctcgctttgtttgtttctgactgctttggtggttgtgaccgaagcgcttctcttgggagaacacgtagagctattgttagcttgaggaaggagcagccttttgtttgtacttgttctgctgggaacttgggcgacaacaatgaagctaagcagaccaatattctttctgggcactttgattttgctggtttgtgtaatagatcaatacatctcatcaaggaaagaagaaattcgggtattgtacctataggttcactgcaattaggtgtttgtaggcaccgagctgtcctaatgaagtatttgtgtgaccgggcggatcctccaattccttgtgagcttgtgaggggccatcttgactatacacctcatgcttggaacattgttcctgttaaaaagaggaatggctgggtaaggatgattgttgatgcttgttaccccaccaacataaaggaagagacagatccagagtacttttgcaggtatataccactcagtcgacttcaaattgtgctcgatgatgagggctatactcctcggtgctctttcccatctgtgtcatcatgcaaagaaattgaagttacaccttctagttctgtctatcactgtaaaattggtgctgttgatgctgctgcaaagatacgatatctggatactcgtagggtctcaaatgatgaagttaaactttttgaatacaagcttctgggggaagtaaggatgctgggtgcgctaaggaagcacagatccatagtggacatatatggacaccaactttcatctaaatgggttcaagtcgatggtgataaagaatataggatattgcagtctataattttaatggaatatgtaaatggaggttctcttaagggatatttgacaaagctactgaaggagggcaagaagtgtgtccccattgatctgtcagtttacattgctcgggaagttgcttgtgcattgttggagatgcacaagaagctagttattcacagggacataaaaagtgagaatgttttgattgatttggaccccaagaggaatgctggtgcacccattgtcaaactatctgattttgacagatccgttcctttgtattctttgtcccatacatgctgtatatctcagcttggtacacacccacctgatgtttgtgttggaacaccttgttggatggctccagaggttgttaaggccatgcatgaaaaacaccactatggactggaaatagatatctggtcatttggatgttttttattggagatgcttacgcttcagatgccttaccagggactttctgacactgaaatatatgatctgatactgaggaagaaacagaggccaaggctaactcaggaactagaagcattctggacaatggatgagccagctacgagactcaagttagggatcacatctgatgctcatgcagataaattgagacacctgatagatctcttctaccagtgtaccagaggacatgcatccaggcggcccaaagctgtgcaaatttacaactcactgtgctccttgcccacatgttacgacatgaggtgctgccaggcagaacatgagaagtgggaccaaggctagcggctgtggtcgccagagctcctcctgagttggtcagttttgtagcggcacggcatctgcgtccacttgtagtcatcatcagttggtcagttttgtagtggcacggcatctgcgtccacctgtagtcatcatcatgtatgtgttatcacatccattgtttccccttttcatggttgctgccatcacaatggggtttaagttatcaaattaggtcattggtgccccaggggcatttgtctgctagaccgctgcatttacttctctatgtgtattgtattgtttatatctgtttagaaaaaaatgactgttgtccatgtaacaattgatgacatctgctatgtgttattgcgaggttatttgtttatgctgattttaccagccattttcgggcatgagctcttgggaaacctgtatcgtgtacagtctcgacagacaagaatatactgatgaatcttgatttatgtgtcagtcttttcaccatttattatatatatgctcgcctacatttaaaacttagtttgttactttcttttttattaaggtcgacacaaattgattaaattcgttaagatgcgcttgaatacatataacttccggcatacgaatagtataagacgttatttgagacagagcttattagtaagactcttggtcatatataacttcttttttttccacaattttaccgcagactttatattcattacttcacgcaaaacatcaaaagataaacggatctgtaatgtgg

SEQ ID NO: 212118 - DNA, 3617 bp, Zea Mays
caaacacgcccttcgtgtcaagacagctgacacacgattggcaccagaagtacattggcaaagtaaagcaagcagtttaccacagccaaaagagtggaaggaggcgtgttgtagtcttgacagaggaaaatgtgatctcatctcttgatctacgttctggagatatattctggcgacatgtcattgacaagaacgaccccttggatcagcttagtctttcacttggaaaatatgttctaaccctttctttgggaggaactatattaagggcatggaatcttccagatggacatatgatctgggaaactaaccttcggatctctacagcatcaaatccacagttgcatgttatgtcaaacaataaagtggccaatgacaacttggttttagtttcagctgggcgatggatttatgctgtatcaagcactgatggggcaattttatgggaaaaggagttttctcttgatggcttagaaattaagcggattctccaatcacctgaaaatggtattgtatatgctttaggacttgctggttcctcaaagctagctttgtatcacttgagtgctaaaactggagagatactaaaagatatccaagagtcactccctggtggattattgggtgaaacagtacttgtttctgataatgtgttggtagcattagataaggccagatcaagtctgttagttattgaattcaagggtgagagaattagctacaacaaggtgcatgtttcagatcttgttcaagacttatcaggatcacttgagcttcaatctttgtccaatggtgtcatatctttgcaaacatcatcttctatttccctcctaaagctcaaaggtactgatggattggaagtacttcagagatttgaccagccagctgctgtcagtgattccctgacaatcacagaaaaagaagcagcttttgctgtcgtgcaacatttgggttctgaaattgagtttatcgtaaaatctacaagtgatctaagcagtgaaattattaaagaaaagcttgttatagaccaaaataggggcaatgttgagaaggtcttcttgaatagttatattcgaaccgacagatctcatggttttcgagctttggttgtaatggaggatcattcactcttgttaattcaacaaggtgaggttgtttggagcagagaggatgggctggcttcaattgttgatgtaacaacatcagaattgcctgttgagaaggatggtgtatcagttgccgatgtggaacacaatctctttgagtggcttaagggacacatgctgaaactcaaaggaagtctaatgcttgctaatgctgatgaagttgctgcaatccaagcaatgagactaaaaagctctgagaaaaataagatgacaagagaccataatggatttcgcaaactccttgttgtattgacaaaagcgggcaaagtgatggctctgcacactggagatggacgtgttatctggtcgaaattggtgccatctcttcgtgcctccagatgtggtggagtcccttctgcattaaggatataccaatggcaggtcccgcatcacagtgtcatgcgtgaaaatccatctgtacttgttgttggcaaatttggagcagaaccttcaattcctggtgtattctctattcttgattcatattctggagaagaactgaactctatgaaacttgaccattctgttgtccaaattattcccttgacactgaaggattcatcagagcaacaacttcatctgtttgttgattccgattccaatgcacatttatatccgaaatctccagatgctctcaatgtatttcttcatgaaatgtcaaacctgtatttctactctgtagatattcaggcaaatgttattaaagggtattcattacagaagtcatgtaatctcaatgtgggtgatgagtactgctttagtacgaaggagttatggttcatcatctttccttctgattctgaaaggattactatctctgaaacacgaaagatgaatgaggttgttcatacccaagctaagataagcggtgaccatgatgtgatgtacaagtacttgtcaaagaatttagtttttgttgctactttgtctcctaaagctgctgttgatattggatctgcactacctgaagaagcttcacttgttgcatatcttattgatgcagtcactggacgcatactccatcgtgtgactcatcatggtgcacaaggccctgtacatgcagttttgagcgagaactgggttgtctatcattattttaatcttcgagctcacagatttgaaatggcggtgatcgagatatatgatcaatctagggcgggcaataaagatgtcacgaagctcatactagggaagcataatcttttggcaccaattacatcttatgcccgccctgaggtggcagtaaaatcccagtcatactttttcacccattcagtaaaagcaatggcagttacacaaacggctaaggggatcacttccaagcagcttctgttgggtactattggtgaccaggttttggcacttgataagcgctatcttgatccacgccgttcagtgaacccgacacagcaagaaaaagaagagggcattataccattaacagattctttgcctataataccccagtcctttgtgacgcactctcatcaagtggaggccctgcgagccattgtttctattcctgcaaagttggagtccactattgttttcacatatggtgtcgatctattctacacccagcttgccccgtcaagaacctatgattccctaaccgacgaattcagctatgcgctgcttctaatcacgatcgcagtcctggttgccgccattattggtacatggatttggtctgagaaaaaggagttgagagacaagtggaggtgagcaaggtctcagtgttctgacgctgaggaaattttgggccctagtcagctaccttctcctcctctccccttttcattgtagtgctagagttcgtttcactttttgactaggactttatttatgtaaccgtttgacaacaaagcctatctgccgtgaattgtcacactgcggaggccttatagaaagccacttacgcaattaaagattcaggaaatgacatcgaagggttagcagagcgcagatggcgtgaatctgtaccactgcagccaaacacttcacagcagattttgtagctattgttgttggtagagggtttccgcttctcttgtgtaactgaaagctcgtctttatttcaatcactatacctttcttgacagaaactgtatatctcttccaatgcactgtcattacttctgctgttagcctgtgatagggtgggctacaagatgctctacgttggtgcggtttgcgcaacctcagtcctccagggcatatctttattctgaaggtgatgtaacaactacatcattgaaccaatgatggttattgctacttcctgatcggatcgttcatgtgttaatgatggcagtgatcaagtcaggtaccatttaaagatttgtagcatcttttgtcaaggttatctttcttttggaatcttgatgctcgtttttttgtgtgtgtgcatattattggttgctatgctcagatctttaaacttcaatatag

SEQ ID NO: 212119 - DNA, 3840 bp, Zea Mays
gtactcgttaatatctccggcatcgtcacggcggcagccgggatcccccccggtacgagttggtcgagccgtcacgtggggccgctctggcactgccccatggcccccatcaaacactcgccccaacctcaaacagtgaacggcgccacctctccgccgccgtcagatcggagctcgactccgaaccccgcttttcagccgccatggcggcgccaccgcgccgctcgctccttgtcctcctcgcggggatcctagttttcggctccctcaccaccctcgccacagccatctacgaggaccaagtcggtctcgcggactggcaccagaagtacattggcaaagtaaagcaagcagtttaccacagccaaaagagtggaaggaggcgtgttgtagtcttgacagaggaaaatgtgatctcatctcttgatctacgttctggagatatattctggcgacatgtcattgacaagaacgaccccttggatcagcttagtctttcacttggaaaatatgttctaaccctttctttgggaggaactatattaagggcatggaatcttccagatggacatatgatctgggaaactaaccttcggatctctacagcatcaaatccacagttgcatgttatgtcaaacaataaagtggccaatgacaacttggttttagtttcagctgggcgatggatttatgctgtatcaagcactgatggggcaattttatgggaaaaggagttttctcttgatgggacttgctggttcctcaaagctagctttgtatcacttgagtgctaaaactggagagatactaaaagatatccaagagtcactccctggtggattattgggtgaaacagtacttgtttctgataatgtgttggtagcattagataaggccagatcaagtctgttagttattgaattcaagggtgagagaattagctacaacaaggtgcatgtttcagatcttgttcaagacttatcaggatcacttgagcttcaatctttgtccaatggtgtcatatctttgcaaacatcatcttctatttccctcctaaagctcaaaggtactgatggattggaagtacttcagagatttgaccagccagctgctgtcagtgattccctgacaatcacagaaaaagaagcagcttttgctgtcgtgcaacatttgggttctgaaattgagtttatcgtaaaatctacaagtgatctaagcagtgaaattattaaagaaaagcttgttatagaccaaaataggggcaatgttgagaaggtcttcttgaatagttatattcgaaccgacagatctcatggttttcgagctttggttgtaatggaggatcattcactcttgttaattcaacaaggtgaggttgtttggagcagagaggatgggctggcttcaattgttgatgtaacaacatcagaattgcctgttgagaaggatggtgtatcagttgccgatgtggaacacaatctctttgagtggcttaagggacacatgctgaaactcaaaggaagtctaatgcttgctaatgctgatgaagttgctgcaatccaagcaatgagactaaaaagctctgagaaaaataagatgacaagagaccataatggatttcgcaaactccttgttgtattgacaaaagcgggcaaagtgatggctctgcacactggagatggacgtgttatctggtcgaaattggtgccatctcttcgtgcctccagatgtggtggagtcccttctgcattaaggatataccaatggcaggtcccgcatcacagtgtcatgcgtgaaaatccatctgtacttgttgttggcaaatttggagcagaaccttcaattcctggtgtattctctattcttgattcatattctggagaagaactgaactctatgaaacttgaccattctgttgtccaaattattcccttgacactgaaggattcatcagagcaacaacttcatctgtttgttgattccgattccaatgcacatttatatccgaaatctccagatgctctcaatgtatttcttcatgaaatgtcaaacctgtatttctactctgtagatattcaggcaaatgttattaaagggtattcattacagaagtcatgtaatctcaatgtgggtgatgagtactgctttagtacgaaggagttatggttcatcatctttccttctgattctgaaaggattactatctctgaaacacgaaagatgaatgaggttgttcatacccaagctaagataagcggtgaccatgatgtgatgtacaagtacttgtcaaagaatttagtttttgttgctactttgtctcctaaagctgctgttgatattggatctgcactacctgaagaagcttcacttgttgcatatcttattgatgcagtcactggacgcatactccatcgtgtgactcatcatggtgcacaaggccctgtacatgcagttttgagcgagaactgggttgtctatcattattttaatcttcgagctcacagatttgaaatggcggtgatcgagatatatgatcaatctagggcgggcaataaagatgtcacgaagctcatactagggaagcataatcttttggcaccaattacatcttatgcccgccctgaggtggcagtaaaatcccagtcatactttttcacccattcagtaaaagcaatggcagttacacaaacggctaaggggatcacttccaagcagcttctgttgggtactattggtgaccaggttttggcacttgataagcgctatcttgatccacgccgttcagtgaacccgacacagcaagaaaaagaagagggcattataccattaacagattctttgcctataataccccagtcctttgtgacgcactctcatcaagtggaggccctgcgagccattgtttctattcctgcaaagttggagtccactattgttttcacatatggtgtcgatctattctacacccagcttgccccgtcaagaacctatgattccctaaccgacgaattcagctatgcgctgcttctaatcacgatcgcagtcctggttgccgccattattggtacatggatttggtctgagaaaaaggagttgagagacaagtggaggtgagcaaggtctcagtgttctgacgctgaggaaattttgggccctagtcagctaccttctcctcctctccccttttcattgtagtgctagagttcgtttcactttttgactaggactttatttatgtaaccgtttgacaacaaagcctatctgccgtgaattgtcacactgcggaggccttatagaaagccacttacgcaattaaagattcaggaaatgacatcgaagggttagcagagcgcagatggcgtgaatctgtaccactgcagccaaacacttcacagcagattttgtagctattgttgttggtagagggtttccgcttctcttgtgtaactgaaagctcgtctttatttcaatcactatacctttcttgacagaaactgtatatctcttccaatgcactgtcattacttctgctgttagcctgtgatagggtgggctacaagatgctctacgttggtgcggtttgcgcaacctcagtcctccagggcatatctttattctgaaggtgatgtaacaactacatcattgaaccaatgatggttattgctacttcctgatcggatcgttcatgtgttaatgatggcagtgatcaagtcaggtaccatttaaagatttgtagcatcttttgtcaaggttatctttcttttggaatcttgatgctcgtttttttgtgtgtgtgcatattattggttgctatgctcagatctttaaacttcaatatag

SEQ ID NO: 212120 - DNA, 3853 bp, Zea Mays
gttaatatctccggcatcgtcacggcggcagccgggatcccccccggtacgagttggtcgagccgtcacgtggggccgctctggcactgccccatggcccccatcaaacactcgccccaacctcaaacagtgaacggcgccacctctccgccgccgtcagatcggagctcgactccgaaccccgcttttcagccgccatggcggcgccaccgcgccgctcgctccttgtcctcctcgcggggatcctagttttcggctccctcaccaccctcgccacagccatctacgaggaccaagtcggtctcgcggactggcaccagaagtacattggcaaagtaaagcaagcagtttaccacagccaaaagagtggaaggaggcgtgttgtagtcttgacagaggaaaatgtgatctcatctcttgatctacgttctggagatatattctggcgacatgtcattgacaagaacgaccccttggatcagcttagtctttcacttggaaaatatgttctaaccctttctttgggaggaactatattaagggcatggaatcttccagatggacatatgatctgggaaactaaccttcggatctctacagcatcaaatccacagttgcatgttatgtttcagctgggcgatggatttatgctgtatcaagcactgatggggcaattttatgggaaaaggagttttctcttgatggcttagaaattaagcggattctccaatcacctgaaaatggtattgtatatgctttaggacttgctggttcctcaaagctagctttgtatcacttgagtgctaaaactggagagatactaaaagatatccaagagtcactccctggtggattattgggtgaaacagtacttgtttctgataatgtgttggtagcattagataaggccagatcaagtctgttagttattgaattcaagggtgagagaattagctacaacaaggtgcatgtttcagatcttgttcaagacttatcaggatcacttgagcttcaatctttgtccaatggtgtcatatctttgcaaacatcatcttctatttccctcctaaagctcaaaggtactgatggattggaagtacttcagagatttgaccagccagctgctgtcagtgattccctgacaatcacagaaaaagaagcagcttttgctgtcgtgcaacatttgggttctgaaattgagtttatcgtaaaatctacaagtgatctaagcagtgaaattattaaagaaaagcttgttatagaccaaaataggggcaatgttgagaaggtcttcttgaatagttatattcgaaccgacagatctcatggttttcgagctttggttgtaatggaggatcattcactcttgttaattcaacaaggtgaggttgtttggagcagagaggatgggctggcttcaattgttgatgtaacaacatcagaattgcctgttgagaaggatggtgtatcagttgccgatgtggaacacaatctctttgagtggcttaagggacacatgctgaaactcaaaggaagtctaatgcttgctaatgctgatgaagttgctgcaatccaagcaatgagactaaaaagctctgagaaaaataagatgacaagagaccataatggatttcgcaaactccttgttgtattgacaaaagcgggcaaagtgatggctctgcacactggagatggacgtgttatctggtcgaaattggtgccatctcttcgtgcctccagatgtggtggagtcccttctgcattaaggatataccaatggcaggtcccgcatcacagtgtcatgcgtgaaaatccatctgtacttgttgttggcaaatttggagcagaaccttcaattcctggtgtattctctattcttgattcatattctggagaagaactgaactctatgaaacttgaccattctgttgtccaaattattcccttgacactgaaggattcatcagagcaacaacttcatctgtttgttgattccgattccaatgcacatttatatccgaaatctccagatgctctcaatgtatttcttcatgaaatgtcaaacctgtatttctactctgtagatattcaggcaaatgttattaaagggtattcattacagaagtcatgtaatctcaatgtgggtgatgagtactgctttagtacgaaggagttatggttcatcatctttccttctgattctgaaaggattactatctctgaaacacgaaagatgaatgaggttgttcatacccaagctaagataagcggtgaccatgatgtgatgtacaagtacttgtcaaagaatttagtttttgttgctactttgtctcctaaagctgctgttgatattggatctgcactacctgaagaagcttcacttgttgcatatcttattgatgcagtcactggacgcatactccatcgtgtgactcatcatggtgcacaaggccctgtacatgcagttttgagcgagaactgggttgtctatcattattttaatcttcgagctcacagatttgaaatggcggtgatcgagatatatgatcaatctagggcgggcaataaagatgtcacgaagctcatactagggaagcataatcttttggcaccaattacatcttatgcccgccctgaggtggcagtaaaatcccagtcatactttttcacccattcagtaaaagcaatggcagttacacaaacggctaaggggatcacttccaagcagcttctgttgggtactattggtgaccaggttttggcacttgataagcgctatcttgatccacgccgttcagtgaacccgacacagcaagaaaaagaagagggcattataccattaacagattctttgcctataataccccagtcctttgtgacgcactctcatcaagtggaggccctgcgagccattgtttctattcctgcaaagttggagtccactattgttttcacatatggtgtcgatctattctacacccagcttgccccgtcaagaacctatgattccctaaccgacgaattcagctatgcgctgcttctaatcacgatcgcagtcctggttgccgccattattggtacatggatttggtctgagaaaaaggagttgagagacaagtggaggtgagcaaggtctcagtgttctgacgctgaggaaattttgggccctagtcagctaccttctcctcctctccccttttcattgtagtgctagagttcgtttcactttttgactaggactttatttatgtaaccgtttgacaacaaagcctatctgccgtgaattgtcacactgcggaggccttatagaaagccacttacgcaattaaagattcaggaaatgacatcgaagggttagcagagcgcagatggcgtgaatctgtaccactgcagccaaacacttcacagcagattttgtagctattgttgttggtagagggtttccgcttctcttgtgtaactgaaagctcgtctttatttcaatcactatacctttcttgacagaaactgtatatctcttccaatgcactgtcattacttctgctgttagcctgtgatagggtgggctacaagatgctctacgttggtgcggtttgcgcaacctcagtcctccagggcatatctttattctgaaggtgatgtaacaactacatcattgaaccaatgatggttattgctacttcctgatcggatcgttcatgtgttaatgatggcagtgatcaagtcaggtaccatttaaagatttgtagcatcttttgtcaaggttatctttcttttggaatcttgatgctcgtttttttgtgtgtgtgcatattattggttgctatgctcagatctttaaacttcaatatag

SEQ ID NO: 212121 - DNA, 3870 bp, Zea Mays
ccggcatcgtcacggcggcagccgggatcccccccggtacgagttggtcgagccgtcacgtggggccgctctggcactgccccatggcccccatcaaacactcgccccaacctcaaacagtgaacggcgccacctctccgccgccgtcagatcggagctcgactccgaaccccgcttttcagccgccatggcggcgccaccgcgccgctcgctccttgtcctcctcgcggggatcctagttttcggctccctcaccaccctcgccacagccatctacgaggaccaagtcggtctcgcggactggcaccagaagtacattggcaaagtaaagcaagcagtttaccacagccaaaagagtggaaggaggcgtgttgtagtcttgacagaggaaaatgtgatctcatctcttgatctacgttctggagatatattctggcgacatgtcattgacaagaacgaccccttggatcagcttagtctttcacttggaaaatatgttctaaccctttctttgggaggaactatattaagggcatggaatcttccagatggacatatgatctgggaaactaaccttcggatctctacagcatcaaatccacagttgcatgttatgtcaaacaataaagtggccaatgacaacttggttttagtttcagctgggcgatggatttatgctgtatcaagcactgatggggcaattttatgggaaaaggagttttctcttgatggcttagaaattaagcggattctccaatcacctgaaaatggtattgtatatgctttaggacttgctggttcctcaaagctagctttgtatcacttgagtgctaaaactggagagatactaaaagatatccaagagtcactccctggtggattattgggtgaaacagtacttgtttctgataatgtgttggtagcattagataaggccagatcaagtctgttagttattgaattcaagggtgagagaattagctacaacaaggtgcatgtttcagatcttgttcaagacttatcaggatcacttgagcttcaatctttgtccaatggtgtcatatctttgcaaacatcatcttctatttccctcctaaagctcaaaggtactgatggattggaagtacttcagagatttgaccagccagctgctgtcagtgattccctgacaatcacagaaaaagaagcagcttttgctgtcgtgcaacatttgggttctgaaattgagtttatcgtaaaatctacaagtgatctaagcagtgaaattattaaagaaaagcttgttatagaccaaaataggggcaatgttgagaaggtcttcttgaatagttatattcgaaccgacagatctcatggttttcgagctttggttgtaatggaggatcattcactcttgttaattcaacaaggtgaggttgtttggagcagagaggatgggctggcttcaattgttgatgtaacaacatcagaattgcctgttgagaaggatggtgtatcagttgccgatgtggaacacaatctctttgagtggcttaagggacacatgctgaaactcaaaggaagtctaatgcttgctaatgctgatgaagttgctgcaatccaagcaatgagactaaaaagctctgagaaaaataagatgacaagagaccataatggatttcgcaaactccttgttgtattgacaaaagcgggcaaagtgatggctctgcacactggagatggacgtgttatctggtcgaaattggtgccatctcttcgtgcctccagatgtggtggagtcccttctgcattaaggatataccaatggcaggtcccgcatcacagtgtcatgcgtgaaaatccatctgtacttgttgttggcaaatttggagcagaaccttcaattcctggtgtattctctattcttgattcatattctggagaagaactgaactctatgaaacttgaccattctgttgtccaaattattcccttgacactgaaggattcatcagagcaacaacttcatctgtttgttgattccgattccaatgcacatttatatccgaaatctccagatgctctcaatgtatttcttcatgaaatgtcaaacctgtatttctactctgtagatattcaggcaaatgttattaaagggtattcattacagaagtcatgtaatctcaatgtgggtgatgagtactgctttagtacgaaggagttatggttcatcatctttccttctgattctgaaaggattactatctctgaaacacgaaagatgaatgaggttgttcatacccaagctaagataagcggtgaccatgatgtgatgtacaagtacttgtcaaagaatttagtttttgttgctactttgtctcctaaagctgctgttgatattggatctgcactacctgaagaagcttcacttgttgcatatcttattgatgcagtcactggacgcatactccatcgtgtgactcatcatggtgcacaaggccctgtacatgcagttttgagcgagaactgggttgtctatcattattttaatcttcgagctcacagatttgaaatggcggtgatcgagatatatgatcaatctagggcgatgtcacgaagctcatactagggaagcataatcttttggcaccaattacatcttatgcccgccctgaggtggcagtaaaatcccagtcatactttttcacccattcagtaaaagcaatggcagttacacaaacggctaaggggatcacttccaagcagcttctgttgggtactattggtgaccaggttttggcacttgataagcgctatcttgatccacgccgttcagtgaacccgacacagcaagaaaaagaagagggcattataccattaacagattctttgcctataataccccagtcctttgtgacgcactctcatcaagtggaggccctgcgagccattgtttctattcctgcaaagttggagtccactattgttttcacatatggtgtcgatctattctacacccagcttgccccgtcaagaacctatgattccctaaccgacgaattcagctatgcgctgcttctaatcacgatcgcagtcctggttgccgccattattggtacatggatttggtctgagaaaaaggagttgagagacaagtggaggtgagcaaggtctcagtgttctgacgctgaggaaattttgggccctagtcagctaccttctcctcctctccccttttcattgtagtgctagagttcgtttcactttttgactaggactttatttatgtaaccgtttgacaacaaagcctatctgccgtgaattgtcacactgcggaggccttatagaaagccacttacgcaattaaagattcaggaaatgacatcgaagggttagcagagcgcagatggcgtgaatctgtaccactgcagccaaacacttcacagcagattttgtagctattgttgttggtagagggtttccgcttctcttgtgtaactgaaagctcgtctttatttcaatcactatacctttcttgacagaaactgtatatctcttccaatgcactgtcattacttctgctgttagcctgtgatagggtgggctacaagatgctctacgttggtgcggtttgcgcaacctcagtcctccagggcatatctttattctgaaggtgatgtaacaactacatcattgaaccaatgatggttattgctacttcctgatcggatcgttcatgtgttaatgatggcagtgatcaagtcaggtaccatttaaagatttgtagcatcttttgtcaaggttatctttcttttggaatcttgatgctcgtttttttgtgtgtgtgcatattattggttgctatgctcagatctttaaacttcaatatag

SEQ ID NO: 212122 - DNA, 3586 bp, Zea Mays
cgggatcccccccggtacgagttggtcgagccgtcacgtggggccgctctggcactgccccatggcccccatcaaacactcgccccaacctcaaacagtgaacggcgccacctctccgccgccgtcagatcggagctcgactccgaaccccgcttttcagccgccatggcggcgccaccgcgccgctcgctccttgtcctcctcgcggggatcctagttttcggctccctcaccaccctcgccacagccatctacgaggaccaagtcggtctcgcggactggcaccagaagtacattggcaaagtaaagcaagcagtttaccacagccaaaagagtggaaggaggcgtgttgtagtcttgacagaggaaaatgtgatctcatctcttgatctacgttctggagatatattctggcgacatgtcattgacaagaacgaccccttggatcagcttagtctttcacttggaaaatatgttctaaccctttctttgggaggaactatattaagggcatggaatcttccagatggacatatgatctgggaaactaaccttcggatctctacagcatcaaatccacagttgcatgttatgtcaaacaataaagtggccaatgacaacttggttttagtttcagctgggcgatggatttatgctgtatcaagcactgatggggcaattttatgggaaaaggagttttctcttgatggatcttgttcaagacttatcaggatcacttgagcttcaatctttgtccaatggtgtcatatctttgcaaacatcatcttctatttccctcctaaagctcaaaggtactgatggattggaagtacttcagagatttgaccagccagctgctgtcagtgattccctgacaatcacagaaaaagaagcagcttttgctgtcgtgcaacatttgggttctgaaattgagtttatcgtaaaatctacaagtgatctaagcagtgaaattattaaagaaaagcttgttatagaccaaaataggggcaatgttgagaaggtcttcttgaatagttatattcgaaccgacagatctcatggttttcgagctttggttgtaatggaggatcattcactcttgttaattcaacaaggtgaggttgtttggagcagagaggatgggctggcttcaattgttgatgtaacaacatcagaattgcctgttgagaaggatggtgtatcagttgccgatgtggaacacaatctctttgagtggcttaagggacacatgctgaaactcaaaggaagtctaatgcttgctaatgctgatgaagttgctgcaatccaagcaatgagactaaaaagctctgagaaaaataagatgacaagagaccataatggatttcgcaaactccttgttgtattgacaaaagcgggcaaagtgatggctctgcacactggagatggacgtgttatctggtcgaaattggtgccatctcttcgtgcctccagatgtggtggagtcccttctgcattaaggatataccaatggcaggtcccgcatcacagtgtcatgcgtgaaaatccatctgtacttgttgttggcaaatttggagcagaaccttcaattcctggtgtattctctattcttgattcatattctggagaagaactgaactctatgaaacttgaccattctgttgtccaaattattcccttgacactgaaggattcatcagagcaacaacttcatctgtttgttgattccgattccaatgcacatttatatccgaaatctccagatgctctcaatgtatttcttcatgaaatgtcaaacctgtatttctactctgtagatattcaggcaaatgttattaaagggtattcattacagaagtcatgtaatctcaatgtgggtgatgagtactgctttagtacgaaggagttatggttcatcatctttccttctgattctgaaaggattactatctctgaaacacgaaagatgaatgaggttgttcatacccaagctaagataagcggtgaccatgatgtgatgtacaagtacttgtcaaagaatttagtttttgttgctactttgtctcctaaagctgctgttgatattggatctgcactacctgaagaagcttcacttgttgcatatcttattgatgcagtcactggacgcatactccatcgtgtgactcatcatggtgcacaaggccctgtacatgcagttttgagcgagaactgggttgtctatcattattttaatcttcgagctcacagatttgaaatggcggtgatcgagatatatgatcaatctagggcgggcaataaagatgtcacgaagctcatactagggaagcataatcttttggcaccaattacatcttatgcccgccctgaggtggcagtaaaatcccagtcatactttttcacccattcagtaaaagcaatggcagttacacaaacggctaaggggatcacttccaagcagcttctgttgggtactattggtgaccaggttttggcacttgataagcgctatcttgatccacgccgttcagtgaacccgacacagcaagaaaaagaagagggcattataccattaacagattctttgcctataataccccagtcctttgtgacgcactctcatcaagtggaggccctgcgagccattgtttctattcctgcaaagttggagtccactattgttttcacatatggtgtcgatctattctacacccagcttgccccgtcaagaacctatgattccctaaccgacgaattcagctatgcgctgcttctaatcacgatcgcagtcctggttgccgccattattggtacatggatttggtctgagaaaaaggagttgagagacaagtggaggtgagcaaggtctcagtgttctgacgctgaggaaattttgggccctagtcagctaccttctcctcctctccccttttcattgtagtgctagagttcgtttcactttttgactaggactttatttatgtaaccgtttgacaacaaagcctatctgccgtgaattgtcacactgcggaggccttatagaaagccacttacgcaattaaagattcaggaaatgacatcgaagggttagcagagcgcagatggcgtgaatctgtaccactgcagccaaacacttcacagcagattttgtagctattgttgttggtagagggtttccgcttctcttgtgtaactgaaagctcgtctttatttcaatcactatacctttcttgacagaaactgtatatctcttccaatgcactgtcattacttctgctgttagcctgtgatagggtgggctacaagatgctctacgttggtgcggtttgcgcaacctcagtcctccagggcatatctttattctgaaggtgatgtaacaactacatcattgaaccaatgatggttattgctacttcctgatcggatcgttcatgtgttaatgatggcagtgatcaagtcaggtaccatttaaagatttgtagcatcttttgtcaaggttatctttcttttggaatcttgatgctcgtttttttgtgtgtgtgcatattattggttgctatgctcagatctttaaacttcaatatag

SEQ ID NO: 212123 - DNA, 3274 bp, Zea Mays
cccggtacgagttggtcgagccgtcacgtggggccgctctggcactgccccatggcccccatcaaacactcgccccaacctcaaacagtgaacggcgccacctctccgccgccgtcagatcggagctcgactccgaaccccgcttttcagccgccatggcggcgccaccgcgccgctcgctccttgtcctcctcgcggggatcctagttttcggctccctcaccaccctcgccacagccatctacgaggaccaagtcggtctcgcggactggcaccagaagtacattggcaaagtaaagcaagcagtttaccacagccaaaagagtggaaggaggcgtgttgtagtcttgacagaggaaaatgtgatctcatctcttgatctacgttctggagatatattctggcgacatgtcattgacaagaacgaccccttggatcagcttagtctttcacttggaaaatatgttctaaccctttctttgggaggaactatattaagggcatggaatcttccagatggacatatgatctgggaaactaaccttcggatctctacagcatcaaatccacagttgcatgttatgtcaaacaataaagtggccaatgacaacttggttttagtttcagctgggcgatggatttatgctgtatcaagcactgatggggcaattttatgggaaaaggagttttctcttgatggcttagaaattaagcggattctccaatcacctgaaaatggtattgtatatgctttaggacttgctggttcctcaaagctagctttgtatcacttgagtgctaaaactggagagatactaaaagatatccaagagtcactccctggtggattattgggtgaaacagtacttgtttctgataatgtgttggtagcattagataaggccagatcaagtctgttagttattgaattcaagggtgagagaattagctacaacaaggtgcatgtttcagatcttgttcaagacttatcaggatcacttgagcttcaatctttgtccaatggtgtcatatctttgcaaacatcatcttctatttccctcctaaagctcaaaggtactgatggattggaagtacttcagagatttgaccagccagctgctgtcagtgattccctgacaatcacagaaaaagaagcagcttttgctgtcgtgcaacatttgggttctgaaattgagtttatcgtaaaatctacaagtgatctaagcagtgaaattattaaagaaaagcttgttatagaccaaaataggggcaatgttgagaaggtcttcttgaatagttatattcgaaccgacagatctcatggttttcgagctttggttgtaatggaggatcattcactcttgttaattcaacaaggtgaggttgtttggagcagagaggatgggctggcttcaattgttgatgtaacaacatcagaattgcctgttgagaaggatggtgtatcagttgccgatgtggaacacaatctctttgagtggcttaagatattcaggcaaatgttattaaagggtattcattacagaagtcatgtaatctcaatgtgggtgatgagtactgctttagtacgaaggagttatggttcatcatctttccttctgattctgaaaggattactatctctgaaacacgaaagatgaatgaggttgttcatacccaagctaagataagcggtgaccatgatgtgatgtacaagtacttgtcaaagaatttagtttttgttgctactttgtctcctaaagctgctgttgatattggatctgcactacctgaagaagcttcacttgttgcatatcttattgatgcagtcactggacgcatactccatcgtgtgactcatcatggtgcacaaggccctgtacatgcagttttgagcgagaactgggttgtctatcattattttaatcttcgagctcacagatttgaaatggcggtgatcgagatatatgatcaatctagggcgggcaataaagatgtcacgaagctcatactagggaagcataatcttttggcaccaattacatcttatgcccgccctgaggtggcagtaaaatcccagtcatactttttcacccattcagtaaaagcaatggcagttacacaaacggctaaggggatcacttccaagcagcttctgttgggtactattggtgaccaggttttggcacttgataagcgctatcttgatccacgccgttcagtgaacccgacacagcaagaaaaagaagagggcattataccattaacagattctttgcctataataccccagtcctttgtgacgcactctcatcaagtggaggccctgcgagccattgtttctattcctgcaaagttggagtccactattgttttcacatatggtgtcgatctattctacacccagcttgccccgtcaagaacctatgattccctaaccgacgaattcagctatgcgctgcttctaatcacgatcgcagtcctggttgccgccattattggtacatggatttggtctgagaaaaaggagttgagagacaagtggaggtgagcaaggtctcagtgttctgacgctgaggaaattttgggccctagtcagctaccttctcctcctctccccttttcattgtagtgctagagttcgtttcactttttgactaggactttatttatgtaaccgtttgacaacaaagcctatctgccgtgaattgtcacactgcggaggccttatagaaagccacttacgcaattaaagattcaggaaatgacatcgaagggttagcagagcgcagatggcgtgaatctgtaccactgcagccaaacacttcacagcagattttgtagctattgttgttggtagagggtttccgcttctcttgtgtaactgaaagctcgtctttatttcaatcactatacctttcttgacagaaactgtatatctcttccaatgcactgtcattacttctgctgttagcctgtgatagggtgggctacaagatgctctacgttggtgcggtttgcgcaacctcagtcctccagggcatatctttattctgaaggtgatgtaacaactacatcattgaaccaatgatggttattgctacttcctgatcggatcgttcatgtgttaatgatggcagtgatcaagtcaggtaccatttaaagatttgtagcatcttttgtcaaggttatctttcttttggaatcttgatgctcgtttttttgtgtgtgtgcatattattggttgctatgctcagatctttaaacttcaatatag

SEQ ID NO: 212124 - DNA, 3888 bp, Zea Mays
gcactgccccatggcccccatcaaacactcgccccaacctcaaacagtgaacggcgccacctctccgccgccgtcagatcggagctcgactccgaaccccgcttttcagccgccatggcggcgccaccgcgccgctcgctccttgtcctcctcgcggggatcctagttttcggctccctcaccaccctcgccacagccatctacgaggaccaagtcggtctcgcggactggcaccagaagtacattggcaaagtaaagcaagcagtttaccacagccaaaagagtggaaggaggcgtgttgtagtcttgacagaggaaaatgtgatctcatctcttgatctacgttctggagatatattctggcgacatgtcattgacaagaacgaccccttggatcagcttagtctttcacttggaaaatatgttctaaccctttctttgggaggaactatattaagggcatggaatcttccagatggacatatgatctgggaaactaaccttcggatctctacagcatcaaatccacagttgcatgttatgtcaaacaataaagtggccaatgacaacttggttttagtttcagctgggcgatggatttatgctgtatcaagcactgatggggcaattttatgggaaaaggagttttctcttgatggcttagaaattaagcggattctccaatcacctgaaaatggtattgtatatgctttaggacttgctggttcctcaaagctagctttgtatcacttgagtgctaaaactggagagatactaaaagatatccaagagtcactccctggtggattattgggtgaaacagtacttgtttctgataatgtgttggtagcattagataaggccagatcaagtctgttagttattgaattcaagggtgagagaattagctacaacaaggtgcatgtttcagatcttgttcaagacttatcaggatcacttgagcttcaatctttgtccaatggtgtcatatctttgcaaacatcatcttctatttccctcctaaagctcaaaggtactgatggattggaagtacttcagagatttgaccagccagctgctgtcagtgattccctgacaatcacagaaaaagaagcagcttttgctgtcgtgcaacatttgggttctgaaattgagtttatcgtaaaatctacaagtgatctaagcagtgaaattattaaagaaaagcttgttatagaccaaaataggggcaatgttgagaaggtcttcttgaatagttatattcgaaccgacagatctcatggttttcgagctttggttgtaatggaggatcattcactcttgttaattcaacaaggtgaggttgtttggagcagagaggatgggctggcttcaattgttgatgtaacaacatcagaattgcctgttgagaaggatggtgtatcagttgccgatgtggaacacaatctctttgagtggcttaaggtgatacaaagttattcattcataaaaccggtgacaacattagcatatgatccccacttgtggagtttggttcttacatagggacacatgctgaaactcaaaggaagtctaatgcttgctaatgctgatgaagttgctgcaatccaagcaatgagactaaaaagctctgagaaaaataagatgacaagagaccataatggatttcgcaaactccttgttgtattgacaaaagcgggcaaagtgatggctctgcacactggagatggacgtgttatctggtcgaaattggtgccatctcttcgtgcctccagatgtggtggagtcccttctgcattaaggatataccaatggcaggtcccgcatcacagtgtcatgcgtgaaaatccatctgtacttgttgttggcaaatttggagcagaaccttcaattcctggtgtattctctattcttgattcatattctggagaagaactgaactctatgaaacttgaccattctgttgtccaaattattcccttgacactgaaggattcatcagagcaacaacttcatctgtttgttgattccgattccaatgcacatttatatccgaaatctccagatgctctcaatgtatttcttcatgaaatgtcaaacctgtatttctactctgtagatattcaggcaaatgttattaaagggtattcattacagaagtcatgtaatctcaatgtgggtgatgagtactgctttagtacgaaggagttatggttcatcatctttccttctgattctgaaaggattactatctctgaaacacgaaagatgaatgaggttgttcatacccaagctaagataagcggtgaccatgatgtgatgtacaagtacttgtcaaagaatttagtttttgttgctactttgtctcctaaagctgctgttgatattggatctgcactacctgaagaagcttcacttgttgcatatcttattgatgcagtcactggacgcatactccatcgtgtgactcatcatggtgcacaaggccctgtacatgcagttttgagcgagaactgggttgtctatcattattttaatcttcgagctcacagatttgaaatggcggtgatcgagatatatgatcaatctagggcgggcaataaagatgtcacgaagctcatactagggaagcataatcttttggcaccaattacatcttatgcccgccctgaggtggcagtaaaatcccagtcatactttttcacccattcagtaaaagcaatggcagttacacaaacggctaaggggatcacttccaagcagcttctgttgggtactattggtgaccaggttttggcacttgataagcgctatcttgatccacgccgttcagtgaacccgacacagcaagaaaaagaagagggcattataccattaacagattctttgcctataataccccagtcctttgtgacgcactctcatcaagtggaggccctgcgagccattgtttctattcctgcaaagttggagtccactattgttttcacatatggtgtcgatctattctacacccagcttgccccgtcaagaacctatgattccctaaccgacgaattcagctatgcgctgcttctaatcacgatcgcagtcctggttgccgccattattggtacatggatttggtctgagaaaaaggagttgagagacaagtggaggtgagcaaggtctcagtgttctgacgctgaggaaattttgggccctagtcagctaccttctcctcctctccccttttcattgtagtgctagagttcgtttcactttttgactaggactttatttatgtaaccgtttgacaacaaagcctatctgccgtgaattgtcacactgcggaggccttatagaaagccacttacgcaattaaagattcaggaaatgacatcgaagggttagcagagcgcagatggcgtgaatctgtaccactgcagccaaacacttcacagcagattttgtagctattgttgttggtagagggtttccgcttctcttgtgtaactgaaagctcgtctttatttcaatcactatacctttcttgacagaaactgtatatctcttccaatgcactgtcattacttctgctgttagcctgtgatagggtgggctacaagatgctctacgttggtgcggtttgcgcaacctcagtcctccagggcatatctttattctgaaggtgatgtaacaactacatcattgaaccaatgatggttattgctacttcctgatcggatcgttcatgtgttaatgatggcagtgatcaagtcaggtaccatttaaagatttgtagcatcttttgtcaaggttatctttcttttggaatcttgatgctcgtttttttgtgtgtgtgcatattattggttgctatgctcagatctttaaacttcaatatag

SEQ ID NO: 212125 - DNA, 1414 bp, Zea Mays
ctttttagaattttaagaaaagaaacaatcaatttggaaatccgatgtcgggtcaaatacttgctgcttactttttgaatagtttccattctaacgttgttttggtcataaaatggcaaggggcacaaataggatagtttcttctactttgttttactacattttctgtgagtaccagttttataaaaaaaacttgacctgcggggggtaagacagcccccgggtattgtattaagaataagaccttctcacacaggtcaagaaaacccccgaacccctgccccacacatacacagcggcatcgaagctcatgtgagaacgaccacgaccagggctgagccttagacctatgctttggcgtggaacagacgagaggatttttttaaccacagcctggaaattcgctcccacggggagtcgaactcaggacctgaggagtgctactcagaccacctaaccaactcagctagaggccctttcgcgagtaccagttttatcatatttctctaattctctttatgtttcaggaatggtggcagctttaacaaacgagagtgcaacaagcaaatctgtatattttgctcattgcacgtcagagatgatattcattactcatttgctgacagagcaacctgagaaactcgctggtcctctgctggctgacacgtatgtaactctcttaaaaggtcgcaatgcatggtatgggcaaatgcttgccaagggagagttgagtcctgacatgggtgatagtatcaaggggaagggaatgattcagggtatctctgcagttggtgcattttttgagctgcttagtcaacccagcttaagtgtgcagcacccagaagaaaacaagcaggttgctccagctgagctatgcccaatcctgaagaggctttacagaatactgataaaaagacctgacttatgtgcagggagctcccagcaagggacattcttcaagccctgagggacgaaacgatgaatgatcctcgggaaaggattgagatggcacaaagccatgcattctaccgcccgtctctccttggaaaaccatgatctagttagtcttgtagattagtagaatataaacggacgctgtgctgcaggtttctccactgtgcttgctgtccttgtgtccgagctacatggggatggggctttgtcagttgtcgaattctttgtgcttcctcgttgccatggtgtacaagagattactgaaccaataaatgttctaagtgcatattatatgaacacccaatttgaaagtacccgaggaagatttcttatgcatggatttgtttggtccaacgtcatatgctagtttgggtggcaacatctatattctcatgattgtagattattattcaaggtatacttaggttttcttacttcaaaacaagactaaagttgcatc

SEQ ID NO: 212126 - DNA, 7514 bp, Zea Mays
cggaaggcttggccgcaggcgacggcgtctgagatcaccaaggtggagcgtgttggtaaccaggggcaaccaacggagaagcttattgttgactcaacccgtcacacttcgccaatggacagagtagcgactctgaagagctatcgccgtgcccgtgggttatgtgaccgatgcgcagaaaagtggactccaggtcacaaatgtgcaaccacagttcagctccatgctattgaagaggtatgggatcttcttactttggatgaccaggagaatacagaacctgtgagcagtctgaacaagtggttatggcgttatcactatcttcagcagcctgggagggcagtaacagattggtgacgatgagattatctggaacgattcagcaacaggacctggttattcttattgattcgggatcgtcacactcgttcctctttgatcgtcttcgaccactgctagctggtgtccaggaacttgctcagccgttctcagttcaggtggccaacgggcagactctttcttctcaatattatattcctgcagcacagtggtctatggctggttattggtttacagctgatcttcgttttttgccgttaccagctttggatttagtggtgggcatggactggttgcaacggtttagtcctatgcatgtcgattgggcaaacaagtggttggtaattccatacaatggatcgtcagtgtgcttacaaggacttcagtcatcttttccttctggttctgtggtgcagttgctgctatcagctgagatacagctcaattcagttcaagaagagtctcagttggaggtacatcccaaggttcaagcggttcttcaacaattttcagatgtgtttgctgatcctgtgggtttacctcccagccgacagtgtgaccatgctattccattggtccctggtgctcaccctttcaatgtcaagccctatcgttatccaccggctctcaaggatgaaatagagacacaagtacgtgacatgctgtcgcagggagtcatccaaaagagccacagtctgtttgcatcgccagtattgctggtcaagaagaaagatcaaacgtggcgcttctgtattgattaccgctatctcaacgctataacagtgaagagctcgtatcctgttccaatctttgatcagctgatggatgaactgtcctctgcacaatggtttagcaagcttgatctgaaagcgggttaccatcaaatctgtctagtaccaggagaagaaccaaagacggccttccaaacacatttgggtcatttcgagtttcgagtaatggcttttggcttgactggagctcccaacacttttctgggtgccatgaatgatacactggcaccagtattgcgtcgttgtgccctcgtgttcttcgatgacatacttatttacagtcctacatttgagtcccacttgcaacatttatccgaggtcctcactttgttgaagcaagatcactggaagatcaagttgtccaaatgtgcttttgcccagaccactattgcttatctcggtcatataatcagtgctcacggtgtggcgactgacccagctaagttgcaaattattcagcagtggtcagccccaacaaatactaaggagctacgcagttttctcggtttggctggtttttaccgtaaattcgtacgacatttcagcatcatcgccaaacctctgacggacttactcaagaaaaattccctgttcgtttggacatcagatcatcagtcagcatttgagaccctcatgcaggctttaatatctgctccagtgctggctcttccagacttcaaccaaccattctgcatttatacagatgcctgcagtacaggcgtaggtgcggtcctgatgcaaaaggggcacccgttggcgttcttgagcaaggctctgggtcccaaaaaccaaggcttgtcgacatacgagaaggaatatcttgcaattgtgattgctatagcacagtggcgctcataccttcagttggcagaattccatatttatacggatcaccaaagcttggctcagttaaacgaacaacgtctccacactgtttggcaacaaaaggtatacaccaagctggccggccttcaatacaagattgtttacaaaaaagggtgtgacaacgctgccgcagacgcactgtccaggtactcacatcagccggaccaattgctgcatatttctcactgtacgccaacttgggttcaggaaatcgtggagggttatcaacatgaccagcaggcacagagtttgttatcgcagttggcccttgatccgtcggcactagctgcaacatacactcttaaagatggcttgattcgacataagggacgtctatggttaggcaagaatgaggtgttacaacaaaaggtcatcgccgccttccacgactcagctttggggggtcactcgggtgtgcctgtcacttatcgacgagtgaagcaattattttcatggaagggcatgaagaagacagttcaccagtttgtgcagtcatgtcccatatgccagcaagcgaagccggatcgtgctaaatacccaggtctgcttgctcctctacccattccaccgcacgcctggcattcaatttctatggatttcatagaaggcctaccgaaatcgggatcctggaactgcattctagtggtggtcgaccgtttctcaaaatatagtcattttctggcccttgctcatccattcacagccgcgggggtggccaaggttttcttggacaatatttataagcttcacggtatgccagcaagtattgtgtcggatcgagatcgaatcttcacaagtcaattctggcagcagctgtttacattgactagaacacagctttgcatgagctcggcttaccatccccagtctgatggtcaaactgagcgagtaaaccaatgtattgaaacttatctcaggtgttttgtccatgcttgtcccaagaaatgctgtcactggctgtcagtcgcggaattttggtataacaccaactaccattcggcaattgggcgttcaccctttgaggttctatatggtcatgcagctcgccattttggtattgattcagtctcgtccgtcgcagtggaggacctcagacagtggttgacggacagagaaatcatatccaagttgattcaccagcatttgactcgagctcagtcccgcatgaaaaaacaggctgacaagaaacgttcggagcgatcattccagttcgctcgaatcaaaagctcgcatttcgattcttcggcccttacacagtgctgcaacgggtgggcaccgtggcgtacaagcttcagttaccggagacctcttctatacatccaatatttcatgtttcccaactaaaagcttcaatcggccgtcagcattcagtggttcctcagttacctgatgctaatcctagttttcaagtgcctgtccaggttctggctcaccgcattattcagcgaggaggagctctgattccacaaatcaaagtggtgtggtcaggttgggatcccgccttagcgatatgggaggacgctgaggccctgaaagctgcgtttccgaacgcgccggcttggggacaagccgcttccaaaggagaggggactgtcagcacctctgtggaggaggaggctgtggaagagacggaagtggaacaggcagcactcggcggcaaacgcactcgacgcaccaacgtttgtgtgatgagcccagaatgggctgtgtaatcctagtctcttgtaattcagggccagcccatgtgacggtataatacctagtctgtggtttctgaagaggcatgcaaaacttaaacaaactcatacgcaataacatccgtcgccttctgcctcctgttcactgttcttctctaatctctgattcttcttccacttctgatctctgagcataacagtaggccgttcgagttgcgaccatacaggctcgcggaaaatcgtggacagcgatacttgcggatgttgctcgcctgtcccagtcctgcatgtgcacgtatgtgccagtgtcaacgaagacagcgatcaactcgatctgttgcctgtttcgtgatagcatcccccatatccctccccatcgagtactcatcccccatctctgtcgtcgtcgctggcgcatcggtgtcgatcgcagcagttcgcttcatcactcaaaaatccatcttcgtcaataaccagttcgggaagctgcgagcgaagcactgaagcagatgcttgtcttgtcttgtcccggccctctcatcctcctcccccactccactacggcactcccggccctcgctcgcttgctcattaatggcgggcactgcatggttggcgccatccatgcccattaacgcctccacccacctccgggccgcccccgcccccatctacttttattcacgccgatcgggcacttgcttccaatacagcgccggccgggccgttgcgtccgtccatcctcatccccatccgccacccaccccgcgcccctccttctcactccagtgctggctgccggccagctccgcccccggggtccttgagctggaggtggcggtggatgaccagctctcggagttttctgaggcgaggatcggagggcgttgcgttaggtccgcggttggtgagcggcggtcggagcggtctcgcgcgcggcggggtcgttcgatgacgcaggaatcgcgctctgggagggtgggaatacctcgcgctcgcgctcaaggtgctcgattaatttactgcctgaggctgagggggggcgcgcctgtgagctgaaccgttcccgctgcactgactcctgagctcgggaaatggttgggagcgtgcacgtcaatggatcggtccacggcggcaatggcacggccacggaggagcggctggacgagctgcgccggctgctcggcaagtcggagggggaccttctcaagatcgtcagcgtcggcgccggcgcgtggggcagcgtcttcgccgcgctactacaggacgcgtacggccatttccgggacaaggtgcagataaggatctggcgtcgcccgggccggacggtggaccgctccaccgcggagcacctgttcgaggtgatcaactccagggaggacgtgctcaggcgcctcatccgccgctgcgcctacctcaagtacgtcgaggcgcggctcggagaccgcacgctgtatgccgacgagatactcaaggacggcttctgcctgaacatgatcgagacgccgctctgccctctcaaggtcgtcactaacctgcaggaggccgtctgggatgccgacatcgtcgtgaatggggtgccgtccaccgagacgagggaggtgtttgatgagatcagcgagtattggaaggagaggattagtgtcccggtgataatttccctcgccaagggaattgaggcctcgttggatccaatacctcgtatcattacacctactcaaatgattagctctgcaactggagttccaactgaaaatatactctatcttggaggaccaaacatcgcctcggaaatttataacaaagaatatgcaaacgctcgaatctgtggatccaacaagtggaggaagcctcttgctaagtttttgaggcagccacatttcattgtctgggacaacagtgatcttgtcacccatgaggtgatgggtggcctgaagaatgtctatgcaatcggtgctggtaatactaacttctgtctttttttaactgacaatattattgtacaataggcatcctactacttgatgttgaagaaaacataacaaacatgtaaatgtttttctttgcttaagttttagttgatcccttaatggtcgtccattgggctgtcactgactctctttgcctgaatagagtatgggtggatcggagtacactaaaatcagaagggctttttagaattttaagaaaagaaacaatcaatttggaaatccgatgtcgggtcaaatacttgctgcttactttttgaatagtttccattctaacgttgttttggtcataaaatggcaaggggcacaaataggatagtttcttctactttgttttactacattttctgtgagtaccagttttataaaaaaaacttgacctgcggggggtaagacagcccccgggtattgtattaagaataagaccttctcacacaggtcaagaaaacccccgaacccctgccccacacatacacagcggcatcgaagctcatgtgagaacgaccacgaccagggctgagccttagacctatgctttggcgtggaacagacgagaggatttttttaaccacagcctggaaattcgctcccacggggagtcgaactcaggacctgaggagtgctactcagaccacctaaccaactcagctagaggccctttcgcgagtaccagttttatcatatttctctaattctctttatgtttcaggaatggtggcagctttaacaaacgagagtgcaacaagcaaatctgtatattttgctcattgcacgtcagagatgatattcattactcatttgctgacagagcaacctgagaaactcgctggtcctctgctggctgacacgtatgtaactctcttaaaaggtcgcaatgcatggtatgggcaaatgcttgccaagggagagttgagtcctgacatgggtgatagtatcaaggggaagggaatgattcaggtaatggaatgacttttttctttccattttgtcttgttttattctgagaagatgtcaaagctattatagtactacatccgttctcgaatatttgtcgcccgctagttcatttttgaactaaaccacgacaaataaaaaagaatggagtgagtatttgataaccctgacatttgcagccatccaattttgcttttttacacggttaccatgatcattttaccattccattggacagggtatctctgcagttggtgcattttttgagctgcttagtcaacccagcttaagtgtgcagcacccagaagaaaacaagcaggttgctccagctgagctatgcccaatcctgaagaggctttacagaatactgataaaaagggagctcccagcaagggacattcttcaagccctgagggacgaaacgatgaatgatcctcgggaaaggattgagatggcacaaagccatgcattctaccgcccgtctctccttggaaaaccatgatctagttagtcttgtagattagtagaatataaacggacgctgtgctgcaggtttctccactgtgcttgctgtccttgtgtccgagctacatggggatggggctttgtcagttgtcgaattctttgtgcttcctcgttgccatggtgtacaagagattactgaaccaataaatgttctaagtgcatattatatgaacacccaatttgaaagtacccgaggaagatttcttatgcatggatttgtttggtccaacgtcatatgctagtttgggtggcaacatctatattctcatgattgtagattattattcaaggtatacttaggttttcttacttcaaaacaagactaaagttgcatc

SEQ ID NO: 212127 - DNA, 2264 bp, Zea Mays
cttgaaactaggattgggttaaaattggaaccgagtttagtgccatggatgaatgagtgtttcacattgttatcgcgtcaaaacggaaataagaggaggggattaagctaatgccttgtcatcactgggtggcaaactgtcgtattttcattgatgcggtgttttctttcccgtcaggtacttccagccgtgtgggcccggggcagtttggttggtggacgtgaagctacccacgcttccaccagccccaattggcgaggccacaccacaccacaccactcctccgtccagcctctccccctctcctctcctctcctcccaaaacaagagcagcgagacgcgcgcgcgcgcgccacgagctggtggaacctcgccgcctcccgcggcagatctcgcgccgagccctggtttcgacgcgagatccgcgcccgccgtccgccgctcgccgcctccgtcccggagcattaccaggattatacttccaccttgaagatggcgatcggattactagcgtttgagagccaccaggggctctggaacagcggatactattcacagttgtttggaattggaggagttctcatcactcttaccattcttatgttatccacgggctactttgggggaattggtgccccatttgctccatatttctggccgtatctaggacaagttccaaagaagagggaacgcaaaaggcctgtgagagtgtacatggatggatgctttgatctcatgcactacggccatgcaaatgcattgcggcaggccaaattgctgggcgatcagcttgtagttggagtggttagtgatgaggagattgtggcaaacaaaggtccacctgtcctttctatggaagagaggttgactcttgttagtggtctcaagtgggtcgatgaggtcgttcccaatgcaccctatgagataacagaagaattcatgaatactctcttcaacaagtacagcattgattacattattcatggagatgatccttgtcttctacctgatggcactgatgcatatgcgctagcgaagaaggtcgggcgttacaagcaaatcaagcgaacagaaggtgtctcgagcactgacatagttgggaggatattgctaacattcaggcagaaagatgctgacactgatttaagtgttgtcgttgctgagaagtctggagagaaatcaaatgatgaagtgaaaagtcagctatctcatttccttccaacttctcgccggatcatgcagttttcaaatgggcaggctccttcgccaggtgctcgtgttgtctatgtagatggcacatttgatcttttccacgctggccatgttgagttcctcaggagtgccagacaacttggtgactttcttcttgtgggtatctatgacgacgagtcgatcagggatagaagaggctgtcgtcctataatgcatctccatgagcgtactcttggtgttcttgcctgccgttatgttgatgaagtcattattggtgcaccatgggaagtttctaaggacatgatcactacgtttaacatttcattggttgtccatgggactgtagctgagggcaattcagctggtgaaattgatccttatgctgttccaaagagcatggggattttccagacaatcaggagcccaaaatctataacaacattgtcagtggcgacaagaatagttgacaatcatgaagcttacaagaagaggaacctgaaaaagaaggctagcgaagaccggtactacacacaaaagaaattcgtttctggagactagtgctgcacaaggagtgtatatttctgccagcagtccgaggaaatgcatgtgccaccctgtattgatgttattctacagcagagactggaacagataatcagcaatagaaaggtcacaatgatagtttgagcaatggtgtggatggaccaagctagggaagagagagagagagagagagggagaaaactgtcacattcttctgctgtcgcccttttaggaacgctcacatgacatgaggagttcacataaacgattctttttctttctgactttgttatccccgtatggggatttatatatatctgtagctgaaggccttcagcaaaccgttgttgtatacttgtgtgttgttacttaacagcgtgtgtagtgattagcactgcacactccctgattgtaccatggtatattgaatgtttatactgctggaagaaaaaaagggggaccttgtgatggtcagatgtttaatttatctggtgacagtcttgttccat

SEQ ID NO: 212128 - DNA, 2251 bp, Zea Mays
cttgaaactaggattgggttaaaattggaaccgagtttagtgccatggatgaatgagtgtttcacattgttatcgcgtcaaaacggaaataagaggaggggattaagctaatgccttgtcatcactgggtggcaaactgtcgtattttcattgatgcggtgttttctttcccgtcaggtacttccagccgtgtgggcccggggcagtttggttggtggacgtgaagctacccacgcttccaccagccccaattggcgaggccacaccacaccacaccactcctccgtccagcctctccccctctcctctcctctcctcccaaaacaagagcagcgagacgcgcgcgcgcgcgccacgagctggtggaacctcgccgcctcccgcggcagatctcgcgccgagccctggtttcgacgcgagatccgcgcccgccgtccgccgctcgccgcctccgtcccggagcattaccaggattatacttccaccttgaagatggcgatcggattactagcgtttgagagccaccaggggctctggaacagcggatactattcacagttgtttggaattggaggagttctcatcactcttaccattcttatgttatccacgggctactttgggggaattggtgccccatttgctccatatttctggccgtatctaggacaagttccaaagaagagggaacgcaaaaggcctgtgagagtgtacatggatggatgctttgatctcatgcactacggccatgcaaatgcattgcggcaggccaaattgctgggcgatcagcttgtagttggagtggttagtgatgaggagattgtggcaaacaaaggtccacctgtcctttctatggaagagaggttgactcttgttagtggtctcaagtgggtcgatgaggtcgttcccaatgcaccctatgagataacagaagaattcatgaatactctcttcaacaagtacagcattgattacattattcatggagatgatccttgtcttctacctgatggcactgatgcatatgcgctagcgaagaaggtcgggcgttacaagcaaatcaagcgaacagaaggtgtctcgagcactgacatagttgggaggatattgctaacattcaggcagaaagatgctgacactgatttaagtgttgtcgttgctgagaagtctggagagaaatcaaatgatgaagtgaaaagtcagctatctcatttccttccaacttctcgccggatcatgcagttttcaaatgggcaggtgctcgtgttgtctatgtagatggcacatttgatcttttccacgctggccatgttgagttcctcaggagtgccagacaacttggtgactttcttcttgtgggtatctatgacgacgagtcgatcagggatagaagaggctgtcgtcctataatgcatctccatgagcgtactcttggtgttcttgcctgccgttatgttgatgaagtcattattggtgcaccatgggaagtttctaaggacatgatcactacgtttaacatttcattggttgtccatgggactgtagctgagggcaattcagctggtgaaattgatccttatgctgttccaaagagcatggggattttccagacaatcaggagcccaaaatctataacaacattgtcagtggcgacaagaatagttgacaatcatgaagcttacaagaagaggaacctgaaaaagaaggctagcgaagaccggtactacacacaaaagaaattcgtttctggagactagtgctgcacaaggagtgtatatttctgccagcagtccgaggaaatgcatgtgccaccctgtattgatgttattctacagcagagactggaacagataatcagcaatagaaaggtcacaatgatagtttgagcaatggtgtggatggaccaagctagggaagagagagagagagagagagggagaaaactgtcacattcttctgctgtcgcccttttaggaacgctcacatgacatgaggagttcacataaacgattctttttctttctgactttgttatccccgtatggggatttatatatatctgtagctgaaggccttcagcaaaccgttgttgtatacttgtgtgttgttacttaacagcgtgtgtagtgattagcactgcacactccctgattgtaccatggtatattgaatgtttatactgctggaagaaaaaaagggggaccttgtgatggtcagatgtttaatttatctggtgacagtcttgttccat

SEQ ID NO: 212129 - DNA, 255 bp, Zea Mays
catactactcttccatagagagtaatatgatcttttgtggttttgttggtctaaggagaagaagtccacacggcaattgaagattgcagagctgctggaatacgtgttatggtgataacaggagataacaaagaaacagccgaggccatctgccatgagattggggtttttggccctcatgaagatatcagttcaaaaagcttcacagggaaggaattcatggcactttctgataaaaagatcttaagacaatag

SEQ ID NO: 212130 - DNA, 2972 bp, Zea Mays
aaaccccaccctgtaccccctgctcttgaaccctttcttcctcttcctcccccagtatactccaattcccacgtactcttcctccttgttctcctcctcctctctccctctctctcgccagaggatccaagaagtaccattgcagctcgctccattcgttcccaatcccaacacagcctctcagctgagctcagctcagctcagctcagggagttcccctgcttgtttttgctctagtgctcttggctgcctcagaaaaggactgcatgtgcagcagctgcaaagatagaatttctttatttttttcaccccaccttctcccaaggtgctgttggtgccccaggtggaggcaactggcgaagtgtgtgcgttctttgcttgatcaactaggttaagccatttcttgccccagtgttctccgattcatggttgtggaactagtccgagaatagctggagctgctcgttttcccttccaagaagacgaaggcggggggcgaggcgatcgtttgagcggtacctgttgcgcgcctgaggcggtgcaatcaatgtcgtcttcctgcataccgaccggcctgcggctggacctggacatggtgaaggcggcggcgtcgccggtgggcgcgcactcgtcgccgctgcgcccggcgcactactcgtcgccgtcgtcgacgctgtcgtcggaggcgtccaacgcctcgtcatcgtcggcgacgtcggtgtcgctcaagcgggctcgcgcgccgcggaagcggcccaaccaggcgtacaacgaggccgccgcgctgctcgcgtccatccacccctccgtgttccccgtgaacaagagccccaagacggcgccgccgcgcccgccgcagctctccgtgctggcggcggcgctcgacgcctcgcccgacctcctcccgccgctccccgtcctcgcggactccgcattcctgctccgggaccaggacacgccgtcgccgaagccgcggagcccgtccggcgccaagaactgcccgtcgccggcccccgtgagcagcgcgttccgggacttccgcgacccgccgtcgtcggcgagcctcgacgcggtcggcgccgacgagcttggcgagatcgacttcgacgacgacggcttcaacgccgactccatcctcgacgtcggtgacgccgcggccgggggcctcgacggcatcatgggcagcctcaccgtcgacgtcgagagcggcaccgccgccaggtccgatgactccatcctttccagctccggcatacacccctacctcaggaggctcatggtggtcggcctcgccggcaggttcgagctcggcctcgggtcccagcacggtgctcggcccagcctcaaccgcgcactgaagcggcgggacgacgacggcgcctggtggatgtggccggcagtgccggtaaaggacttgacgatcgcaccaccggcaccgccagcaccaccggcgccgaacgccgcagtgccgcaggccgccgccgccgccgcgccagaaaagaagaaaagcaagaagaagaaggtggtgaaggccatggcgaagggaaatgaggagcttcttcccaacgcgaagtgcaaggaggaagaagctgacgcctctgttgatgacgccgccgctaatggcgacggtgactccgacagtgcgccgacgaacgcaccaaaggccggtctggggctgaagctggacgccgacgaggttctcaaggcgtggtccgacaaagggtccatgtttgccgagggcagcgggccggagttgccgacgtcggccgccgaagtgcggagaacggagcaggcggcggtggggtcagggaagccagcgtgctgcggtacaaggagaagaggcgcacccggctcttctccaagaagatccggtaccaggtgcgcaaggtgaacgccgactgccggcctcggatgaagggaaggttcgttaggagcccgtctcttcttcggcaggccctggaggaagagacctagctagacaggcagtaatctttgctagccatttcttcttcttcttttttcccagcgcgtttttggccttttagttcctcattaactaagatgtgagtgagaattttcagtttttttttggtcggagttttgctctggagagaagaggatagggtaggatgcctttatagtggattgtcatggcatggtggtcagatagtttgtctcgggtttacagtgtgaggtaaaggaaggaaaaataaagtgatgttagaagaatacaaagcttcatacaggaagcagctcaggtgatgggttctgtttcgcatttactgctccgaaattaccgactgaatatctcattgctgtgaaacatccattgcaaagaagaagaagaagaaacggctacaaatcagcacggattatggtgtaataataagtaacagttgacaaaacctgctgtttttcatgcagcaggcctgcctctgctttggaaaggtaaattatgtgcagctgcaggcattagcaaaatacagtagaaatcagaccgaaaagagagagagagaaaaaaggcactagagatctcattgaaacttcatcagcacctgaaaaaccatgtgatttcacaaggcgcggatcaggtaataagaagtgcaaacagtaaataaaccaacacttggctggttgaagcaagttggggttcaagctatcagatattcagatggcatcttttattttctttctttttttttacttgcagtgcatcagacaaaagagcgaaatggatatggttgggcagaggcactgacctgctctgctcagctcagttatgcacacacatctgcgcaaaattccaaccgacggcatggacagcgcagatgaaatttgtcagatggcaattggatgatcctcctaaaagcatatacacgtagtagattaattctatttaaaacacatctagcagaaacaggagagataaactcgtcattactcacatctgtgattattccagcctagtcgag

SEQ ID NO: 212131 - DNA, 1293 bp, Zea Mays
caagatcgtcggtctcctctcctggtcaagataacggttgcaagtgtgtggtgccccggcctttttaatgacagtatatataaaccactgggcctcaactagttgagcataaaatcacccacacacccagcccagcagccagcaccgatcgagtcatccttaattaccgtaataatatgaaggccgccatgattgttgttgaagtagtactggcgctactgctgtcctatggggcgggacatgccgactgcgcaacgacgaccatcccccagaacagcaacagcacggccgacatgctttccctgctcgacttcagaaagacaatcagcagtgatccaggaggtttcctcacatcctggaacactaataacagtagcgccgccgactactgcggctggaatggcgttacatgcagcagaaagcacccagggcgggtcattgaactcaacctcagcagccaaagcttgcaaggccgaatctcttcatctctcggatctggccaccaggactcccctcgcccgctatgacagcttggggcccctctacacgctccggccatccacctccggcacgtctccgcctcctgccctggtatccaccacctcctccaccacttggcatcatcgtctcggacatcccggacctgacatcatgaccaagattaccagtagcctagatctttcatgtagtaggggacattttgagggcctctgtcatgcttgtcagttaggccggcatactcgtctcccattcaccacttcttcttctcaggatgagcaggcttttgacctggttcattgtgatctctggacctctcctgtactcagtctttctggttataaatactatttggtgattttggatgacttctcccattttctttggacttttcctcttcgattgaagtctgacacgctcaccacccgcacacacttctttgcctgggtctccacccagtttcaccgcccggtccgtgccctgcagtgtgacaatggttaaaaacggtttaaataatttcattaaacggtggctaaatagatacatgtaaacggaaaacatttgtttaaatggccatttagcgtttagggtttagcatatataggataacactgattttggcatgtcaaaatataattatttcctaataaaaagaatgcaagattctccatatttcgaatgagcaaaagaactactagcactgaccaagctcgcaaaaagatctgtaccataacttaaatctaatccaagaaacaccaaaccataacattcatcagaaaatatagtgaaataaag

SEQ ID NO: 212132 - DNA, 1193 bp, Zea Mays
  misc_feature (835)..(934): n is a, c, g, or t
ctcctctcccgagtccctccccctatccccccctctccgcctccgtcgctagggctccattcccctgcgcatccgccgccgccggatcccgcctcgcctccgccgcagcttcggcatcagaatcaccggattcggtggtgtttctcggctgcctcagcttccgccggcggaaggccccaggcggcgctccctgcagccctccggccttcactgagtcctctagaagccaaacatcgttgatacttagaaggcagctgagtatatggtatttgtgggccattgtgctgtccatgcgagcggagagcatgcgtggcacctgtgcttcgggtgatgcccctgaccagagtagctgccgatgcattcggtgtgctgacaatcgcactgtttgctctgtttgctgctctgggcctcttctgcatcttccagtcggtctacttcaggtgtcggattcggagaggaccctccttccttccgcttggttattttaacggcccatgggtgactcgcattgctctgattctgatcacaatttggtggggagtagggtgcttctcctcgggttttcggtgctgctcaagccaggacatgttgcctttgagggtattatcttcctgtcattcttgatgatgctgtcctgcacgactgttgggatactcttgctggtttactaccctgtagctgattcattggccctccgagatataggccagagggacatagcagaaatggtgccttatgatgattactactatgaaggcacatcgcttgtggccaaccagagtttccgagaaatcgagcggaattctgacacttcaacgaagccgggatccatatnnnnnnnnnnnnnnnnnnnnnnnnnnnnnnnnnnnnnnnnnnnnnnnnnnnnnnnnnnnnnnnnnnnnnnnnnnnnnnnnnnnnnnnnnnnnnnnnnnnntttttcccccaaactagcttaactcatcattagcccagcactctaattccattctatcaaagtagcaagtagctagatcttgcactggctgatgagctgtgttctggcattggctggaagaggctgtgagttggagttcacttttggttggttttgctgctccacaactcataatatctcccagccaataggttacaccatggactaggctggaatggggcctctgctgtgtcgtcgcctactattccttagctgtttc

SEQ ID NO: 212133 - DNA, 1212 bp, Zea Mays
gccgaactgggcctcaaccggaacttgttttaccccatctcatcccactgactccacccacccgcccgctgcctccgccggatctcgtcggactcggatccgcccgaccaccccgcgccgccgccgcgcagcagcagcaggaactggaggagaagaggcttctttgtttgcaatggatatatttagaatgtacgagaaatatgcccagaagaatgggtggaaatttgatgtcattgacataatggagtctgctgtgaaaggatacaaggaagctagtggaactatatcaggtcctggggcgttcggcaaactaaagtttgagagtggcatccatagagttcagcgagtgccagcgactgagaaatctggacgaatgcacactagtgctgtatcagttgctgttcttccgcaagctgatgaggttgatgtccagctgcgaaatgaggacctgagaattgatacctacagatcaggtggctctggaggtcagtctgtcaatacaaccgatagtgctgttaggataactcatattccaaccggaacagtggttgcaatccaagatgagagatcacagcacatgaacaaggccaaagctctgaaagttctccgagcgcgactgtatgagttggagaggcgtagactacacatggacaggtcaaagcttcgatcagaacagattggaagcggtgacaggtctgagcgaatcagaacatacaacttcccacagggccgtgtcaccgaccatcgcgttggagtcacacaccactccatagcagatgtcatggagggggagagcctggacatgttcgttgatgcgctcctgcttcaagaagagatggacgccattgcttcatttggcgcatagctagattaaaccttgcaacattgattcacgtcatggacaaaatagagatcagcgaaaaacaataccgagcagtccactagtgaattgcctgtgcattgtgtcctgttttggcgtgtgctagttttacataatgctgaatttttaatgtaggcatgtgttataattgttgccgataaacgtgtcgctcatccaattctttccaaactacagttttgctggcaatgttttgttgttcgttctttccaaactacagttgtgctggcatggttttgttattcataaacttggtgcgcctgaattgtctatggacaaacatgtttataagtgatccttatttaagcttcagt

SEQ ID NO: 212134 - DNA, 2231 bp, Zea Mays
ctttgatggcattttttaacggatctgacggcttctgatgattaccgacaggtttgctagcggagtccatccaactataatgaattaggcacccagtacgtaatggcaacggaagtcaaacaaacttatttttcatggtcacaaggagagtcaactgaacgggatggtcctcaaggagtatctgtatcccagacacttgatcatggttccatttccttcggaagatttgaattagagtcactatcatgggagaagtggtccgtatttactaatgacaggcgcaatgaagaatttggaaaattcaatggtttagtcgctcagaaaaaggcttattttgaagagtattacaagaagatcagggaactaaaggcttcacagcagcaaaaccagcaaactgaacttattctggaatacagcggtgatggtagtgactccagccaaacagcagaagaggagcagggtgctgatcttgaaacccccactggatctggagcagctgttgatgtttatgtggaagaagttccatgtgaaaccacatcggagcatggactgcagtgctataatgaccaaggaaacgaaaattttgatacagaattttcctcatctaatctttcttcgtcaggtggatttctgcagcaaactgaccatgatgttagagttcctgttcgtggtgacaattctaccagtaaactgtatgcggcgccgcagaatgctagttctgttcacgatggtactagaaaaacatatgaagctgcaaggactcctagaaggattattgagaaagattccaggcttagacacagccccaagataataccaaaatccgtcaaagccctttcacaaagtgctatggattacacatttactagtgagaggcctggttcagtgaagcccaatacaactacgagccagaaggctaagccagtgcaaagaccaaatgcagcaagccagaagatgtctgcatctacagaaaggagcaagcttacaggtctcagaagaccttcctcagcaggtgcgcaacggccttctactggagagcgacatgctattgccagggagaattcacaattacctgtggtcgtttccaccccacggcgaccttccactgctgagagacgcccagtcacccgagatcgtgcagagaagcaagccaatgtcaccacaccacgccgaccttctacttctgaaagactccccatcaaaagagagactgcagcaaagcataatgatatttccgctgtacgtcgaccctctacaggagagagacgtgcttttactagagatggtgttctgagaactgatgtgaagacacctagtaaggcaagagcaactgtggctcatccgatgagtgaaatgactacagtgggcaatacgagaaaggctatcactccaaatgcagctagaagtagcaagctggaaacaaaaagcaataactacagactgaagggaccttcagcattggatagccactctactaggtcaaacagaatggacttgcaagtgtctggcaagcagaaatcgagttctgttaaccttcctccaaggaaaattttcagttctactgctggagaaccatcagttggaaccatttctaggtcaaaaaagaaagagggcgttcaggcgacagtgcaatctcgagcatccacttcaaagagaacaactcctttgcagactggaaacttaaaggcgaggggtccaaatccaccagcaccgccacctccaccacgtcggccatcacgaacgactaccaaaccaagtgccggtgcctcatcgattggcggaagaaagccaaaggcttcagcaccacaatggcactgatgcagtggaggagagcggaaagcgcttcagtacagtggcccgcagagcatggtggatctgagggacgtcagtaccggccttcctttgtatggtgtgtactcccgttggcccgtgcagagcagctcccaagtgtagtctcagtacaacccccgttggcccgtcccttcctttgcagagcagcagtctagtgtatgtagtcgcgcgtatcatatcccaccggtgcctagtttcgtcgtccacaaggaacttagaacattgtaaatacctggaaataaatttgcagcttagctctaaagtaaatccagcccaagatttgtgaacatccatgtatgtcattagcaatggaagcccttgtttatcagcttgttattggtgtgttctttttaagggttattgtcagatttgattcttcg

SEQ ID NO: 212135 - DNA, 2194 bp, Zea Mays
cggcttctgatgattaccgacaggtttgctagcggagtccatccaactataatgaattaggcacccagtacgtaatggcaacggaagtcaaacaaacttatttttcatggtcacaaggagagtcaactgaacgggatggtcctcaaggagtatctgtatcccagacacttgatcatggttccatttccttcggaagatttgaattagagtcactatcatgggagaagtggtccgtatttactaatgacaggcgcaatgaagaatttggaaaattcaatggtttagtcgctcagaaaaaggcttattttgaagagtattacaagaagatcagggaactaaaggcttcacagcagcaaaaccagcaaactgaacttattctggaatacagcggtgatggtagtgactccagccaaacagcagaagaggagcagggtgctgatcttgaaacccccactggatctggagcagctgttgatgtttatgtggaagaagttccatgtgaaaccacatcggagcatggactgcagtgctataatgaccaaggaaacgaaaattttgatacagaattttcctcatctaatctttcttcgtcaggtggatttctgcagcaaactgaccatgatgttagagttcctgttcgtggtgacaattctaccagtaaactgtatgcggcgccgcagaatgctagttctgttcacgatggtactagaaaaacatatgaagctgcaaggactcctagaaggattattgagaaagattccaggcttagacacagccccaagataataccaaaatccgtcaaagccctttcacaaagtgctatggattacacatttactagtgagaggcctggttcagtgaagcccaatacaactacgagccagaaggctaagccagtgcaaagaccaaatgcagcaagccagaagatgtctgcatctacagaaaggagcaagcttacaggtctcagaagaccttcctcagcaggtgcgcaacggccttctactggagagcgacatgctattgccagggagaattcacaattacctgtggtcgtttccaccccacggcgaccttccactgctgagagacgcccagtcacccgagatcgtgcagagaagcaagccaatgtcaccacaccacgccgaccttctacttctgaaagactccccatcaaaagagagactgcagcaaagcataatgatatttccgctgtacgtcgaccctctacaggagagagacgtgcttttactagagatggtgttctgagaactgatgtgaagacacctagtaaggcaagagcaactgtggctcatccgatgagtgaaatgactacagtgggcaatacgagaaaggctatcactccaaatgcagctagaagtagcaagctggaaacaaaaagcaataactacagactgaagggaccttcagcattggatagccactctactaggtcaaacagaatggacttgcaagtgtctggcaagcagaaatcgagttctgttaaccttcctccaaggaaaattttcagttctactgctggagaaccatcagttggaaccatttctaggtcaaaaaagaaagaggcgacagtgcaatctcgagcatccacttcaaagagaacaactcctttgcagactggaaacttaaaggcgaggggtccaaatccaccagcaccgccacctccaccacgtcggccatcacgaacgactaccaaaccaagtgccggtgcctcatcgattggcggaagaaagccaaaggcttcagcaccacaatggcactgatgcagtggaggagagcggaaagcgcttcagtacagtggcccgcagagcatggtggatctgagggacgtcagtaccggccttcctttgtatggtgtgtactcccgttggcccgtgcagagcagctcccaagtgtagtctcagtacaacccccgttggcccgtcccttcctttgcagagcagcagtctagtgtatgtagtcgcgcgtatcatatcccaccggtgcctagtttcgtcgtccacaaggaacttagaacattgtaaatacctggaaataaatttgcagcttagctctaaagtaaatccagcccaagatttgtgaacatccatgtatgtcattagcaatggaagcccttgtttatcagcttgttattggtgtgttctttttaagggttattgtcagatttgattcttcg

SEQ ID NO: 212136 - DNA, 2328 bp, Zea Mays
attttttcctccccttcccactgtcactgatgcagcgaagcttggtatagcatgacctgaattcagcttgtgtagacgaggagccaagtttcttcttcttttcctttgctccaaacagatcgctaattgtgttcgtgttttgttctgggtttgctagcggagtccatccaactataatgaattaggcacccagtacgtaatggcaacggaagtcaaacaaacttatttttcatggtcacaaggagagtcaactgaacgggatggtcctcaaggagtatctgtatcccagacacttgatcatggttccatttccttcggaagatttgaattagagtcactatcatgggagaagtggtccgtatttactaatgacaggcgcaatgaagaatttggaaaattcaatggtttagtcgctcagaaaaaggcttattttgaagagtattacaagaagatcagggaactaaaggcttcacagcagcaaaaccagcaaactgaacttattctggaatacagcggtgatggtagtgactccagccaaacagcagaagaggagcagggtgctgatcttgaaacccccactggatctggagcagctgttgatgtttatgtggaagaagttccatgtgaaaccacatcggagcatggactgcagtgctataatgaccaaggaaacgaaaattttgatacagaattttcctcatctaatctttcttcgtcaggtggatttctgcagcaaactgaccatgatgttagagttcctgttcgtggtgacaattctaccagtaaactgtatgcggcgccgcagaatgctagttctgttcacgatggtactagaaaaacatatgaagctgcaaggactcctagaaggattattgagaaagattccaggcttagacacagccccaagataataccaaaatccgtcaaagccctttcacaaagtgctatggattacacatttactagtgagaggcctggttcagtgaagcccaatacaactacgagccagaaggctaagccagtgcaaagaccaaatgcagcaagccagaagatgtctgcatctacagaaaggagcaagcttacaggtctcagaagaccttcctcagcaggtgcgcaacggccttctactggagagcgacatgctattgccagggagaattcacaattacctgtggtcgtttccaccccacggcgaccttccactgctgagagacgcccagtcacccgagatcgtgcagagaagcaagccaatgtcaccacaccacgccgaccttctacttctgaaagactccccatcaaaagagagactgcagcaaagcataatgatatttccgctgtacgtcgaccctctacaggagagagacgtgcttttactagagatggtgttctgagaactgatgtgaagacacctagtaaggcaagagcaactgtggctcatccgatgagtgaaatgactacagtgggcaatacgagaaaggctatcactccaaatgcagctagaagtagcaagctggaaacaaaaagcaataactacagactgaagggaccttcagcattggatagccactctactaggtcaaacagaatggacttgcaagtgtctggcaagcagaaatcgagttctgttaaccttcctccaaggaaaattttcagttctactgctggagaaccatcagttggaaccatttctaggtcaaaaaagaaagagggcgttcaggcgacagtgcaatctcgagcatccacttcaaagagaacaactcctttgcagactggaaacttaaaggcgaggggtccaaatccaccagcaccgccacctccaccacgtcggccatcacgaacgactaccaaaccaagtgccggtgcctcatcgattggcggaagaaagccaaaggcttcagcaccacaatggcactgatgcagtggaggagagcggaaagcgcttcagtacagtggcccgcagagcatggtggatctgagggacgtcagtaccggccttcctttgtatggtgtgtactcccgttggcccgtgcagagcagctcccaagtgtagtctcagtacaacccccgttggcccgtcccttcctttgcagagcagcagtctagtgtatgtagtcgcgcgtatcatatcccaccggtgcctagtttcgtcgtccacaaggaacttagaacattgtaaatacctggaaataaatttgcagcttagctctaaagtaaatccagcccaagatttgtgaacatccatgtatgtcattagcaatggaagcccttgtttatcagcttgttattggtgtgttctttttaagggttattgtcagatttgattcttcg

SEQ ID NO: 212137 - DNA, 3159 bp, Zea Mays
  misc_feature (2801)..(2900): n is a, c, g, or t
ctgaattcagcttgtgtagacgaggagccaagtttcttcttcttttcctttgctccaaacagatcgctaattgtgttcgtgttttgttctgggtttgctagcggagtccatccaactataatgaattaggcacccagtacgtaatggcaacggaagtcaaacaaacttatttttcatggtcacaaggagagtcaactgaacgggatggtcctcaaggagtatctgtatcccagacacttgatcatggttccatttccttcggaagatttgaattagagtcactatcatgggagaagtggtccgtatttactaatgacaggcgcaatgaagaatttggaaaattcaatggtttagtcgctcagaaaaaggcttattttgaagagtattacaagaagatcagggaactaaaggcttcacagcagcaaaaccagcaaactgaacttattctggaatacagcggtgatggtagtgactccagccaaacagcagaagaggagcagggtgctgatcttgaaacccccactggatctggagcagctgttgatgtttatgtggaagaagttccatgtgaaaccacatcggagcatggactgcagtgctataatgaccaaggaaacgaaaattttgatacagaattttcctcatctaatctttcttcgtcaggtggatttctgcagcaaactgaccatgatgttagagttcctgttcgtggtgacaattctaccagtaaactgtatgcggcgccgcagaatgctagttctgttcacgatggtactagaaaaacatatgaagctgcaaggactcctagaaggattattgagaaagattccaggcttagacacagccccaagataataccaaaatccgtcaaagccctttcacaaagtgctatggattacacatttactagtgagaggcctggttcagtgaagcccaatacaactacgagccagaaggctaagccagtgcaaagaccaaatgcagcaagccagaagatgtctgcatctacagaaaggagcaagcttacaggtctcagaagaccttcctcagcaggtgcgcaacggccttctactggagagcgacatgctattgccagggagaattcacaattacctgtggtcgtttccaccccacggcgaccttccactgctgagagacgcccagtcacccgagatcgtgcagagaagcaagccaatgtcaccacaccacgccgaccttctacttctgaaagactccccatcaaaagagagactgcagcaaagcataatgatatttccgctgtacgtcgaccctctacaggagagagacgtgcttttactagagatggtgttctgagaactgatgtgaagacacctagtaaggcaagagcaactgtggctcatccgatgagtgaaatgactacagtgggcaatacgagaaaggctatcactccaaatgcagctagaagtagcaagctggaaacaaaaagcaataactacagactgaagggaccttcagcattggatagccactctactaggtcaaacagaatggacttgcaagtgtctggcaagcagaaatcgagttctgttaaccttcctccaaggaaaattttcagttctactgctggagaaccatcagttggaaccatttctaggtcaaaaaagaaagagtcctctagaagccaaacatcgttgatacttagaaggcagctgagtatatggtatttgtgggccattgtgctgtccatgcgagcggagagcatgcgtggcacctgtgcttcgggtgatgcccctgaccagagtagctgccgatgcattcggtgtgctgacaatcgcactgtttgctctgtttgctgctctgggcctcttctgcatcttccagtcggtctacttcaggtgtcggattcggagaggaccctccttccttccgcttggttattttaacggcccatgggtgactcgcattgctctgattctgatcacaatttggtggggagtaggtgagatagtgagattgagcttcttgaagaaaaagttgttctccagcttaacatggcagaggaacatatgtgatgtgtacatactttccaacctagggtttgcagagccagggatcttctttgcgtttgcttttctgctccatggctcgttacaaaagagggagctgggcacattaaaccaaagatggaattggaagaccatggcctacttgttggttttctgtattccagtgttctcggtgcaggcaatcctagtgtttgttgggcccaggtttgttagagaggagaaccatgatctcgggagaagaaagattgctaaatacttcatacggacctacacgccggttggagataccagtgtttgcacttacccattgtttggcaccctttttcttggacttgtagatgctttcctgatgagctatgtatcatatgttggattacgggtgctgtccttggttattaacaagtcactgcgaaggagagtttatctactgatgctgtctgtgctgtgcttccttcctatcagggtgcttctcctcgggttttcggtgctgctcaagccaggacatgttgcctttgagggtattatcttcctgtcattcttgatgatgctgtcctgcacgactgttgggatactcttgctggtttactaccctgtagctgattcattggccctccgagatataggccagagggacatagcagaaatggtgccttatgatgattactactatgaaggcacatcgcttgtggccaaccagagtttccgagaaatcgagcggaattctgacacttcaacgaagccgggatccatatnnnnnnnnnnnnnnnnnnnnnnnnnnnnnnnnnnnnnnnnnnnnnnnnnnnnnnnnnnnnnnnnnnnnnnnnnnnnnnnnnnnnnnnnnnnnnnnnnnnntttttcccccaaactagcttaactcatcattagcccagcactctaattccattctatcaaagtagcaagtagctagatcttgcactggctgatgagctgtgttctggcattggctggaagaggctgtgagttggagttcacttttggttggttttgctgctccacaactcataatatctcccagccaataggttacaccatggactaggctggaatggggcctctgctgtgtcgtcgcctactattccttagctgtttc

SEQ ID NO: 212138 - DNA, 1097 bp, Zea Mays
gttgttttctgaagcgggatttgggctgttgctgtcgagacaaagaagcagatctcgtgctctatgcagttgacaaaccgaacagatgactacatcggctttaaggttaagacgacgagcccgaagaagtactgtgtccggcccaacagcggcatcgtgccacctcggtccaccagcgatgtcattgtgacaatgcaagcacaaaaggaggcgccaccggacatgcagtgcaaggacaagtttcttgtgcaaagtgtcgttgtggcggaagggaccttagtcaaggacatcactggcgatatgctgaaggtcgtctacatcccaccacccaaaccgccatccccagtgcatgaggaatctgaagaaggctcatcaccccgaccttcattgtccgatggaattaacttgaattatcaagagatgcagacaacgagggaatctgatgagtcactgttgttctcggctgtaaaaactcatatagatcaaaaggactacacctccgagacatctgctttgatttcaaagttgacagaagagagaaactctgccattcagcagaacaataagcttcgagaggaactggaccttacgaggagggaagccaacaagcagaatggtggattctcctttgtggtcgtggtggccattgctctcctgggaatgctactgggatatatcatgaagagatagatgggctcataatgactcggcctcatgttagaccgttttcctcacagtattgaatattgtctaatgcacttatcacatgcacactgctactccatagcatattcatctggtgtcttacgtgatctgtttcgtgcttgggattgggatgactagtcaccagtcgcaacacaggctgtcaaacaatggtctgtgtgcttaatcttgttttagctgttatgttagtgtgtgcaactaaaactgggtaattaatgatgtcgttttggtcgaccgtttgtgtaacagcgaagtcaacttgctgtgggacagcttttgtttcatgactagaacttgccattgccgccaattaggcatgccgcaatttgttagccacgtttttggttcatgccacatgtgcatgtcatatactc

SEQ ID NO: 212139 - DNA, 1159 bp, Zea Mays
gtttcctgcacatgcctgtgtgtgttgttttctgaagcgggatttgggctgttgctgtcgagacaaagaagcagatctcgtgctctatgcagttgacaaaccgaacagatgactacatcggctttaaggttaagacgacgagcccgaagaagtactgtgtccggcccaacagcggcatcgtgccacctcggtccaccagcgatgtcattgtgacaatgcaagcacaaaaggaggcgccaccggacatgcagtgcaaggacaagtttcttgtgcaaagtgtcgttgtggcggaagggaccttagtcaaggacatcactggcgatatgtttaccaaagaatcagctaatgtggtggatgaggttaagctgaaggtcgtctacatcccaccacccaaaccgccatccccagtgcatgaggaatctgaagaaggctcatcaccccgaccttcattgtccgatggaattaacttgaattatcaagagatgcagacaacgagggaatctgatgagtcactgttgttctcggctgtaaaaactcatatagatcaaaaggactacacctccgagacatctgctttgatttcaaagttgacagaagagagaaactctgccattcagcagaacaataagcttcgagaggaactggaccttacgaggagggaagccaacaagcagaatggtggattctcctttgtggtcgtggtggccattgctctcctgggaatgctactgggatatatcatgaagagatagatgggctcataatgactcggcctcatgttagaccgttttcctcacagtattgaatattgtctaatgcacttatcacatgcacactgctactccatagcatattcatctggtgtcttacgtgatctgtttcgtgcttgggattgggatgactagtcaccagtcgcaacacaggctgtcaaacaatggtctgtgtgcttaatcttgttttagctgttatgttagtgtgtgcaactaaaactgggtaattaatgatgtcgttttggtcgaccgtttgtgtaacagcgaagtcaacttgctgtgggacagcttttgtttcatgactagaacttgccattgccgccaattaggcatgccgcaatttgttagccacgtttttggttcatgccacatgtgcatgtcatatactc

SEQ ID NO: 212140 - DNA, 1179 bp, Zea Mays
gtcgtgtcgtaattagttagttaagcgtttcctgcacatgcctgtgtgtgttgttttctgaagcgggatttgggctgttgctgtcgagacaaagaagcagatctcgtgctctatgcagttgacaaaccgaacagatgactacatcggctttaaggttaagacgacgagcccgaagaagtactgtgtccggcccaacagcggcatcgtgccacctcggtccaccagcgatgtcattgtgacaatgcaagcacaaaaggaggcgccaccggacatgcagtgcaaggacaagtttcttgtgcaaagtgtcgttgtggcggaagggaccttagtcaaggacatcactggcgatatgtttaccaaagaatcagctaatgtggtggatgaggttaagctgaaggtcgtctacatcccaccacccaaaccgccatccccagtgcatgaggaatctgaagaaggctcatcaccccgaccttcattgtccgatggaattaacttgaattatcaagagacaacgagggaatctgatgagtcactgttgttctcggctgtaaaaactcatatagatcaaaaggactacacctccgagacatctgctttgatttcaaagttgacagaagagagaaactctgccattcagcagaacaataagcttcgagaggaactggaccttacgaggagggaagccaacaagcagaatggtggattctcctttgtggtcgtggtggccattgctctcctgggaatgctactgggatatatcatgaagagatagatgggctcataatgactcggcctcatgttagaccgttttcctcacagtattgaatattgtctaatgcacttatcacatgcacactgctactccatagcatattcatctggtgtcttacgtgatctgtttcgtgcttgggattgggatgactagtcaccagtcgcaacacaggctgtcaaacaatggtctgtgtgcttaatcttgttttagctgttatgttagtgtgtgcaactaaaactgggtaattaatgatgtcgttttggtcgaccgtttgtgtaacagcgaagtcaacttgctgtgggacagcttttgtttcatgactagaacttgccattgccgccaattaggcatgccgcaatttgttagccacgtttttggttcatgccacatgtgcatgtcatatactc

SEQ ID NO: 212141 - DNA, 2303 bp, Zea Mays
agttccttccaagaagagctcaaaaagctttgtctgctcaacctggacgcctcggcctcggcgatccaccggcacggcaccgaaacacctcgtctcgatttcgaaccaaaccctccagtgtccagccccgtctcgttcgccgcggcaggagcgagcgagcgaccgagcgagcagccatggcgccggtcgatccccactcctacaccgacggcgcgcacccggtggtctcgcgcgcggcgctcgccttctacctcgacttcgccgcctccaccatacacgcctccgcggtgctcaccctctccgcgccgcactccggcgacctcctcctcgacacccgcgctctcgccgtccactccgcctccaccgacgccgacccgccggagcccatccccttctccctcgccgcggcgcccgacccggtcctcggcacggcgctgaccctcgccctgccccgcgacaccgcctccttccggctcaccttctcaacctcccccgccgcctccgcgctgcagtggctggccccgccgcagaccgcctccgcgcagcccttcgtcttctcgcagtgccagtccatccacgcccgctccgtcttcccctgccacgacacccccgccgcgcgcatcaccttctcgctcctcctcaacgtccccgagcagctctccgccgtcgccgccgcgcgccacgtcgcgcgccgggacccgctgccctccgaccaccgcggggcgtgcgacgacgggctctggtgcgcgcccggccgcatcgtcgaggagttccagatggaccagtccgtgccgccctacctcttcgcgttcgccgccggcagcatcgggttcagggacctcggcccgaggacgcgggtgtacgcggagggaggggacacggtgttggacgaggcggccagggagttcgcgggggtggaggagatggtcaaggttggggaggggctctttgggccgtatgaatgggagaggttcgatctgctcgtgctgccaccgagcttcccctatggaggtatggagaaccccaggatggtgttcctcactcccacggtcatcaaaggggatgctgcaggggctcaggttgtggcccatgagctcgcacatagctggactggcaatctgattactaacaaaaccaatgaagatttctggctaaacgagggattcacaacatatgctgagaggaggattgttgaggttgtgcaaggggaggagcgggcagccttaaacatggggattggatggaggggattgaacaggatgatggagaggtttaaggataacatggagttcaccaagttgaagccgaagatggcagggattgaccctgatgatgtttactctgaagtgccctatgagaaaggtttccagttcctttggagaattgagcgtgagattggcaggcctgctttcgacgagtttttaaagaagtacattgcaaccttcaagttccaatcgatagatacagagacatttcttgaattcctcaaaaccaatgtacctgggatagaaaacaaaattgaccttcacctgtgggttgaggggactggtatccctcctgatgccatggaaccagattcagctacttacaaaaagatctgctccttagctgcagaattcaaatctggaaaacttccaagtgaagatgaggtagcaaagtggagtgggcaagaatgggaactttacttagaaaatctaccagcagatgttgaagcctcacaggtcactgctctcgacgagcggtacaagctatctgaaagccgtgactacgaggtcaaagtggcgttcctccagctggcgatccccaccgggtgcaagtgctacttcaacgaggttgagaaatgcttgaagcaggtgggaaggatgaagtacctccgcccgctctacagctcgctggccaagtgctccagcgaggagaagatgctggcccagaggatattctcggaggctcaagagttctaccacccaatagctcgaagtgttgcggaggccattttgtcgaagcatagctaagcaagccaagactcttgcttggcgattcacgcttgatctggtgactgctgctcagtttgcttctttcgcataaaattatcgtctgctctggaaaagaaacttaggaaaaacttgaggcttgtattgcatctttgataacataatattatattatatgtagagactcagaaaccgtagtacctgaggtatgtatgtcctgggtttgcaaggccactcttaacatgcagcttggcaatgaactcagcatgatcattgtgcaaaaaaaaaaaaaaaccccaaacaaacaaaaaa

SEQ ID NO: 212142 - DNA, 1447 bp, Zea Mays
gcaacattcaaaatatcttcataagaaatttgaaaggaacagacaagaaaacattacgtgaatccatactttccctgtgacaagctggttgggatagcgcacaacaagttctctttttttttagaggttcaatccatacttgatgagctgatgtccttttttttcgtaaacattttaccatcatggttttaactgaccgatgtctatcacaagaggccctcggccctcaggcgcagtcctttcaagcagtcatgttagactgaaatgaaccgctctggttggcctcttgtggtcctttgaagctgttttctactcccccttttcctttttcttttttatcgctgtcagctaccgggaaacagtgcctgcatttcgttgtatcgctcccccaacaaacctataccagtctactcttctgcttccgtttctcctttccagcactgcaaaattggttgcatttgcttgtcagaattcagaaacgacagccgatgtgtggtcctgtggagtcactctttatgtgatgctggtcggtggttacccttttgaggacccagacgacccaaagaatttcagaaagacgatcgggaggatcatgtcaatccaatacaagataccagagtatgtgcacgtgtcgcaagactgcaaggagctgctttcaaggatctttgttgcaaactctgcaaagagaataacgatcagggagatcaggaaccacccctggttcctgaagaacctgcccagagagctcacggaggctgcgcaggccatgtactacaagaaagacaacagcgccccgacctactccgtccagtccgtggaggagatcatgaagatcgtggagaaggcgcggacgccgcctccttcctccacccccgtggctggcttcggttgggcggaggaggacgagcaggaggacagcaaggatccagacgaggaacacgaggacggcgaggacgagtacgagaagcaggtgaagcaagtccacgccagcggggagtttcatctcagctgctgagggttttcgccggcctgctagtctgtggtaccagccgatgatggacctgctagtctgtggtcttgttttcaagttttctttcatttttttctttcttttgctgtggtgccgcatgactgcaacagttgtaaattattgaagggggttccagcgttgcccttgtattgactcattcaagctagcatggggaacataattatggaataaaacaggtcgttgagcatgctgtcgatatgatttctgaaagcactggaatgtgctttcatgccaaccttcaagaattttccggtacaaatcacaagaactgctgatgtaatggttatcaggatacttgctgtggcgagttaagtaaattcgtggtcacttccgagggacgacaaacacataacaatataacaaaagatcttcaatcaatagaagacaatcacatga

SEQ ID NO: 212143 - DNA, 1855 bp, Zea Mays
cgacaacaaacaacagagcaggacaggatagaccccttgcccttggcaccgcccacccgtctgactgtctgagccgcctgtctcctcctcgttctctcagcccgttcggcgcaatgccaccgccggcgccgctcttcctctcgctcgcctccacgccaccgcctgcgcttatgcccgtacaccaccccagggccccgcaatccctaaccctagtccctccggttgcctcctccagaaaggccgccgccgttcccgcgtgccccgtcgcctccccgcgtcactccgactacttcgatccgcgggctccgccgccgccgcgcggggacggagggtacgggcgccctcccaacggcgcgcaggacgggagggtcttcacgagctacagcatctacaagggcaaggccgcgctgtcattcgatcctaggccgccgctcttcgtgccgctcgattctggggcgtacaaggtggccaaggagggcttcgtgctgctgcagttcgcgcccgccgtggccacacgacagtacgactggacgcgcaagcaggtgttctcgttatctgtgtgggagataggaaccctgcttactcttggtccaacagattcatgcgagttctttcatgaccctttcaaggggcggagtggtgtaggaatgcagtgaatcgtcatcaaacttctttcatactgcttgtgccaatctggtttaaggacctgtcattgttgcttatcaactttatttgcttggtgattgaggaatgtattcttgcctctccttttgttgcagttagcaaaagaggggatttgtttcaactgtgttttttatttcaaaacaaaatcttgccagctaatgcaatcttgatttcatccaacatctctaatcaagatttctcgatgagggttccatcacccttcagtcacattatcatagcatcatatatctagactttaagcattttttacatccttgtgttcatcgtgttttatattttcttccatgatttattgtttcatgtgcatccagccttggcactgtgcatcaagaaaatatttaccacattatttcatcttttgatataaacagcgaagaaggtaaagtgcgtaaggttctaaaaattgagccaacaccagatggcaatggtcgctttttcaacctcagtgtccagaatcggcttatcaacgttgatgagagcatttacatccctataaccaagggagagtttgctgtcattgtatcaactttcaattacatcataccgcacctcatgggctggagcacatttgtaagttcaatcaaacccgaggagtcacggccatacagcaggccgcagtccacgtctgagtacgaatggcgaaggtgatgtgttgatgaactacagcaaaatggctgagacccacactgaagggatgagattattggtattgtttggctgggtaatctcagatgtggttagttgatggatgcctttttggggtactccttttgtttcctttctagttcagcaggcaggtagcactacttgtatccagagtttcacggggcggttggggagggggcatattttgggcagcaaacctcagttctgacatggaatgacgcagtcacgcagcaggggcggttgtgaatctgctccgtaaggccgtgactccagtgatagcgggacgcagctgacagatgtttgggttgctggggaagggttggcctgaaattgttgcttgcatacacgagattattgtgtacatgtagtctgcgactctgcgttacccccttgatgaatgtccgccctgtggaactgtggtgtttttgctgatgattttgctgaattcaaaagcttaaaccattagaattagaaagagagatac

SEQ ID NO: 212144 - DNA, 2013 bp, Zea Mays
cgacaacaaacaacagagcaggacaggatagaccccttgcccttggcaccgcccacccgtctgactgtctgagccgcctgtctcctcctcgttctctcagcccgttcggcgcaatgccaccgccggcgccgctcttcctctcgctcgcctccacgccaccgcctgcgcttatgcccgtacaccaccccagggccccgcaatccctaaccctagtccctccggttgcctcctccagaaaggccgccgccgttcccgcgtgccccgtcgcctccccgcgtcactccgactacttcgatccgcgggctccgccgccgccgcgcggggacggagggtacgggcgccctcccaacggcgcgcaggacgggagggtcttcacgagctacagcatctacaagggcaaggccgcgctgtcattcgatcctaggccgccgctcttcgtgccgctcgattctggggcgtacaaggtggccaaggagggcttcgtgctgctgcagttcgcgcccgccgtggccacacgacagtacgactggacgcgcaagcaggtgttctcgttatctgtgtgggagataggaaccctgcttactcttggtccaacagattcatgcgagttctttcatgaccctttcaaggggcggaggttggtatcatttaatgtacctgattacctgagttctagtgagtctcccccttgttgtttagttctcaggtttccagaaaagatgctacaaatgcagatcatcatgttatgcatcttgttattctcctaggctgttgaagcataattttttttgttgtctgtccagtggtgtaggaatgcagtgaatcgtcatcaaacttctttcatactgcttgtgccaatctggtttaaggacctgtcattgttgcttatcaactttatttgcttggtgattgaggaatgtattcttgcctctccttttgttgcagttagcaaaagaggggatttgtttcaactgtgttttttatttcaaaacaaaatcttgccagctaatgcaatcttgatttcatccaacatctctaatcaagatttctcgatgagggttccatcacccttcagtcacattatcatagcatcatatatctagactttaagcattttttacatccttgtgttcatcgtgttttatattttcttccatgatttattgtttcatgtgcatccagccttggcactgtgcatcaagaaaatatttaccacattatttcatcttttgatataaacagcgaagaaggtaaagtgcgtaaggttctaaaaattgagccaacaccagatggcaatggtcgctttttcaacctcaaatcggcttatcaacgttgatgagagcatttacatccctataaccaagggagagtttgctgtcattgtatcaactttcaattacatcataccgcacctcatgggctggagcacatttgtaagttcaatcaaacccgaggagtcacggccatacagcaggccgcagtccacgtctgagtacgaatggcgaaggtgatgtgttgatgaactacagcaaaatggctgagacccacactgaagggatgagattattggtattgtttggctgggtaatctcagatgtggttagttgatggatgcctttttggggtactccttttgtttcctttctagttcagcaggcaggtagcactacttgtatccagagtttcacggggcggttggggagggggcatattttgggcagcaaacctcagttctgacatggaatgacgcagtcacgcagcaggggcggttgtgaatctgctccgtaaggccgtgactccagtgatagcgggacgcagctgacagatgtttgggttgctggggaagggttggcctgaaattgttgcttgcatacacgagattattgtgtacatgtagtctgcgactctgcgttacccccttgatgaatgtccgccctgtggaactgtggtgtttttgctgatgattttgctgaattcaaaagcttaaaccattagaattagaaagagagatac

SEQ ID NO: 212145 - DNA, 2708 bp, Zea Mays
ctctcacagtcacagcatccttccttgcttctcgtctcgtcgcctctcggagatcagaaagagaacaccggacacctagcctgcgcccttgccttccctccgcgcgcgcgtgctatctatggcgatggaagacgtcgcgggtgcctcctcctcctcggtggcggccgccgcctccgaccccacgcacggctggcagacggtgtcgtaccccaagcgccaccgcaagcaggcgcatcagccaccccgcgccatggctcccgatctggcgctgcaggccaacggcaaaggctccggtgtcttcgacgccgtcgagaagcgctcccaggagcgccaccgcgcgctgcagcagcagctcgcatccagggcggccgacctcgacgacgcgcggatcgccccggtcacaggcggcgcttactccgacgactccgactccgacgaggccaccgccccgcgccaggtgggggaggtgaagaagcctaagaagcctaaaaagcctaaggtgacggtcgccgaggctgccgccctgatcgacgccgagaacctcgcagcgcacctcgtcgagatctcgtcatcatacgagaatcaacaggacattcaactcatgaggtttgctgattactttggccgggcatttgtagctgtaagcgcatcccaatttgcatgggcaaagatgttcaaggaatcaacagtgtctaagatggttgacatcccactgtgccatattcctgaggctgtcatcaagactgcgagtgattggatcagtcaaagatcttatgatgccctgggagactttgttttgtggtgtatagatagcatcatgtctgaattgtcaggcccatcagcaggacctaagggttcaaagaaggttgcccaacagtctccaagggcccaggttgcaatctttgttgttcttgccatgactttaagaagaaagcctgatgtacttgtaaatgttatgccaaagataatgggaaacaataaatatcttggacaggaaaagcttcccatcattgtctggtttattgctcaggcatctcaaggtgacctagtgactggcatgttttgctgggctcattttctatttcccacgttatgtgcgaagccaagtgggaatccccttgcaagagatttggttttgcagttgcttgaaagaattttatctgtcaccaaagctcgttctatcttattgaatggtgctgttagaaagggggaacgcctagttccccctgtttcatttgacttgttcatgagagccacatttccggtttctggtgctcgggtgaaggctacagaaaggtttgaagtagcttatcgaacaatcaaggagttggctcttgccggttctcctggctctaaaactgtgaaacaagcatcacagcaacttttacctttgtgtgcaaaagcaatgcaagaaaacaatgcagagctcaccagggaggctgttgatgtgttcatttggtgcttgacacaaaatgcagagtcctacaagcagtgggaaagaatttatcctgaaaatactgaagccagtgttgctgtcctgagcaaaattgtgattgattggaaggatgtgtctcctaagctcagttctgaagctctcaaggcaacagtgaagaacttgaaggctaagaatgaggcagcgctggagtcagcaacagatgctggaaagcaggcatctatcaagaagcagacaagcactgcaagacttgagcaggggtcagagcagctgctcggaggccggcctggccctgccctgggtgtgctcgccactgtcgcagagtgctcagtggaacccgcggcacaaactacaaagggacctgactcgaatggcagctcgtcacctctcccacctgtcctccccagcgtctgcttccctcctcggccccgagccatggcgccctgcgcgtccccgtccgccctcgcgctctccgccagcacgcgggtcagcagcttcccactgacgctgcgcccgcggccgcggccggaggcgcgtgtgccgcgcgcgcccggcggcgcccagctccgcccggcgaccgcgtgctcttggccgcgccccttgctgcccgagctcgcgccggcgttccctcgtgccggcgcccgcagcgccggcagaccgcagccgctgttccggccccgcgcaatgatgacgacgtctcagatcgccagctgcgccttcaccgtgggcacggtcgccgtcctccccttctacacgctcatggtcgtcgcccccaacgccgacatcaccaaacgcacggtggagagcagcgccccctacgtcgccctaggcctcctctacgcctacctgctctacctgtcttggacccccgacacccttcgcgccatgttcgcgagcaagtactggctccccgagctgccgggcatcgtcaggatgttcgcgagcgagatgaccgtcgcctccgcatggatccacctcctagcagtcgatctcttcgcggcgaggcaggtctaccacgacggtctcaagaacaacatcgagaccaggcattcggtctcgctgtgcctgctcttctgcccggtcgggatcctggctcatgtggtaaccaaggtattggcaggggcagctggccgctcacattgatgattggaattgggtggttgtatctaggattcccgttttgtttagctggtggagtttatgagatctggatatgaataaagcttgttcaaggcactgattctttcaatgtggg

SEQ ID NO: 212146 - DNA, 3223 bp, Zea Mays
ctcgtctctcacagtcacagcatccttccttgcttctcgtctcgtcgcctctcggagatcagaaagagaacaccggacacctagcctgcgcccttgccttccctccgcgcgcgcgtgctatctatggcgatggaagacgtcgcgggtgcctcctcctcctcggtggcggccgccgcctccgaccccacgcacggctggcagacggtgtcgtaccccaagcgccaccgcaagcaggcgcatcagccaccccgcgccatggctcccgatctggcgctgcaggccaacggcaaaggctccggtgtcttcgacgccgtcgagaagcgctcccaggagcgccaccgcgcgctgcagcagcagctcgcatccagggcggccgacctcgacgacgcgcggatcgccccggtcacaggcggcgcttactccgacgactccgactccgacgaggccaccgccccgcgccaggtgggggaggtgaagaagcctaagaagcctaaaaagcctaaggtgacggtcgccgaggctgccgccctgatcgacgccgagaacctcgcagcgcacctcgtcgagatctcggtaacaccgcatcaaaacctctcctctccgtcgagttcctgcttgaaaatcagatcttgggtcgacggtccggatcgaaggttttgtccgtttcttagggatcggatctggatagggtttagcaatggatcttgctggacttcatgaaattccgacgaaatgctaggtcctacgggattttggatcaagttgaatcaaaattctatctgttttacctgaaagtcgaattttaggatgtaaagatgggatgtcggggagctttgggttttggtgctaggagtagatcctaccaaaggttggtacaccttctgctgtatgcatattctgattatttgttgtgtgcagtcatcatacgagaatcaacaggacattcaactcatgaggtttgctgattactttggccgggcatttgtagctgtaagcgcatcccaatttgcatgggcaaagatgttcaaggaatcaacagtgtctaagatggttgacgaggtttatgttttcatgttacattactgtgctgtagtcgcacgtagtgatgtactcgagattcatgcttggtgccaaaatttggaaaatccatgcattaatgtcttcggtttgagaaaccgttatgacacttttgtcgtatcttaacgaactgagagaaccaaccgagatcccactgtgccatattcctgaggctgtcatcaagactgcgagtgattggatcagtcaaagatcttatgatgccctgggagactttgttttgtggtgtatagatagcatcatgtctgaattgtcaggcccatcagcaggacctaagggttcaaagaaggttgcccaacagtctccaagggcccaggttgcaatctttgttgttcttgccatgactttaagaagaaagcctgatgtacttgtaaatgttatgccaaagataatgggaaacaataaatatcttggacaggaaaagcttcccatcattgtctggtttattgctcaggcatctcaaggtgacctagtgactggcatgttttgctgggctcattttctatttcccacgttatgtgcgaagccaagtgggaatccccttgcaagagatttggttttgcagttgcttgaaagaattttatctgtcaccaaagctcgttctatcttattgaatggtgctgttagaaagggggaacgcctagttccccctgtttcatttgacttgttcatgagagccacatttccggtttctggtgctcgggtgaaggctacagaaaggtttgaagtagcttatcgaacaatcaaggagttggctcttgccggttctcctggctctaaaactgtgaaacaagcatcacagcaacttttacctttgtgtgcaaaagcaatgcaagaaaacaatgcagagctcaccagggaggctgttgatgtgttcatttggtgcttgacacaaaatgcagagtcctacaagcagtgggaaagaatttatcctgaaaatactgaagccagtgttgctgtcctgagcaaaattgtgattgattggaaggatgtgtctcctaagctcagttctgaagctctcaaggcaacagtgaagaacttgaaggctaagaatgaggcagcgctggagtcagcaacagatgctggaaagcaggcatctatcaagaagcagacaagcactgcaagacttgagcaggggtcagagcagctgctcggaggccggcctggccctgccctgggtgtgctcgccactgtcgcagagtgctcagtggaacccgcggcacaaactacaaagggacctgactcgaatggcagctcgtcacctctcccacctgtcctccccagcgtctgcttccctcctcggccccgagccatggcgccctgcgcgtccccgtccgccctcgcgctctccgccagcacgcgggtcagcagcttcccactgacgctgcgcccgcggccgcggccggaggcgcgtgtgccgcgcgcgcccggcggcgcccagctccgcccggcgaccgcgtgctcttggccgcgccccttgctgcccgagctcgcgccggcgttccctcgtgccggcgcccgcagcgccggcagaccgcagccgctgttccggccccgcgcaatgatgacgacgtctcagatcgccagctgcgccttcaccgtgggcacggtcgccgtcctccccttctacacgctcatggtcgtcgcccccaacgccgacatcaccaaacgcacggtggagagcagcgccccctacgtcgccctaggcctcctctacgcctacctgctctacctgtcttggacccccgacacccttcgcgccatgttcgcgagcaagtactggctccccgagctgccgggcatcgtcaggatgttcgcgagcgagatgaccgtcgcctccgcatggatccacctcctagcagtcgatctcttcgcggcgaggtctaccacgacggtctcaagaacaacatcgagaccaggcattcggtctcgctgtgcctgctcttctgcccggtcgggatcctggctcatgtggtaaccaaggtattggcaggggcagctggccgctcacattgatgattggaattgggtggttgtatctaggattcccgttttgtttagctggtggagtttatgagatctggatatgaataaagcttgttcaaggcactgattctttcaatgtggg

SEQ ID NO: 212147 - DNA, 2016 bp, Zea Mays
ccgaactgcactgcagactgcagagcacctctcctgtctcctcatctcacgctgacaagatccaatcacgacgctaatcagtcgtcctaattaatcggcggccccgtgatcggatcgtacccgccgcagatcaccactgtccaagtgcccagtcgtagatcccgtgatcttttttttctcggtggggttgctgctgcggcttgaaagatgacggagatggtggtggcggctcggacgccggcccccgcggcggggaggtggggcgcggcgccgccgcaggagctgctggagaggctcaaggactacggccaggagggtgccttcgccttctgggacgagctcgcgcccgaggagcgcgaccgcctcatccgggacattgagagcctagatcttcctagaattgatcggattgtccgatgctcgcttagatcacaaggtgctcctataccaacctttgagcctgttcctgagtcaagtgtctcgacagtggatgacagaactcctgaggacaaagaaaggtggtggaggaggggcttgagagccatttcagaggggaagttggctgttgttttattggctggtggccaggggactaggcttggcagttctgaccccaagggatgtttcagtatcgggctcccatctaggaagtcacttttccaactacaagctgaacggattttatgtattcagaagctggctgcacagtgcactgatgccccaggtagcacagtgcaaattcactggtatataatgacgagtccttttaccgatgaagtgacccgaaagttctttgaaacccacagatattttggtttggagcctaatcaagtgacatttttccaacagggtactattccatgtgtatctcatgatggaagatttattatggagacaccatataaggtagcaaaggctcccgatggcaatggcggagtatatgctgctctaaaatctaaaaggttgctcgatgatatggctgcaaaaggtgttaagtatgtagattgctatggagttgataatgtattgatccaacattcctaggatacttcattgacagaggtgtatctgctgctgctaaggttgtcaggaaggcatatccacaagagaaagttggagtatttgttcagcgtggaaagggtggacccctctctgtagttgaatacagtgaaatggatgcagctatgacaactgaaatcaatcaaactactggccgccttcgttattgctggagcaatatctgcttgcatatgtttactttggattttctgaaccaagtgacaaacagtcttgaaaaggatagcatttaccatctagccgagaagagaattccttcagtccatgggtacacatcaggattaaagcttgaacaatttatatttgatgtattcaactattctccttcaacagctctttttgaggttttgcgtgaggaggaatttgcgccagtgaagaatgctaatggtgcaacttatgacactcctgacagtgccagattaatgctgcttcggctacatagccgctgggtggttgctgcaggtggcttcttgactcattctgtgcccttgtatatgacaggagttgaagtttctccgctttgctcttatgctggagagaatctagaagctatatgcagtggaagaacattccatgcaccaagtgagatttcattctaggcatagtagttgttgcaagcaatctgaatacaggaagatgagatcaggccaattttgattacaacatgactactcttgcaaatagaatgttgatattagtaaactattgtatgttatgcaaggatcaaatattgtaacgcaacacctgaagttgcctcctttctcccctagcattaatgtgtatctgcctttcgaatgtagattatgacatgcttttgtgtaataattttttttgaaaacagcaaatgtaccaaatatttattatctttgaacaattgtaattcttgattctatgaactatgatgtaagaaaaatcaaacaatgagatgttctattttct

SEQ ID NO: 212148 - DNA, 1541 bp, Zea Mays
ttttttccttacaagcccacttcgtgttctagagcacgaactgggcttgagagccatttcagaggggaagttggctgttgttttattggctggtggccaggggactaggcttggcagttctgaccccaagggatgtttcagtatcgggctcccatctaggaagtcacttttccaactacaagctgaacggattttatgtattcagaagctggctgcacagtgcactgatgccccaggtagcacagtgcaaattcactggtatataatgacgagtccttttaccgatgaagtgacccgaaagttctttgaaacccacagatattttggtttggagcctaatcaagtgacatttttccaacagggtactattccatgtgtatctcatgatggaagatttattatggagacaccatataaggtagcaaaggctcccgatggcaatggcggagtatatgctgctctaaaatctaaaaggttgctcgatgatatggctgcaaaaggtgttaagtatgtagattgctatggagttgataatgtattggtccgtgttgcagatccaacattcctaggatacttcattgacagaggtgtatctgctgctgctaaggttgtcaggaaggcatatccacaagagaaagttggagtatttgttcagcgtggaaagggtggacccctctctgtagttgaatacagtgaaatggatgcagctatgacaactgaaatcaatcaaactactggccgccttcgttattgctggagcaatatctgcttgcatatgtttactttggattttctgaaccaagtgacaaacagtcttgaaaaggatagcatttaccatctagccgagaagagaattccttcagtccatgggtacacatcaggattaaagcttgaacaatttatatttgatgtattcaactattctccttcaacagctctttttgaggttttgcgtgaggaggaatttgcgccagtgaagaatgctaatggtgcaacttatgacactcctgacagtgccagattaatgctgcttcggctacatagccgctgggtggttgctgcaggtggcttcttgactcattctgtgcccttgtatatgacaggagttgaagtttctccgctttgctcttatgctggagagaatctagaagctatatgcagtggaagaacattccatgcaccaagtgagatttcattctaggcatagtagttgttgcaagcaatctgaatacaggaagatgagatcaggccaattttgattacaacatgactactcttgcaaatagaatgttgatattagtaaactattgtatgttatgcaaggatcaaatattgtaacgcaacacctgaagttgcctcctttctcccctagcattaatgtgtatctgcctttcgaatgtagattatgacatgcttttgtgtaataattttttttgaaaacagcaaatgtaccaaatatttattatctttgaacaattgtaattcttgattctatgaactatgatgtaagaaaaatcaaacaatgagatgttctattttct

SEQ ID NO: 212149 - DNA, 1905 bp, Zea Mays
cattttcagggaggcagcaagagctgcagctggtgtagctttcgccatggttaaagactacgaattgttataaggtaggcacacgcatcactggaaatcgcgtggcccatctccacttgtgaaggcaatgccggtatagtaaccgttttccttctgaaagacagatcacgccaatacatgtatgggttatttttctttacaaaaaggaaggctctcgtcaactattatcactactaacagcatcttgtactttataatcttgttgtgccattgtttgttcactgtaaacgcgacagcgatgtcctgcaaaaaactgtcgagtgtcgacaaactgacaggttgtgacctgtttctcttcctggcgaaaatgtactttattttgtatgtgcgtgcggttggcgagacctcgagagcacgcgcgtgcttgcatagaaacatatatgcgcatggcggcatgggcgttggagaagggactgccggacagcgagagagatcccaccggttgcattattcagcagcgtgggagcgcgtgacgggggcagcggctaccgagggaactacttcctgtctctgctcgattcgaagaacgtgacgccagagatgttcgaggacgacgtcgtcgttcttcccgcggcgtcaccgtctcgcgactacctcggagtcggaggaggggcggccgccgccgccagcaacatggccggcccagccgccgcctatggcctcctcgacccgtactactctcctgttgttgccagccgtgctcctccagtcgaccatgagacggcgagctcgccactcgtgtactcgggggacggtgtggtgcgcgggaccagcatgccatgctacgacgacgaccacgaggagaaacggccaactggtggcaggcagccgcagggttttggagctcccgcggccgcgtttctgcaggaaatgatgatcccgagccgagtggagacgaagctccagagtggcctgggttatttaggcatggtgtctcaaagtcgactcgagacctcctttggcgtcgtggggagcttgccggatgctgctggttctttcagtgacgagtacaacagcaacaggtcaagtgcggacttcatgtccagcaacagcgacagactggagcagcgggtgggcggtagcagcagtggaagaggagctgccacgaggaggaaatcagatggagggcttggaggaaacacgaagaaatctaagcaggaggcttcccccaagcagcctcaagcgcccagagtgaagataggagagaagatcacagctttgcagcaaatcgtgtcacctttcgggaagactgatacatcatcggtgctgtttgaaacgatcgagtacataaaatttcttcatgagcagatccggatgtttagtgaaccgtacatgacgaaaagcacgtacaagggtcacattggactcagaggcgaagaggaggaaagcgggacggggcatgatttgaggggcagggggctctgcctggtccctgtttcgctgacctcgcaagcataccaggatgacaccctgccggactgctgggcgcccgcgtacaggggctgcctgtaccgatgagctcggcatggcgacgactgcatggttaagattcagctaggatctgcaacggctagtcgttggaaactcagaatgatgtgcttgtttctccttgttttattgtcctctactgtagtacttcctttagtagatttccagtgtagcccggaacaacaagaatgtataggcagcaaatcaggccttggctctcagaaaagccagtagcagtagcagaggtcaggcagtcagatgacgatttgccgacacagctcacagcccataattccaaacgttctcggtcacagcggtcacatataggcgtatattgaaagtgttcctaaaggaaat

SEQ ID NO: 212150 - DNA, 1146 bp, Zea Mays
atgctatccaactttccttgtcggtcctgtggcaggcaggtccaagcaaggaggttttggcaccatacaagatcgtcgaaattgcggaaatgggaggtgtaattagtggtgactcaccaaggcacacctcgccggcatctaagttagagaagaagatggttgaagccatgcagcagagagcattaaaaggaacctcagtgaaatcattgaacagtgtcatcatgaaatttcctaagatcgacgagagtttgagaaaatgcaggactatctttcagcaatttgatgaagattccaatggtgaaatagatcagctggaacttaagcattgtttccaaaatttgggcattgaatcgactgaccaggagataaaagatctgtttcaggcatgtgacatttatgagaacatgggcatgaagttcaatgagttcattgtcttcctgtgccttgtttatcttctagatgatcctgcagtgtctgaagttagaaaaagaatggggttaggtagccttgaaccaacatttgaaacattggtcgagtcttttgtcttcttggacaagaacaaagatggatatgtcagcaagagcgagatgatacaagcaataaatgagactattggaggagagcgctcttctgggcgcataggcatgaaaagattcgaggagatggactgggacaagaatggaacggtgaccttcaaggaattccttttcgctttcactcactgggtggggatcaataatgaagaagacgaggacgaagaagaatgagcgtgtcggctgaaggagattcctttccgaatcgaccgagccagccagccagcccccctcaggggaggcctccagcagctccctcctgccgtggatcagaagcggtagagctcatgtgttctctgtgtgtgccgagctgatggtagatgttcatgttcgtataaatagaatgaaacactagccgtgtcaagggatttgctgataaaaaaaaaggttacgctggtcagacgctgctcagttaattaggttaccttgtcattaataaagtatttgcagtgtgtttggaaaatgtaaaactgcgaatggtactactaatcctctttacttcgaagttggttggttggcaggttgtctgtctcttctgttcattttgtggaag

SEQ ID NO: 212151 - DNA, 1086 bp, Zea Mays
aaacatgcctgcaactgcaagtggatcaagtgcatcacacctttagggaggccccttggacagcagtttgtgctgcaaattctatatagctctgtcgcagcatggcctcggtgggcgtggcacgctcttctttgggatttcagaatggcacaagttctagcagtgacccagatcgtcttcccaacgagttgggcagtatgagcataagggacgacaaggacgttgaagatattgtagtcaatggcaatggggcggagcctggtcatatcatagtgaccagcattgatgggagaaatgggcaggcaaagcagaccattagttacatggctgagcgggtggtaggtcatgggtccttcggaaccgttttccaggccaagtgtcttgaaactggtgagaccgtagctataaaaaaggttcttcaagacaagagatacaagaatcgtgagctgcaaaccatgcgagtgcttgaccacccaaatgtggtggctctaaagcactgtttcttctcaaagactgagaaagaggagctttacctcaatttggtgcttgagtatgtaccggagactgctcatcgtgtcatcaaacattacaacaagatgaaccagcgcatgcctttgatttatgcaaaactgtatatgtatcagatttgtagagccttggcatacattcacaacagcattggagtgtgccacagggacattaagccgcaaaatctcctggttaatcctcatacccatcagctaaaattgtgtgactttggcagcgcgaaagttctggtactacagagctccagagctcatatttggtgctactgaatacacaacagccattgatgtttggtctgctggctgtgtgctcgctgagctgcttctaggacagcctctgttccctggagaaagcggtgttgatcagcttgttgaaatcatcaaggttctgggcacacccacacgtgaagaaattaagtgcatgaatccaaattataccgagtttaaattcccgcaaatcaaagctcacccatggcataagatattccgtttaaagatgcctgctgaagcggtagatctcgtgtccaggcttctacgaatc

SEQ ID NO: 212152 - DNA, 4452 bp, Zea Mays
atgaggcctggatcgacccccggaccatcttcgcgccggtgcatccatggctccgccgccgcgctcccaacgctgctgctgctgcttcttcttcttctggctgcatcgtccgcgcaagctcagcaaacgtcaaggatgaagaccgatccagtcgaagcggcggcggtgaacgcggtgttcgccaagctcggccaggcggctacgtcggcatggaacatcagtggcgacccctgcacaggcgccgccacggacggcacgaacatcgacaacgaccccactttcaacccggccatcaagtgcgagtgctccgtccagaacaaccgcaccgtctgccacgtcaccaagctgaagatatacgcactcaatgcatttggccccataccacaggaactgcagaacctcacgcgcttgaccaatctgaatttagcacaaaattacttaaccgggcctttgccatctttcctcgggaatttgactgctatgcagtacatgagtttgggcatcaatgcattgtctggatctgttccaaaggagcttgggaaccttgtgaatcttgtatctctaggcattggctcgaactacttaaatggttcccttccttcggagttgggaaacctggcaaaacttgagcaattgtatattgacagtgccggcctaagtggtcccctaccgtcatcgttttctagactaacaagaatgaagacactgtgggcatcagataatgattttactggggaaataccagattatattgggagctggactaatttaacagaactaattttgaggaattgcaggatatctgatagcctggcatcagtgaacttttcacagtttgcaaagttaaacttattggatttgagttttaacaatatcacaggccaagttccagaagcccttgtgaaattgaattcactcagcttcttatttctcggtaataatagtctttcaggaagcctgccgagctctataggaacttctcttaaaaatttagatttttcttacaaccagctgtcaggcaactttccttcttggactactcagaacaatttgcaactgtgagtattgatttctgaaacttcaaatgaccaccttgtattaccttcagggctgtcgtgtcttcagagagacacaccctgttttcttggctctccacaatctgcctctcttgctgtggactgtgggagcagtagatctatatctgggtatcaacctgatgctgccagtcttggtgctgcatcctattatgttacaggagcacaaacgtggggtgttagcaatgtaggcaagttcatggaagcatcaaatggaagttacataatttacagcttacaccaatttcagaacactctagattcagaactattccagacagcaaggatgtcgccatcatctttgagatactacggtattggactcgagaatggaaactacacagtcacacttcaatttgcagagtttgactttgaagattcacaaacttggaagagtgttgggagaagggttttcgatatctatctccagggcgagcgtaaggagaagaactttgacataaggaaggcatcaggggggaaatcttacactgctgtcgagaagcagtatattgttcctgtcactagaaactttcttgagattcatcttttctgggctggcaagggcacttgttgcattcctgctcaaggctactacgggcctgcaatctcagctttgagtgcaactccaaattttacccctacagtgcgtaattctgcacagaagaagaacagtagtaaaacaggtgtaattgttggggttgtgattggtgcagcagttttaggagtactagcacttgctggaatctgtatgtggaggcagaaaaggagaaaactattattggagcaacaagagctttacagtattgttggaagacccaatgtatttgtttatggtgagctaaggaccgctactgaaaattttagttccaataaccttcttggtgaaggaggatatgggtcagtttataagggtaaattagctgatggaagggtggtggctgtaaaacagttatctgaaacatctcatcagggaaaacagcaatttgcagccgaaatagaaactatttctcgagtgcaacaccgtaatcttgtgaagttgtatggttgctgtcttgaaggaaataaaccactgttagtttatgagtacctagagaatggaagccttgataaagcattgtttggaaacgggaaactgaacctagactggccaacacgctttgagatatgcttaggcattgcaagaggcctcgcttatctccatgaagagtctagcatccgtgttgtgcatagggacataaaggctagcaatgtcttgcttgatgcaaatctcaaccctaagatctcggatttcgggctcgccaaactttacgatgacaagaagactcatgtcagcaccaaagttgcgggtacatttggttatcttgcacccgagtacgccatgaggggtcatatgaccgagaaagttgatgtgtttgcatttggagtggtcatattggagactctagctggaaggccaaactttgacaatacgcttgatgaagacaaggtttacattttagaatgggtctggcaactgtacgaagaaaaccaccctctggacatgctcgacccgaagctcgcagaattcaacagcgacgaggtgctccgtgccatccacgtggccctcctctgcacccagggctcgccgcaccagcgcccgtccatgtcacgggccgtgtcgattctggcgggagacgtggaggtgggccaggtggcgaacaaacccagctacatcaccgagtggcagatcaagggcggcaacaccagcagcttcatgagcagcaacgtcagtgggcagtcgggcgtggcgccgaggtcggcctcgcacgcctcgtcgcagttcctgggctctgtcatcgaagaaggccggtgatgatgagtagcaagttttctcaagcgacggactgttccttgtaattaaacgcacgcacgttacaaaaggctctcggattatctggttttgacctttttcgttttccttttgaaaattttcggtttgatttcgatttgtgcagttggaatttgtatgcaaatgatgatattggatggttaagtctatttgtaattttggatgttttgaggtgtgtgtgtatatatatgatgtgatctgcaagaactaagtcacaattagatattgttgttatattaattttcggtcacgcatagtattcatactgtagttagcgggaaaatcccaatttatacagttaaaatgcgcgttacatatttttttttgtgtgtggatggacaacacacaactgaccgaccgacagactgaagatcagctttatttgaacggtcgagctgagtgaggtactgaggtaggactaggagggtggaagcggaagatagagagagatgatgacgatgacgaggtgctcttgctgcgtccatggcgctgctgtgtcgacgtccatgccgctgctgttgtttcttgtactagtcgcattcgcaaccgccggggctcagcaagtatcaaccaagaggacagatccaaccgaaggtaatcgataagtccgtttcatcattcgttttcttttggttgcaaatgtaggagggagaggagaaagggcgaaaatataacaacgcgccagtgaaaggctttgatctaaatcaaagtttttaagaccttaaggactagtttggaaacctcaatttttcaagtaatttctatttttctacgagaaaatgaaataatttctcatagaaaataaaaatcacttgaaaatttgtggttcccaaatcccaaactagccctaaaaatacttcctctatagtaaaatatagttatgtatagttatcttttttgtcatatatatatatatatatatatatatatatatatatatatatatatatatatatatatatattacattcgtcagttaacagttaattaatatatatatatactaggtaaatactcgtgcgttgcaacagggtaaaaatagtgcaactataacatatgtatggacatgtgttgtgcagaaaacaagcaaatcactgtgataaactcataatgacttgtcaccttgttcgaagaggaaaaggtgatccttagtcttacagctttaagaagagaaccatacatgtagcaccgcattactccaataatgaaacaggtgtaggattatgttgtctctgtctgggaaagacatgtgcaaagattaaaaacttcatttcatcactaagaaaaagcataaaagtgattaagaacactaccatcatagatctcttgattttcaagatcactgaggacctcgtaagcctgagttagctcctagaactaaaacaaattcatgagttcttagttttcatcacaatcataaaccaacagccccaatcgaccatttatacaaccttacaactaaacattgtc

SEQ ID NO: 212153 - DNA, 4777 bp, Zea Mays
agaaaaatagaggtggtggtaccacttgcaattgcaacgttcggtggttgagcgagcgagtacggatactcgtgtctgcgctgcgcaccgagctgagacacgtcgtattcaaagggagaggccgcaaggcaccgagtcgagccgctgctcgagcagacagggacgcaaacgcaaggagacgatgaggcctggatcgacccccggaccatcttcgcgccggtgcatccatggctccgccgccgcgctcccaacgctgctgctgctgcttcttcttcttctggctgcatcgtccgcgcaagctcagcaaacgtcaaggatgaagaccgatccagtcgaagcggcggcggtgaacgcggtgttcgccaagctcggccaggcggctacgtcggcatggaacatcagtggcgacccctgcacaggcgccgccacggacggcacgaacatcgacaacgaccccactttcaacccggccatcaagtgcgagtgctccgtccagaacaaccgcaccgtctgccacgtcaccaagctgaagatatacgcactcaatgcatttggccccataccacaggaactgcagaacctcacgcgcttgaccaatctgaatttagcacaaaattacttaaccgggcctttgccatctttcctcgggaatttgactgctatgcagtacatgagtttgggcatcaatgcattgtctggatctgttccaaaggagcttgggaaccttgtgaatcttgtatctctaggcattggctcgaactacttaaatggttcccttccttcggagttgggaaacctggcaaaacttgagcaattgtatattgacagtgccggcctaagtggtcccctaccgtcatcgttttctagactaacaagaatgaagacactgtgggcatcagataatgattttactggggaaataccagattatattgggagctggactaatttaacagaactgcggtttcaaggcaattcatttcaaggtccacttccagccactctttctaatctcgtccaactaacaagcttacgaataggtgacattgtaaatggaagttcttcaatgatattcatcagtaacatgacatctttgaacacattaattttgaggaattgcaggatatctgatagcctggcatcagtgaacttttcacagtttgcaaagttaaacttattggatttgagttttaacaatatcacaggccaagttccagaagcccttgtgaaattgaattcactcagcttcttatttctcggtaataatagtctttcaggaagcctgccgagctctataggaacttctcttaaaaatttagatttttcttacaaccagctgtcaggcaactttccttcttggactactcagaacaatttgcaactgtgagtattgatttctgaaacttcaaatgaccaccttgtattaccttcagggctgtcgtgtcttcagagagacacaccctgttttcttggctctccacaatctgcctctcttgctgtggactgtgggagcagtagatctatatctgggtatcaacctgatgctgccagtcttggtgctgcatcctattatgttacaggagcacaaacgtggggtgttagcaatgtaggcaagttcatggaagcatcaaatggaagttacataatttacagcttacaccaatttcagaacactctagattcagaactattccagacagcaaggatgtcgccatcatctttgagatactacggtattggactcgagaatggaaactacacagtcacacttcaatttgcagagtttgactttgaagattcacaaacttggaagagtgttgggagaagggttttcgatatctatctccagggcgagcgtaaggagaagaactttgacataaggaaggcatcaggggggaaatcttacactgctgtcgagaagcagtatattgttcctgtcactagaaactttcttgagattcatcttttctgggctggcaagggcacttgttgcattcctgctcaaggctactacgggcctgcaatctcagctttgagtgcaactccaaattttacccctacagtgcgtaattctgcacagaagaagaacagtagtaaaacaggtgtaattgttggggttgtgattggtgcagcagttttaggagtactagcacttgctggaatctgtatgtggaggcagaaaaggagaaaactattattggagcaacaagagctttacagtattgttggaagacccaatgtatttgtttatggtgagctaaggaccgctactgaaaattttagttccaataaccttcttggtgaaggaggatatgggtcagtttataagggtaaattagctgatggaagggtggtggctgtaaaacagttatctgaaacatctcatcagggaaaacagcaatttgcagccgaaatagaaactatttctcgagtgcaacaccgtaatcttgtgaagttgtatggttgctgtcttgaaggaaataaaccactgttagtttatgagtacctagagaatggaagccttgataaagcattgtttggaaacgggaaactgaacctagactggccaacacgctttgagatatgcttaggcattgcaagaggcctcgcttatctccatgaagagtctagcatccgtgttgtgcatagggacataaaggctagcaatgtcttgcttgatgcaaatctcaaccctaagatctcggatttcgggctcgccaaactttacgatgacaagaagactcatgtcagcaccaaagttgcgggtacatttggttatcttgcacccgagtacgccatgaggggtcatatgaccgagaaagttgatgtgtttgcatttggagtggtcatattggagactctagctggaaggccaaactttgacaatacgcttgatgaagacaaggtttacattttagaatgggtctggcaactgtacgaagaaaaccaccctctggacatgctcgacccgaagctcgcagaattcaacagcgacgaggtgctccgtgccatccacgtggccctcctctgcacccagggctcgccgcaccagcgcccgtccatgtcacgggccgtgtcgattctggcgggagacgtggaggtgggccaggtggcgaacaaacccagctacatcaccgagtggcagatcaagggcggcaacaccagcagcttcatgagcagcaacgtcagtgggcagtcgggcgtggcgccgaggtcggcctcgcacgcctcgtcgcagttcctgggctctgtcatcgaagaaggccggtgatgatgagtagcaagttttctcaagcgacggactgttccttgtaattaaacgcacgcacgttacaaaaggctctcggattatctggttttgacctttttcgttttccttttgaaaattttcggtttgatttcgatttgtgcagttggaatttgtatgcaaatgatgatattggatggttaagtctatttgtaattttggatgttttgaggtgtgtgtgtatatatatgatgtgatctgcaagaactaagtcacaattagatattgttgttatattaattttcggtcacgcatagtattcatactgtagttagcgggaaaatcccaatttatacagttaaaatgcgcgttacatatttttttttgtgtgtggatggacaacacacaactgaccgaccgacagactgaagatcagctttatttgaacggtcgagctgagtgaggtactgaggtaggactaggagggtggaagcggaagatagagagagatgatgacgatgacgaggtgctcttgctgcgtccatggcgctgctgtgtcgacgtccatgccgctgctgttgtttcttgtactagtcgcattcgcaaccgccggggctcagcaagtatcaaccaagaggacagatccaaccgaaggtaatcgataagtccgtttcatcattcgttttcttttggttgcaaatgtaggagggagaggagaaagggcgaaaatataacaacgcgccagtgaaaggctttgatctaaatcaaagtttttaagaccttaaggactagtttggaaacctcaatttttcaagtaatttctatttttctacgagaaaatgaaataatttctcatagaaaataaaaatcacttgaaaatttgtggttcccaaatcccaaactagccctaaaaatacttcctctatagtaaaatatagttatgtatagttatcttttttgtcatatatatatatatatatatatatatatatatatatatatatatatatatatatatatatattacattcgtcagttaacagttaattaatatatatatatactaggtaaatactcgtgcgttgcaacagggtaaaaatagtgcaactataacatatgtatggacatgtgttgtgcagaaaacaagcaaatcactgtgataaactcataatgacttgtcaccttgttcgaagaggaaaaggtgatccttagtcttacagctttaagaagagaaccatacatgtagcaccgcattactccaataatgaaacaggtgtaggattatgttgtctctgtctgggaaagacatgtgcaaagattaaaaacttcatttcatcactaagaaaaagcataaaagtgattaagaacactaccatcatagatctcttgattttcaagatcactgaggacctcgtaagcctgagttagctcctagaactaaaacaaattcatgagttcttagttttcatcacaatcataaaccaacagccccaatcgaccatttatacaaccttacaactaaacattgtc

SEQ ID NO: 212154 - DNA, 4860 bp, Zea Mays
ataagtcatagccataattagattaaaaccacaacaattcgcagcgaatatggcgcatgcctcgttgaccgaacagcattgtagatagaaaaatagaggtggtggtaccacttgcaattgcaacgttcggtggttgagcgagcgagtacggatactcgtgtctgcgctgcgcaccgagctgagacacgtcgtattcaaagggagaggccgcaaggcaccgagtcgagccgctgctcgagcagacagggacgcaaacgcaaggagacgatgaggcctggatcgacccccggaccatcttcgcgccggtgcatccatggctccgccgccgcgctcccaacgctgctgctgctgcttcttcttcttctggctgcatcgtccgcgcaagctcagcaaacgtcaaggatgaagaccgatccagtcgaagcggcggcggtgaacgcggtgttcgccaagctcggccaggcggctacgtcggcatggaacatcagtggcgacccctgcacaggcgccgccacggacggcacgaacatcgacaacgaccccactttcaacccggccatcaagtgcgagtgctccgtccagaacaaccgcaccgtctgccacgtcaccaagctgaagatatacgcactcaatgcatttggccccataccacaggaactgcagaacctcacgcgcttgaccaatctgaatttagcacaaaattacttaaccgggcctttgccatctttcctcgggaatttgactgctatgcagtacatgagtttgggcatcaatgcattgtctggatctgttccaaaggagcttgggaaccttgtgaatcttgtatctctaggcattggctcgaactacttaaatggttcccttccttcggagttgggaaacctggcaaaacttgagcaattgtatattgacagtgccggcctaagtggtcccctaccgtcatcgttttctagactaacaagaatgaagacactgtgggcatcagataatgattttactggggaaataccagattatattgggagctggactaatttaacagaactgcggtttcaaggcaattcatttcaaggtccacttccagccactctttctaatctcgtccaactaacaagcttacgaataggtgacattgtaaatggaagttcttcaatgatattcatcagtaacatgacatctttgaacacattaattttgaggaattgcaggatatctgatagcctggcatcagtgaacttttcacagtttgcaaagttaaacttattggatttgagttttaacaatatcacaggccaagttccagaagcccttgtgaaattgaattcactcagcttcttatttctcggtaataatagtctttcaggaagcctgccgagctctataggaacttctcttaaaaatttagatttttcttacaaccagctgtcaggcaactttccttcttggactactcagaacaatttgcaactgaacttggtggcaaacaatttcgagacgaatagtgtattaccttcagggctgtcgtgtcttcagagagacacaccctgttttcttggctctccacaatctgcctctcttgctgtggactgtgggagcagtagatctatatctgggtatcaacctgatgctgccagtcttggtgctgcatcctattatgttacaggagcacaaacgtggggtgttagcaatgtaggcaagttcatggaagcatcaaatggaagttacataatttacagcttacaccaatttcagaacactctagattcagaactattccagacagcaaggatgtcgccatcatctttgagatactacggtattggactcgagaatggaaactacacagtcacacttcaatttgcagagtttgactttgaagattcacaaacttggaagagtgttgggagaagggttttcgatatctatctccagggcgagcgtaaggagaagaactttgacataaggaaggcatcaggggggaaatcttacactgctgtcgagaagcagtatattgttcctgtcactagaaactttcttgagattcatcttttctgggctggcaagggcacttgttgcattcctgctcaaggctactacgggcctgcaatctcagctttgagtgcaactccaaattttacccctacagtgcgtaattctgcacagaagaagaacagtagtaaaacaggtgtaattgttggggttgtgattggtgcagcagttttaggagtactagcacttgctggaatctgtatgtggaggcagaaaaggagaaaactattattggagcaacaagagctttacagtattgttggaagacccaatgtatttgtttatggtgagctaaggaccgctactgaaaattttagttccaataaccttcttggtgaaggaggatatgggtcagtttataagggtaaattagctgatggaagggtggtggctgtaaaacagttatctgaaacatctcatcagggaaaacagcaatttgcagccgaaatagaaactatttctcgagtgcaacaccgtaatcttgtgaagttgtatggttgctgtcttgaaggaaataaaccactgttagtttatgagtacctagagaatggaagccttgataaagcattgtttggaaacgggaaactgaacctagactggccaacacgctttgagatatgcttaggcattgcaagaggcctcgcttatctccatgaagagtctagcatccgtgttgtgcatagggacataaaggctagcaatgtcttgcttgatgcaaatctcaaccctaagatctcggatttcgggctcgccaaactttacgatgacaagaagactcatgtcagcaccaaagttgcgggtacatttggttatcttgcacccgagtacgccatgaggggtcatatgaccgagaaagttgatgtgtttgcatttggagtggtcatattggagactctagctggaaggccaaactttgacaatacgcttgatgaagacaaggtttacattttagaatgggtctggcaactgtacgaagaaaaccaccctctggacatgctcgacccgaagctcgcagaattcaacagcgacgaggtgctccgtgccatccacgtggccctcctctgcacccagggctcgccgcaccagcgcccgtccatgtcacgggccgtgtcgattctggcgggagacgtggaggtgggccaggtggcgaacaaacccagctacatcaccgagtggcagatcaagggcggcaacaccagcagcttcatgagcagcaacgtcagtgggcagtcgggcgtggcgccgaggtcggcctcgcacgcctcgtcgcagttcctgggctctgtcatcgaagaaggccggtgatgatgagtagcaagttttctcaagcgacggactgttccttgtaattaaacgcacgcacgttacaaaaggctctcggattatctggttttgacctttttcgttttccttttgaaaattttcggtttgatttcgatttgtgcagttggaatttgtatgcaaatgatgatattggatggttaagtctatttgtaattttggatgttttgaggtgtgtgtgtatatatatgatgtgatctgcaagaactaagtcacaattagatattgttgttatattaattttcggtcacgcatagtattcatactgtagttagcgggaaaatcccaatttatacagttaaaatgcgcgttacatatttttttttgtgtgtggatggacaacacacaactgaccgaccgacagactgaagatcagctttatttgaacggtcgagctgagtgaggtactgaggtaggactaggagggtggaagcggaagatagagagagatgatgacgatgacgaggtgctcttgctgcgtccatggcgctgctgtgtcgacgtccatgccgctgctgttgtttcttgtactagtcgcattcgcaaccgccggggctcagcaagtatcaaccaagaggacagatccaaccgaaggtaatcgataagtccgtttcatcattcgttttcttttggttgcaaatgtaggagggagaggagaaagggcgaaaatataacaacgcgccagtgaaaggctttgatctaaatcaaagtttttaagaccttaaggactagtttggaaacctcaatttttcaagtaatttctatttttctacgagaaaatgaaataatttctcatagaaaataaaaatcacttgaaaatttgtggttcccaaatcccaaactagccctaaaaatacttcctctatagtaaaatatagttatgtatagttatcttttttgtcatatatatatatatatatatatatatatatatatatatatatatatatatatatatatatattacattcgtcagttaacagttaattaatatatatatatactaggtaaatactcgtgcgttgcaacagggtaaaaatagtgcaactataacatatgtatggacatgtgttgtgcagaaaacaagcaaatcactgtgataaactcataatgacttgtcaccttgttcgaagaggaaaaggtgatccttagtcttacagctttaagaagagaaccatacatgtagcaccgcattactccaataatgaaacaggtgtaggattatgttgtctctgtctgggaaagacatgtgcaaagattaaaaacttcatttcatcactaagaaaaagcataaaagtgattaagaacactaccatcatagatctcttgattttcaagatcactgaggacctcgtaagcctgagttagctcctagaactaaaacaaattcatgagttcttagttttcatcacaatcataaaccaacagccccaatcgaccatttatacaaccttacaactaaacattgtc

SEQ ID NO: 212155 - DNA, 2281 bp, Zea Mays
aacgtaacaacctcggcttctacgactaggagtcgaagtcgactgacgactcacgactggcgtagcgtaggaggcggcggttccaagcgaccatccaataatcgccaccctcacgcgagaaatccccggcaacttttggggaactacacgtgtatggagttttattagtattccaggggcgtcacaatggcatactttcctgatgaagtagtagggtatatccttggttatgtaacgtcgcatcaggaccgcaacgcggtgtccttggtctgccgggcatggtacgacattgagcgtcatggccgccattcagtgcttgtaagaaactgttatgcggtgtgcccagagcgtgtacacatgcggtttcccaacatgcgtgcactgagcttgaagggcaaaccgcactttgctgaattcaaccttgtcccggcgggttggggtgccactgcaaatccatgggtggatgcgtgcgcccgtgcatgcccaggtcttgaggagctccggctgaagtttatggttgtgactgatgaatgcctcaagttgctttctctatcctttaccaactttaaatcacttgtccttgtttgttgtgaggggttcagtactaccgggcttgctaatattgccaccaattgcaggtttcttaaggaactagacttacaaaagagttgtgtgaaacatcaagaccatcagtggattaattgttttcccaagtcttcaacatcactagaatgcttgaatttttcctgcttgactggggaggtgaatgctgttgcactggaggaacttgttgcaaggagtccaaatcttaaaagtttaaggctgaatcttgcagttccatttgatgttttgtccagaatcctttctcgcacacctaagctagaggatttaggcacaggatcctttttacaaggcaatgaccctgctgcatatgccagtttatgtagagctcttgagaactgcacttcactgaagagtatatctggtttttgggatgctccaggcttttatgttcaaggaattttgtcaaattgcaagatcagaaatcttacatgcttgaatctcagctatgctacattgattcagagtacccagcttatcggtattattcgtcattgtaagaagctccatgtcttatgggggtaaggcttgccttggttattgtttccccagatcccactcatgtggaaccgccaaaattgggtttgttttgtgtttgtcttcacaagaaaaggtgttagatcacattggtgatgagggcttgaaggctgtgtccttttcttgtcctgatcttcaggagttgagggtatatccaagtgttgttgcaccaagaggtactgtgacggaggaagggttggtagccctatcttcgtgtcggaagttacagcatgtgctcttctcttgtgttcgaatgacaaacacggcgctgatgacaatagcaaggtactgcccacggctaacgtccttcagactatgcattcgcaagcccaggtcagcagacgccgtcacaggacagccactggacgaaggctttggggcgatagtgcggtcctgcagaggcctgaggcgtcttgccatgtccggcctcctcacggacagcgtgttcctgtacatcggcatgtacgcggagaagctggagatgctctcggtaacgttcgcgggggacaccgacgacggcatggtctatgtgctcaatggctgcaggaacctcaagaagctggtaatcaaggagagccccttcggtgacgccgctctcctcgcgggcgcgcacaggtacgagtcaatgcgcagtctctggatgtcgtcctgccagatcaccctgggtggctgcaaggcccttgcggccaccatgccaaacatcaatgtcgaggtcatcggtggggcgagctttggtgcgatggatggtggtgtcagcggtgcgaggaaggtggacatgctctacctctaccgtactctggctggacctagatgcgatacgccagggttcgtctcgatattgtgagctgtatctatggctactgttggtggcgttcagggaaacccgatgttcttaaccgtgcctgctgcgggctgtggctgtgctactgtctggtagtgtttcggaaacatgatgtttatttgcgtaaggtagtgtttggttctggaaccattttaagccttgttcagatattcatatacctcatggattggaagtgattagaaaaaaatatgaataattttgacttactatgtattgaaactcacttaatcccctctaatccatatgaaattgagatgaaac

SEQ ID NO: 212156 - DNA, 2380 bp, Zea Mays
aacgtaacaacctcggcttctacgactaggagtcgaagtcgactgacgactcacgactggcgtagcgtaggaggcggcggttccaagcgaccatccaataatcgccaccctcacgcgagaaatccccggcaacttttggggaactacacgtgtatggagttttattagtattccaggggcgtcacaatggcatactttcctgatgaagtagtagggtatatccttggttatgtaacgtcgcatcaggaccgcaacgcggtgtccttggtctgccgggcatggtacgacattgagcgtcatggccgccattcagtgcttgtaagaaactgttatgcggtgtgcccagagcgtgtacacatgcggtttcccaacatgcgtgcactgagcttgaagggcaaaccgcactttgctgaattcaaccttgtcccggcgggttggggtgccactgcaaatccatgggtggatgcgtgcgcccgtgcatgcccaggtcttgaggagctccggctgaagtttatggttgtgactgatgaatgcctcaagttgctttctctatcctttaccaactttaaatcacttgtccttgtttgttgtgaggggttcagtactaccgggcttgctaatattgccaccaattgcaggtttcttaaggaactagacttacaaaagagttgtgtgaaacatcaagaccatcagtggattaattgttttcccaagtcttcaacatcactagaatgcttgaatttttcctgcttgactggggaggtgaatgctgttgcactggaggaacttgttgcaaggagtccaaatcttaaaagtttaaggctgaatcttgcagttccatttgatgttttgtccagaatcctttctcgcacacctaagctagaggatttaggcacaggatcctttttacaaggcaatgaccctgctgcatatgccagtttatgtagagctcttgagaactgcacttcactgaagagtatatctggtttttgggatgctccaggcttttatgttcaaggaattttgtcaaattgcaagatcagaaatcttacatgcttgaatctcagctatgctacattgattcagagtacccagcttatcggtattattcgtcattgtaagaagctccatgtcttatgggggtaaggcttgccttggttattgtttccccagatcccactcatgtggaaccgccaaaattgggtttgttttgtgtttgtcttcacaagaaaaggttgctccctcaactgtatgttaatggtatccttaggggtatgagttgtaaccctgcattgatgatacccttaggattacagttgatatgatacaaccagtgttagatcacattggtgatgagggcttgaaggctgtgtccttttcttgtcctgatcttcaggagttgagggtatatccaagtgttgttgcaccaagaggtactgtgacggaggaagggttggtagccctatcttcgtgtcggaagttacagcatgtgctcttctcttgtgttcgaatgacaaacacggcgctgatgacaatagcaaggtactgcccacggctaacgtccttcagactatgcattcgcaagcccaggtcagcagacgccgtcacaggacagccactggacgaaggctttggggcgatagtgcggtcctgcagaggcctgaggcgtcttgccatgtccggcctcctcacggacagcgtgttcctgtacatcggcatgtacgcggagaagctggagatgctctcggtaacgttcgcgggggacaccgacgacggcatggtctatgtgctcaatggctgcaggaacctcaagaagctggtaatcaaggagagccccttcggtgacgccgctctcctcgcgggcgcgcacaggtacgagtcaatgcgcagtctctggatgtcgtcctgccagatcaccctgggtggctgcaaggcccttgcggccaccatgccaaacatcaatgtcgaggtcatcggtggggcgagctttggtgcgatggatggtggtgtcagcggtgcgaggaaggtggacatgctctacctctaccgtactctggctggacctagatgcgatacgccagggttcgtctcgatattgtgagctgtatctatggctactgttggtggcgttcagggaaacccgatgttcttaaccgtgcctgctgcgggctgtggctgtgctactgtctggtagtgtttcggaaacatgatgtttatttgcgtaaggtagtgtttggttctggaaccattttaagccttgttcagatattcatatacctcatggattggaagtgattagaaaaaaatatgaataattttgacttactatgtattgaaactcacttaatcccctctaatccatatgaaattgagatgaaac

SEQ ID NO: 212157 - DNA, 1175 bp, Zea Mays
aacgtaacaacctcggcttctacgactaggagtcgaagtcgactgacgactcacgactggcgtagcgtaggaggcggcggttccaagcgaccatccaataatcgccaccctcacgcgagaaatccccggtgttagatcacattggtgatgagggcttgaaggctgtgtccttttcttgtcctgatcttcaggagttgagggtatatccaagtgttgttgcaccaagaggtactgtgacggaggaagggttggtagccctatcttcgtgtcggaagttacagcatgtgctcttctcttgtgttcgaatgacaaacacggcgctgatgacaatagcaaggtactgcccacggctaacgtccttcagactatgcattcgcaagcccaggtcagcagacgccgtcacaggacagccactggacgaaggctttggggcgatagtgcggtcctgcagaggcctgaggcgtcttgccatgtccggcctcctcacggacagcgtgttcctgtacatcggcatgtacgcggagaagctggagatgctctcggtaacgttcgcgggggacaccgacgacggcatggtctatgtgctcaatggctgcaggaacctcaagaagctggtaatcaaggagagccccttcggtgacgccgctctcctcgcgggcgcgcacaggtacgagtcaatgcgcagtctctggatgtcgtcctgccagatcaccctgggtggctgcaaggcccttgcggccaccatgccaaacatcaatgtcgaggtcatcggtggggcgagctttggtgcgatggatggtggtgtcagcggtgcgaggaaggtggacatgctctacctctaccgtactctggctggacctagatgcgatacgccagggttcgtctcgatattgtgagctgtatctatggctactgttggtggcgttcagggaaacccgatgttcttaaccgtgcctgctgcgggctgtggctgtgctactgtctggtagtgtttcggaaacatgatgtttatttgcgtaaggtagtgtttggttctggaaccattttaagccttgttcagatattcatatacctcatggattggaagtgattagaaaaaaatatgaataattttgacttactatgtattgaaactcacttaatcccctctaatccatatgaaattgagatgaaac

SEQ ID NO: 212158 - DNA, 2350 bp, Zea Mays
aacgtaacaacctcggcttctacgactaggagtcgaagtcgactgacgactcacgactggcgtagcgtaggaggcggcggttccaagcgaccatccaataatcgccaccctcacgcgagaaatccccgaacacatacgatttctgccagtctgaagttttggactttatgtgagctgttgccaattcaactgcttctgctacacgatccattaactgctttccgatccgtgttctgtgatgtttgccctcttcctcagggccaatttggcaatttgtcagaacacacacaggcaacttttggggaactacacgtgtatggagttttattagtattccaggggcgtcacaatggcatactttcctgatgaagtagtagggtatatccttggttatgtaacgtcgcatcaggaccgcaacgcggtgtccttggtctgccgggcatggtacgacattgagcgtcatggccgccattcagtgcttgtaagaaactgttatgcggtgtgcccagagcgtgtacacatgcggtttcccaacatgcgtgcactgagcttgaagggcaaaccgcactttgctgaattcaaccttgtcccggcgggttggggtgccactgcaaatccatgggtggatgcgtgcgcccgtgcatgcccaggtcttgaggagctccggctgaagtttatggttgtgactgatgaatgcctcaagttgctttctctatcctttaccaactttaaatcacttgtccttgtttgttgtgaggggttcagtactaccgggcttgctaatattgccaccaattgcaggtttcttaaggaactagacttacaaaagagttgtgtgaaacatcaagaccatcagtggattaattgttttcccaagtcttcaacatcactagaatgcttgaatttttcctgcttgactggggaggtgaatgctgttgcactggaggaacttgttgcaaggagtccaaatcttaaaagtttaaggctgaatcttgcagttccatttgatgttttgtccagaatcctttctcgcacacctaagctagaggatttaggcacaggatcctttttacaaggcaatgaccctgctgcatatgccagtttatgtagagctcttgagaactgcacttcactgaagagtatatctggtttttgggatgctccaggcttttatgttcaaggaattttgtcaaattgcaagatcagaaatcttacatgcttgaatctcagctatgctacattgattcagagtacccagcttatcggtattattcgtcattgtaagaagctccatgtcttatgggtgttagatcacattggtgatgagggcttgaaggctgtgtccttttcttgtcctgatcttcaggagttgagggtatatccaagtgttgttgcaccaagaggtactgtgacggaggaagggttggtagccctatcttcgtgtcggaagttacagcatgtgctcttctcttgtgttcgaatgacaaacacggcgctgatgacaatagcaaggtactgcccacggctaacgtccttcagactatgcattcgcaagcccaggtcagcagacgccgtcacaggacagccactggacgaaggctttggggcgatagtgcggtcctgcagaggcctgaggcgtcttgccatgtccggcctcctcacggacagcgtgttcctgtacatcggcatgtacgcggagaagctggagatgctctcggtaacgttcgcgggggacaccgacgacggcatggtctatgtgctcaatggctgcaggaacctcaagaagctggtaatcaaggagagccccttcggtgacgccgctctcctcgcgggcgcgcacaggtacgagtcaatgcgcagtctctggatgtcgtcctgccagatcaccctgggtggctgcaaggcccttgcggccaccatgccaaacatcaatgtcgaggtcatcggtggggcgagctttggtgcgatggatggtggtgtcagcggtgcgaggaaggtggacatgctctacctctaccgtactctggctggacctagatgcgatacgccagggttcgtctcgatattgtgagctgtatctatggctactgttggtggcgttcagggaaacccgatgttcttaaccgtgcctgctgcgggctgtggctgtgctactgtctggtagtgtttcggaaacatgatgtttatttgcgtaaggtagtgtttggttctggaaccattttaagccttgttcagatattcatatacctcatggattggaagtgattagaaaaaaatatgaataattttgacttactatgtattgaaactcacttaatcccctctaatccatatgaaattgagatgaaac

SEQ ID NO: 212159 - DNA, 2678 bp, Zea Mays
attctcccctgcagattccatctcgtcgcccccttctccgatccgatcggtctctgatcgctgcgtttcctggttcctcaaggtttattggggaatttttttagcgagttacctctttcccctcttgtgggctctgcggggaaatttagggtttagtattggggttgatcggacgatctagtgtggttaggccaacgattctccctgctgtggctcatgattttccaatttcgtgtaaatccggttcggtgtggtgccttgtttttttttctgttttctttattagggctcggattctgagtcacgaaatgaatgatcatctgatcttgtagttttgggggacttcgtctctcgtaggagggattctttggctgaggtagtgaggttgccctcggattggtccaaaaacgaaaaagttagccctcttcctcaggtccaatttggcatttttttcagaacacatacgatttctgccagtctgaagttttggactttatgtgagctgttgccaattcaactgcttctgctacacgatccattaactgctttccgatccgtgttctgtgatgtttgccctcttcctcagggccaatttggcaatttgtcagaacacacacaggcaacttttggggaactacacgtgtatggagttttattagtattccaggggcgtcacaatggcatactttcctgatgaagtagtagggtatatccttggttatgtaacgtcgcatcaggaccgcaacgcggtgtccttggtctgccgggcatggtacgacattgagcgtcatggccgccattcagtgcttgtaagaaactgttatgcggtgtgcccagagcgtgtacacatgcggtttcccaacatgcgtgcactgagcttgaagggcaaaccgcactttgctgaattcaaccttgtcccggcgggttggggtgccactgcaaatccatgggtggatgcgtgcgcccgtgcatgcccaggtcttgaggagctccggctgaagtttatggttgtgactgatgaatgcctcaagttgctttctctatcctttaccaactttaaatcacttgtccttgtttgttgtgaggggttcagtactaccgggcttgctaatattgccaccaattgcaggtttcttaaggaactagacttacaaaagagttgtgtgaaacatcaagaccatcagtggattaattgttttcccaagtcttcaacatcactagaatgcttgaatttttcctgcttgactggggaggtgaatgctgttgcactggaggaacttgttgcaaggagtccaaatcttaaaagtttaaggctgaatcttgcagttccatttgatgttttgtccagaatcctttctcgcacacctaagctagaggatttaggcacaggatcctttttacaaggcaatgaccctgctgcatatgccagtttatgtagagctcttgagaactgcacttcactgaagagtatatctggtttttgggatgctccaggcttttatgttcaaggaattttgtcaaattgcaagatcagaaatcttacatgcttgaatctcagctatgctacattgattcagagtacccagcttatcggtattattcgtcattgtaagaagctccatgtcttatgggtgttagatcacattggtgatgagggcttgaaggctgtgtccttttcttgtcctgatcttcaggagttgagggtatatccaagtgttgttgcaccaagaggtactgtgacggaggaagggttggtagccctatcttcgtgtcggaagttacagcatgtgctcttctcttgtgttcgaatgacaaacacggcgctgatgacaatagcaaggtactgcccacggctaacgtccttcagactatgcattcgcaagcccaggtcagcagacgccgtcacaggacagccactggacgaaggctttggggcgatagtgcggtcctgcagaggcctgaggcgtcttgccatgtccggcctcctcacggacagcgtgttcctgtacatcggcatgtacgcggagaagctggagatgctctcggtaacgttcgcgggggacaccgacgacggcatggtctatgtgctcaatggctgcaggaacctcaagaagctggtaatcaaggagagccccttcggtgacgccgctctcctcgcgggcgcgcacaggtacgagtcaatgcgcagtctctggatgtcgtcctgccagatcaccctgggtggctgcaaggcccttgcggccaccatgccaaacatcaatgtcgaggtcatcggtggggcgagctttggtgcgatggatggtggtgtcagcggtgcgaggaaggtggacatgctctacctctaccgtactctggctggacctagatgcgatacgccagggttcgtctcgatattgtgagctgtatctatggctactgttggtggcgttcagggaaacccgatgttcttaaccgtgcctgctgcgggctgtggctgtgctactgtctggtagtgtttcggaaacatgatgtttatttgcgtaaggtagtgtttggttctggaaccattttaagccttgttcagatattcatatacctcatggattggaagtgattagaaaaaaatatgaataattttgacttactatgtattgaaactcacttaatcccctctaatccatatgaaattgagatgaaac

SEQ ID NO: 212160 - DNA, 2769 bp, Zea Mays
ctcccctgcagattccatctcgtcgcccccttctccgatccgatcggtctctgatcgctgcgtttcctggttcctcaaggtttattggggaatttttttagcgagttacctctttcccctcttgtgggctctgcggggaaatttagggtttagtattggggttgatcggacgatctagtgtggttaggccaacgattctccctgctgtggctcatgattttccaatttcgtgtaaatccggttcggtgtggtgccttgtttttttttctgttttctttattagggctcggattctgagtcacgaaatgaatgatcatctgatcttgtagttttgggggacttcgtctctcgtaggagggattctttggctgaggtagtgaggttgccctcggattggtccaaaaacgaaaaagttagccctcttcctcaggtccaatttggcatttttttcagaacacatacgatttctgccagtctgaagttttggactttatgtgagctgttgccaattcaactgcttctgctacacgatccattaactgctttccgatccgtgttctgtgatgtttgccctcttcctcagggccaatttggcaatttgtcagaacacacacaggcaacttttggggaactacacgtgtatggagttttattagtattccaggggcgtcacaatggcatactttcctgatgaagtagtagggtatatccttggttatgtaacgtcgcatcaggaccgcaacgcggtgtccttggtctgccgggcatggtacgacattgagcgtcatggccgccattcagtgcttgtaagaaactgttatgcggtgtgcccagagcgtgtacacatgcggtttcccaacatgcgtgcactgagcttgaagggcaaaccgcactttgctgaattcaaccttgtcccggcgggttggggtgccactgcaaatccatgggtggatgcgtgcgcccgtgcatgcccaggtcttgaggagctccggctgaagtttatggttgtgactgatgaatgcctcaagttgctttctctatcctttaccaactttaaatcacttgtccttgtttgttgtgaggggttcagtactaccgggcttgctaatattgccaccaattgcaggtttcttaaggaactagacttacaaaagagttgtgtgaaacatcaagaccatcagtggattaattgttttcccaagtcttcaacatcactagaatgcttgaatttttcctgcttgactggggaggtgaatgctgttgcactggaggaacttgttgcaaggagtccaaatcttaaaagtttaaggctgaatcttgcagttccatttgatgttttgtccagaatcctttctcgcacacctaagctagaggatttaggcacaggatcctttttacaaggcaatgaccctgctgcatatgccagtttatgtagagctcttgagaactgcacttcactgaagagtatatctggtttttgggatgctccaggcttttatgttcaaggaattttgtcaaattgcaagatcagaaatcttacatgcttgaatctcagctatgctacattgattcagagtacccagcttatcggtattattcgtcattgtaagaagctccatgtcttatgggggtaaggcttgccttggttattgtttccccagatcccactcatgtggaaccgccaaaattgggtttgttttgtgtttgtcttcacaagaaaaggtgttagatcacattggtgatgagggcttgaaggctgtgtccttttcttgtcctgatcttcaggagttgagggtatatccaagtgttgttgcaccaagaggtactgtgacggaggaagggttggtagccctatcttcgtgtcggaagttacagcatgtgctcttctcttgtgttcgaatgacaaacacggcgctgatgacaatagcaaggtactgcccacggctaacgtccttcagactatgcattcgcaagcccaggtcagcagacgccgtcacaggacagccactggacgaaggctttggggcgatagtgcggtcctgcagaggcctgaggcgtcttgccatgtccggcctcctcacggacagcgtgttcctgtacatcggcatgtacgcggagaagctggagatgctctcggtaacgttcgcgggggacaccgacgacggcatggtctatgtgctcaatggctgcaggaacctcaagaagctggtaatcaaggagagccccttcggtgacgccgctctcctcgcgggcgcgcacaggtacgagtcaatgcgcagtctctggatgtcgtcctgccagatcaccctgggtggctgcaaggcccttgcggccaccatgccaaacatcaatgtcgaggtcatcggtggggcgagctttggtgcgatggatggtggtgtcagcggtgcgaggaaggtggacatgctctacctctaccgtactctggctggacctagatgcgatacgccagggttcgtctcgatattgtgagctgtatctatggctactgttggtggcgttcagggaaacccgatgttcttaaccgtgcctgctgcgggctgtggctgtgctactgtctggtagtgtttcggaaacatgatgtttatttgcgtaaggtagtgtttggttctggaaccattttaagccttgttcagatattcatatacctcatggattggaagtgattagaaaaaaatatgaataattttgacttactatgtattgaaactcacttaatcccctctaatccatatgaaattgagatgaaac

SEQ ID NO: 212161 - DNA, 2315 bp, Zea Mays
cttctttatatgcctttttcttgttaatagataatataattaacacatagttaataatattaaaatcatggaatatatatttaatagtattcgtgttaactcttgtcgattagtagaactttacaaccaaggtctgctttgtgcaaactggcccgtagaggagtaccaaattggcgttcattgctgcaaatgttcgttacttaatgcctctagctgataatataaaattctgtccatgttgtttgtttgtgagcaggcaacttttggggaactacacgtgtatggagttttattagtattccaggggcgtcacaatggcatactttcctgatgaagtagtagggtatatccttggttatgtaacgtcgcatcaggaccgcaacgcggtgtccttggtctgccgggcatggtacgacattgagcgtcatggccgccattcagtgcttgtaagaaactgttatgcggtgtgcccagagcgtgtacacatgcggtttcccaacatgcgtgcactgagcttgaagggcaaaccgcactttgctgaattcaaccttgtcccggcgggttggggtgccactgcaaatccatgggtggatgcgtgcgcccgtgcatgcccaggtcttgaggagctccggctgaagtttatggttgtgactgatgaatgcctcaagttgctttctctatcctttaccaactttaaatcacttgtccttgtttgttgtgaggggttcagtactaccgggcttgctaatattgccaccaattgcaggtttcttaaggaactagacttacaaaagagttgtgtgaaacatcaagaccatcagtggattaattgttttcccaagtcttcaacatcactagaatgcttgaatttttcctgcttgactggggaggtgaatgctgttgcactggaggaacttgttgcaaggagtccaaatcttaaaagtttaaggctgaatcttgcagttccatttgatgttttgtccagaatcctttctcgcacacctaagctagaggatttaggcacaggatcctttttacaaggcaatgaccctgctgcatatgccagtttatgtagagctcttgagaactgcacttcactgaagagtatatctggtttttgggatgctccaggcttttatgttcaaggaattttgtcaaattgcaagatcagaaatcttacatgcttgaatctcagctatgctacattgattcagagtacccagcttatcggtattattcgtcattgtaagaagctccatgtcttatgggtgttagatcacattggtgatgagggcttgaaggctgtgtccttttcttgtcctgatcttcaggagttgagggtatatccaagtgttgttgcaccaagaggtactgtgacggaggaagggttggtagccctatcttcgtgtcggaagttacagcatgtgctcttctcttgtgttcgaatgacaaacacggcgctgatgacaatagcaaggtactgcccacggctaacgtccttcagactatgcattcgcaagcccaggtcagcagacgccgtcacaggacagccactggacgaaggctttggggcgatagtgcggtcctgcagaggcctgaggcgtcttgccatgtccggcctcctcacggacagcgtgttcctgtacatcggcatgtacgcggagaagctggagatgctctcggtaacgttcgcgggggacaccgacgacggcatggtctatgtgctcaatggctgcaggaacctcaagaagctggtaatcaaggagagccccttcggtgacgccgctctcctcgcgggcgcgcacaggtacgagtcaatgcgcagtctctggatgtcgtcctgccagatcaccctgggtggctgcaaggcccttgcggccaccatgccaaacatcaatgtcgaggtcatcggtggggcgagctttggtgcgatggatggtggtgtcagcggtgcgaggaaggtggacatgctctacctctaccgtactctggctggacctagatgcgatacgccagggttcgtctcgatattgtgagctgtatctatggctactgttggtggcgttcagggaaacccgatgttcttaaccgtgcctgctgcgggctgtggctgtgctactgtctggtagtgtttcggaaacatgatgtttatttgcgtaaggtagtgtttggttctggaaccattttaagccttgttcagatattcatatacctcatggattggaagtgattagaaaaaaatatgaataattttgacttactatgtattgaaactcacttaatcccctctaatccatatgaaattgagatgaaac

SEQ ID NO: 212162 - DNA, 1310 bp, Zea Mays
gcaggctcacctcgctcaccgacacctgggccctaaccccggcaactcgtgctcgccacccgattggccggtataaagccggtagcgcgtcgcgtgagccacacgcgcacggcgcacacatatcccttccttcactggctcactgcggtcccggcaaaagtcagtcaactcagccaacaagcgctgctgctcgggcacgggtggtttgggaggccggacgcaacgtcgggatgcagtcgctgcaggacaaggcgtcggagtggagcggggtggcggccgccgatgcctttgccatcgacgacgtcaacatattcgagtacctcggcggcactccgcagccattcgtcgacctctccaccaatttctacaccaggacaccctgcccttataggacgacaccgaccattcttggttacccaccgagctgcagagcggtggctacaccacatgcaacaagctttggacgcaactgaaagcatagatgtggactcaaaaacgaaaatgatgaacttctttaggcacactgcttacttccttgttgctggcaatgagatgacaaggcaacagggccatggagtagcctgcaaacatgcaacaagtaaaccagctgagtaaccattttagccgtggagctggtaaccattggaataattactgataagccttttatccagtgtgcctttatagcattccgtatacaatggagttgaaacaacctccacattcaaagaaacaatggtactgactctttgtaggctttatagccattcttgagcagagagtgtactcaaagtggatagttgtagcttctgccaatatgtttatccttcttcgtctcttgtgctcaagagttattcacagcagtttttcaaatttgacctcaccctagcaaggttaccacaccacatgttaaccatgccacacttatttaaggtcatatttgtttaattttcataagtttgggagccaaagaaagtcattgcctatttaggtcgctgccgagtagagcctagctggctggcagggacatgcggaaaacttatttggttcattgaatcaaaaagatcaggctgagtggagcgtttgtttgtttggttgtactaggatatgttgaatcaaactgaaagaggaaacaatcactaagataatttttattttgcctgaatcgattgtataatacatattttcaccatattgaggcttaatttactttgaaatatatcagtatgccttaaattatgctaatcatatactaatactgttgacactttttcggagcgccaaatactcaagaagaaccggcggcggtg

SEQ ID NO: 212163 - DNA, 2139 bp, Zea Mays
atattttgtaagcatattgtctcacatgtcatacaataattttattaaaatattataaatacagctttatttctcctcgccgcgctttctttagctgccacggcatatgcaaagttagacgtgacaaatttagacaggcccttccctattttacgcaatcataacacatcattaccggtgtttaacgtcaagtcgtggcaggaatctcgctccatccacgtctaaaacaatcaaaacaaacgatgaaaccaaacacaaacacgtacatcctcccgtagatgcctagcagagatcaccaacccatgcggtgcaggacgtgacggcgatggcgaggcggcagctgtgccggaccaagcgtaccaaccgtccccgtcggccgtcgggaactccccacccccgcattttctccgcgttttgtcaacgtcacgcctcgcccgccgtcctttcctctcccactcccacccccaccccgctatctcccactctttctctgcacggcggggctccactcgtccgccactccaccgcttctacaagatcctacaccacgtcaaaccagacccagccgcggagaaagctagctgtagctacctacccggtccggtctccgcttctcccgcacgcgcagcctgctgcatcctccttcctgcgaccgcccgcttcgttcgcggaacataaaggtcttgctccggtcagccacggcggcatcggcatcggcatggcggggcggatggtgcggagctgcgtgcagacggcgctcaaggcggccaactccgtcgtggggctcgccggcatggccgtcatcctctacgcgctctggatgctccgcgcatggtacagggagatcgccggcctcggccaacgccccccggccccctggttcatctacacatttcttggcctggggatctttctctgcatactgacttgctctgggcatattgctgctgaaactgcaaatggtcactgcctctactgttacatgaccatcgtatttatgcttattatactggaaggcgcaatcactttggatgtatttctgaatagcaactgggaagagggtttccctcctgacccatcaggcaagtttggggatttcaagcactttgtgagatccaattccgagatatgtgaatgggtaggcctctcagtggtggctgctcaggtgctatcaatcgttcttgggatggtgctcaggacccttgggcctgaccgtgagaccgactatgacagtgaagacgacacagccgtgcccgcaaggctgcctctcctgagaaaccagtcccagcatggatcttgggactacgctgaagctaccacgtctcgtcagggacttccgttattacattctaaatgtgttcagcgttaataaaagccttgcgacgttccattgcaggtgaagaacaacagacccttcaggatggtcatagattatatctttttcttcttcttatatggagagagtattcctatgttagaatagcagaagcagcagcagcagcagcggtagagtagttctgaaacctggacgccaatcagcatgctcagatatttgagtagcatgtgaactgacccttataaccccgcatactggggaaggaagagatgaggtcacgattggtgccttcactgaccaaagacagagatgtttgttctttcccttgttgtttatccatcagctgcaccatccattttaatctgcttgtttgctgccagatttccttcctattcgcatcacctgtcaacagccttgcctttcatcactccggcggtggtaagcaaggaatgaaagcaacccgacgctgaaactacagagcatttcatttcaagcttcaaactgaacccaatacatacatgcacgacatggtggtggtgctcccatccacataaaccttgtagattaggatcatgagcagccccagcgcgtcggccaggctgcacgaggaagaggaacatgcgcatctcgagaaatccgctgccctgtccacttgtttcagcagtcatcaggcacgcgtcgggctcgggcagccatccacacgagcacggcaaggcaacttgatgtggctcaggaagaatcagctgggagcgggacggcactcacagggtgttggcgtgctggatgtcagcctcaagaacctt

SEQ ID NO: 212164 - DNA, 1873 bp, Zea Mays
cccgactcgaatcctagtggatctcgtcgccgcgcaccgtcggtgttgccgacgtcaaccttgtcctcccaccccgccatttccgccaagctgtcgtcagcctgacgcggtaaccgtgtggactccgctcgggtgggggtggcggcccgaagcccaaaccgcatgggctcgcggccgagctgaccgagccggacccagacccactcgctcctccgcccccgccgcaatggaggagccggcggcggcctctgccctggaggcgcgcggcgacctgcgctcgcgctcggccccgacgtcagccgcgtcgcctcgggggacgttctcgccgacgcgctcaccgacctccgcctcgcgctcgccctgcccgcgctgcccccgcgcgctgccgacggcctggcgctcttcttcgacgacctcctttcacgcgcccaggcgcggggctggttctccgaggtcgtccccaacctcgcacgcctcctcctccgcctccccaccctgctcgaggaccactacgccaaggctggccacggcgcctccgggctccgcgtcatggcgtcgcaggacgcgggcgtcgtgctcctcagccaggagctcgtcgccgcgctgctcacctgcgcgctcttctgcctcttccccacggccggtagggcccaggcgtgccttcccaccatcaatttcgatggcctgttcgcgccgctgattcacaatgcgaggcaaagccaggagcagaaagtgaggtgccttgttcactatttcgagagggtgactgattctatgcctactggtttagtttcgtttgaacgcaaagttcttccccgccgagcgttctctgatggcgttccctatcctgacatccatgcgtgggtggcatctagtgcaccactctgccaattcacggtattttcatcaggtttcatagaagatgaagaacaagaagcccttcaagttgactttgcaaataaatatttggggggaggtgccctttcctggggttgtgtgcaggaagagatccgcttcatgataaaccccgaattgattgtgggtatgctattcttgtcttgtatggaagataacgaggctatagaaatctttggtgcagaacggttctcacagtatatgggttatggttcctcctttcgctttgtcggtgactatttagataccaaaccctttgattcgatgggcagacggagaactaggattgtggctatcgatgctttggactgtccagctaggttacactacgaatctggctgtctcctaagggaagtgaacaaggcattttgtggatttttcgatcaatcgaaacaccatctctatgcgaagcttttccaggatttgcacaacaaggatgacttttcaagcatcaattccagtgagtacgtaggagtttcaacaggaaactggggttgtggtgcttttggtggaaaccctgaaatcaagagcatgattcagtggattgctgcatcacaggctcttcgcccttttgttaattactacacttttgaggacgtgtctctgcaaagattagaggaggtgatccagtggatacgacttcatggctggacggtcggcgagttgtggcatatgctcatggagtactcatctcagaggctgggaggagaaacgcacaagggttttttggcctggttgcttcccagcgacaggcccaagaatcaagtgcattacatgtccgaatagcaatagacccggtttttgtgaggagtgtgtgcatgaacgaagttattgctgacaaaaaaaatgaaataaagataaaagcgtatgtatcagttgccacgcacgtgcgtgtagtcgaagatgaggttgggcttctccggcggctcccagctcaagaaacctctagcgacgaagt

SEQ ID NO: 212165 - DNA, 1857 bp, Zea Mays
cctgacaatgttgctgaaataactgggcgtcgtggcatgctagtaagagctttggatgggaaaggcgtggtttatcaggcgcggaacgcgaaagaagtctcgatggagatgattaatatgcacgaaaagcagcagtttatggatgacaaaaaactaattgcaattatatctgaagcagggtcagctggtgtttctctccatgctgatagaagggcaaaaaaccagagaagaagagtacacataacacttgaactcccttggagtgcagatcgtgcaatacagcagtttgggaggacccatcgttctaatcaaacttctgcccctcaatataggcttctttttacaaatcttggtggtgaaaagcgatttgcatcaattgtggcaaaaaggctagagtctcttggtgctttaacacaaggagatcgcagggctgggccttctttgagtgcttttaactatgatagcaactatgggaaaaaggcattaaccatgatgtataggggaataatggaacaggattcttttccagttgttcctccggggtgttctgatgatgaaactagcatccaagaattcatcaatgaagcaaaagctgctctagtatcagttggaattattagggatgctttcatatgcaatggaaaagatccagggaagctttctggtcggattgtagattcagatatgcatgatgttgctcgttttctcaaccgccttttggggttgtctccaaacatccaaaacaggttgtttgatctttttacaagtatacttgatattgtccttcacaatgcaaggatagaagggcagctagattctggaattgttgatatcaaagctaagaatgttgaaatgacagaatcacctaggactgttcacactgatagcttgtctggtgctttgacggtactatttactttcaccattgaccggggagttacttgggagtcggcaaaaacgatgcttgaggaaagggagaaatttggtgctggtacttccattgatggcttttacgagtccagaagggaatggatggggagaaggcacttcattctatctttggaaggctcaactgaaggaatgtacaaaataatccggcctgctattggtgaagcattgagggagatgccttcaagtgaactgaaaagcaagtacaggaaggtgtcatcaatagacaaatgtatgcatggatctaaatgtaaaattgggagctactgtactgtaggaagaaggttgcaagagcttaatatattgggtggcctcatacttccagtttggggtacaatagaaaaggccctggccaagcaggaacgcctcattcacaagagaatacgggttgtccgtttagtcacaacaaatgacagtcagcgaatcgttgggctgctgattccgaattcagcggtagagtcagtactaacaggtttgcaatgggtgggacattgatgactgacatggaaaggcttgaattttgtttctcagctgcattcagtttgctgggctttttttaacttcgtggcactgttctgatattagatgcagcagcatctagggcacacttgattttgtttgtagggagatagcaaggtaacttacccgaagcgatgaaattcttagcttacaggtcaggcaggtatatgctgacaacttttgtatgtaaaatacgcggtgcggtgtggtgcggctgtaagacatgtaatgtaaagctactaaaaaagctcaggttaatctcaaaagaaagtcgcacctcacaatctggtgctgccacaatgataatgtttcatgtggagttactgcttatgtcggactgaactgcacaagaaaaactaaggcttatttatattatagccaaattatcta

SEQ ID NO: 212166 - DNA, 929 bp, Zea Mays
ggctttatcgtcatcatcaccagtggttgccccgtgcaggttcctgtgcccccgcgccactaccgcctctcgcgacatcctctccttcgcgaccacagcaacaaggaggcggctgctcctctccaccgccaccaccaccattgccgccgccatggccgcttcttcctcctgcaaggtcatcgactcccacctgcacgtctgggccacgccacagcaggccaaggaggagtacccgtacttcccaggccaggaacccacgctgcgtggcgacgccgacttcttactcgagggagttggtccatatattcaagaaatagaggaactgtgtagggattatcctgcaactaccgttattcttgaccatatggctttctgcaagccaccaacgaacgatgaagaagagaaggcattctcttcatttctaagcttatccagattcccacaggtttatgtcaaatacagtgctcttttccgcataacaagagaagcatatccatatgaagacactgctcagcttctttccagtgtgatatctcattatggagccagtcgagtaatgtggggaagtgacttcccctatgttgttcctgaatgtggttacaaaggaggaagggaggcgatttctcatgtcgccagcaagataccagtttcccagtcagatttggaatggatcttgggaaaaacagtgagccaattattccaaggtgcatgggttactccatgatcactgtagctggtaggacaatgtattccagagcaactatatcaacgggaatatatgtccttttttccagtgtttacatgtattctctctgtttcaaataatgtctttatctagatacatatatctaggtgtgtagcaaaatctttaacttcagttcttgattatgcgacctacaccataacctcaatatcgaataatctttgac

SEQ ID NO: 212167 - DNA, 977 bp, Zea Mays
gcaagtctcagcttttcactttttgtgtatgagtgaagctggagtggacggggctgttattgttcaacctattaatcatatgtttgatcattcgttggtaactagtgtgttgaagaaatacccatccaagttcgttggttgctgtcttgcgaatcctgcagacgatgggactgggattaaacagcttgaacatctgattgtacaagaaaaataccgtgctgtgaggttcaacccaaacttatggccatctggtcaaaagatgaccaatgaggttggaaggtcattattttcgaaggcaggagaacttggagtaccacttggaataatgacgatgaagggagttggtccatatattcaagaaatagaggaactgtgtagggattatcctgcaactaccgttattcttgaccatatggctttctgcaagccaccaacgaacgatgaagaagagaaggcattctcttcatttctaagcttatccagattcccacaggtttatgtcaaatacagtgctcttttccgcataacaagagaagcatatccatatgaagacactgctcagcttctttccagtgtgatatctcattatggagccagtcgagtaatgtggggaagtgacttcccctatgttgttcctgaatgtggttacaaaggaggaagggaggcgatttctcatgtcgccagcaagataccagtttcccagtcagatttggaatggatcttgggaaaaacagtgagccaattattccaaggtgcatgggttactccatgatcactgtagctggtaggacaatgtattccagagcaactatatcaacgggaatatatgtccttttttccagtgtttacatgtattctctctgtttcaaataatgtctttatctagatacatatatctaggtgtgtagcaaaatctttaacttcagttcttgattatgcgacctacaccataacctcaatatcgaataatctttgac

SEQ ID NO: 212168 - DNA, 3910 bp, Zea Mays
ccccaagccccaaacagctagctcttccccacttcgcctgcggcggcgctccctcccgccggtttgctcgctgggccctggcgcgttcgtctcaacgaagcactcgcaccgccggccaccccgaagcaatcgccactgctatctcggtgtcctctccctccacccggactcggattgacttcctatctctcgtcggtaagcaaccctagcccatttgaatcactggtgatgactgtatcctatcgtccccaagagtttgttcgcgtgattccgcctctgattgggtcgtggatcagcagggggccaagcatgatggaggtgggtttgaacccgggggaggagctggacttcggggacaaccaggaggacgacgacgacgcgggggacatctcacccgccagcaaggagctggccgccatggtggcggcggcggcggcggcggagacagtcgagcttgacgacggcggcgccggtgtcgaggcggccgcctccgctgccgccgccgcgtcgtcgtcgtcagcggcggcgcggtacggggacgaccgcacgccgcgggacgggatggtgttcaagtcctacgaggaggtgctcaacttctacaagcgctatgccctgcgcacgggcttcggcgtctgcgtcaagaagtcctccttcaccaaggccggcctctgccgccgcctcgtcctcgtctgcaacaagtggggcaacggcaaggaggacgcctgctaccaggccaggcccacggccaagaccaactgccaggccaccgtcgtcgccagactcctgggggacgacttgctgcacctcacggatgtgaacctggagcacaaccacgcgctcaacccatccgccgcacgcttcctcaggtgctacaagacgctgcctagcgggttgagcaaagatctcgtggtgagggctgccagaggggaatgctcggtggcgggtgacatcgatgtcccgatatttgatgaatgggggcggcttaagaccgggcaagctgatgtcctggccatcaacgctttcttcacccagatgcaggcaaagcttccaaactccttctatgtcatggacttctatgtggagggccatctgaggagtgttctctgggctgattccagatccagggcagcgtatcagtatttcagcgacgctgtttggattgatacggcatgcttaaggaacaagtatcatgtcccgcttgtttcgtttctgggtgtcaatcatcatggtcagcttgtattgctaggctgtggattgctgtcagatgagagcacagagagcttcttgtggctgttcaagtcatggttaacttgtatgaagggacagcctccaaatgccatagttaccgatgaatgtgtggcgataaaagccgcagttcgagaagtgtttccgaagacacgccatagaataagtgattggcatgtagtgagaagtatttcagaaaaaataggtgacttgccagaatatgaagcgatgagaaccaatttggttactgtaatatatgattctttaaacgacaatgagtttgaggcaaggtggaagaactggattgatagatttagccttcaggataatgaatggatcacctttctgtatgagaatcggcacttgtgggcccctgccttccttagggacactttctcagctgggctctgtactgttagccagcgtgaaagtccaagtacattttttgaggatgcagtcagttcagagaccacattggtgacgttccttgccagctacatgacacttttggataacaaatacaaaatggagcaacaagatgattttgattcattaaatagcagcaggctcctgatatcaaagtaccaaatggaagaacagctatccagattgtacaccttgaatatgtttatgaagttccaggatgagctaaaggcaaccatgcattgtcaagttcagctggatgggtcagcatcttcttttatagttattgatttgactgaagcagggagtgaaatgctgaataaaaagtacgaggttgttcactgcatggcgacaaacaggatggagtgtaactgtggcctatttcagtttcatggtatcgtttgtcggcatgcattatctgtgcttaaatggcagcaagtatacgacatccccccttgctatgtacttaacagtttcttcgtctcgtcgagattgggatggtatccgacgagaagtataggcatgcagtaaggcttcttaaagacatgaaagagactcttcttgatgataatctgtgccgtgatttggagcagaagcttacaccagctgagcgtgcaattgtgaatggtgacaaccatacacaacctggttcatctgagggcggtgctgcaaaaaagcggcgaggccgtcctcctaaaaagaataaagagataaacatggattccatggtaaacccgtatggaaataaggaccctttactagtatcctcggatgtaactcagaaggacacttttcattctgcttcaactacctcaaaccttggcactcatgtccggacgcatggcattgttgatctcatggaagaagtcaatccaagcgagctgtcatttgatagccgttacggggtgcaatctggccactcgcaccattttgtttggccaatctacatcagcagcagagcagtctagggttcagtgggtgtttcataatggcatgtatcaggatgaccaagtgacttacggcagacggacatcataacaattggacttgttaggctccagggtttgccgtttcaggtttctttctcttgagattttattcccgtgtgtgccatgatgaggtgatagatagatcatgtctttcttgcaagttaatatactagccattgcttctacagatagaggagtgactgaaactttgttgagaaaatatagcattttacataagaaccctgtggaacaggaagtcaggaaggccatgaaaatctgcttaataagagctccatcggcatacagtatttgttatggaagctttatgtgtttaggccttgttcgtttaggaggtggatcgaggggaattagaggaattgaataggaagggatttgatccccctcaatcccctccgatccccatacaaccgaacatggcctgagtagaaagttttcgtctaagcggcattcagtgatgagctatatttccaaattttcatctgtccattttctgacgattttatttcatgccacatgtcctgcatggaatgtgcaggaaatcgggtcaggggtcctcggtttttggactttggagcaccgatgacttaagtgatcctccattgtgcttcgaacgttgagccttgggagatgcatgctggaactggctgctggtgatggtggcggcggcggcatctgaaggcaggatacactgtagaaacagaagtttgccactaagccagccgaacgcttccataagccatcaatgttagccaactaactgacatgtgtatatacacacacatcatctcagaaagaagccgtcattccgtgggaagtgctgcgtaaactcctgataataggcgtggtcagcgtcggacaagaaattgagagcttcattttctttctttcacgtgggaaagatacaattttgttgcctcctgacgatcagctaaaagggggaggaaatatccatgctcttcatctgggaaagatgcaaaaaccatccagctttatcatctttgctccttcagtaccgtgcctggaatcctgctttaccaatttttagcacccaaaaaaagaaaaacaaaaaaaaactatctgtggcgccccttgacacaaactattttcccggttctaaactattaagagatgtagtaatgcaaaccatgaaaaatccacggaggccagaaatcttgcggacaaattctgtgggtctgtttgtcggctcagccatgaggcgcaactttaatgac

SEQ ID NO: 212169 - DNA, 3740 bp, Zea Mays
ccccaagccccaaacagctagctcttccccacttcgcctgcggcggcgctccctcccgccggtttgctcgctgggccctggcgcgttcgtctcaacgaagcactcgcaccgccggccaccccgaagcaatcgccactgctatctcggtgtcctctccctccacccggactcggattgacttcctatctctcgtcgggggccaagcatgatggaggtgggtttgaacccgggggaggagctggacttcggggacaaccaggaggacgacgacgacgcgggggacatctcacccgccagcaaggagctggccgccatggtggcggcggcggcggcggcggagacagtcgagcttgacgacggcggcgccggtgtcgaggcggccgcctccgctgccgccgccgcgtcgtcgtcgtcagcggcggcgcggtacggggacgaccgcacgccgcgggacgggatggtgttcaagtcctacgaggaggtgctcaacttctacaagcgctatgccctgcgcacgggcttcggcgtctgcgtcaagaagtcctccttcaccaaggccggcctctgccgccgcctcgtcctcgtctgcaacaagtggggcaacggcaaggaggacgcctgctaccaggccaggcccacggccaagaccaactgccaggccaccgtcgtcgccagactcctgggggacgacttgctgcacctcacggatgtgaacctggagcacaaccacgcgctcaacccatccgccgcacgcttcctcaggtgctacaagacgctgcctagcgggttgagcaaagatctcgtggtgagggctgccagaggggaatgctcggtggcgggtgacatcgatgtcccgatatttgatgaatgggggcggcttaagaccgggcaagctgatgtcctggccatcaacgctttcttcacccagatgcaggcaaagcttccaaactccttctatgtcatggacttctatgtggagggccatctgaggagtgttctctgggctgattccagatccagggcagcgtatcagtatttcagcgacgctgtttggattgatacggcatgcttaaggaacaagtatcatgtcccgcttgtttcgtttctgggtgtcaatcatcatggtcagcttgtattgctaggctgtggattgctgtcagatgagagcacagagagcttcttgtggctgttcaagtcatggttaacttgtatgaagggacagcctccaaatgccatagttaccgatgaatgtgtggcgataaaagccgcagttcgagaagtgtttccgaagacacgccatagaataagtgattggcatgtagtgagaagtatttcagaaaaaataggtgacttgccagaatatgaagcgatgagaaccaatttggttactgtaatatatgattctttaaacgacaatgagtttgaggcaaggtggaagaactggattgatagatttagccttcaggataatgaatggatcacctttctgtatgagaatcggcacttgtgggcccctgccttccttagggacactttctcagctgggctctgtactgttagccagcgtgaaagtccaagtacattttttgaggatgcagtcagttcagagaccacattggtgacgttccttgccagctacatgacacttttggataacaaatacaaaatggagcaacaagatgattttgattcattaaatagcagcaggctcctgatatcaaagtaccaaatggaagaacagctatccagattgtacaccttgaatatgtttatgaagttccaggatgagctaaaggcaaccatgcattgtcaagttcagctggatgggtcagcatcttcttttatagttattgatttgactgaagcagggagtgaaatgctgaataaaaagtacgaggttgttcactgcatggcgacaaacaggatggagtgtaactgtggcctatttcagtttcatggtatcgtttgtcggcatgcattatctgtgcttaaatggcagcaagtatacgacatccccccttgctatgtacttaacagtttcttcgtctcgtcgagattgggatggtatccgacgagaagtataggcatgcagtaaggcttcttaaagacatgaaagagactcttcttgatgataatctgtgccgtgatttggagcagaagcttacaccagctgagcgtgcaattgtgaatggtgacaaccatacacaacctggttcatctgagggcggtgctgcaaaaaagcggcgaggccgtcctcctaaaaagaataaagagataaacatggattccatggtaaacccgtatggaaataaggaccctttactagtatcctcggatgtaactcagaaggacacttttcattctgcttcaactacctcaaaccttggcactcatgtccggacgcatggcattgttgatctcatggaagaagtcaatccaagcgagctgtcatttgatagccgttacggggtgcaatctggccactcgcaccattttggtaataaccaactaaatacaggaaacacactgcggtttggccaatctacatcagcagcagagcagtctagggttcagtgggtgtttcataatggcatgtatcaggatgaccaagtgacttacggcagacggacatcataacaattggacttgttaggctccagggtttgccgtttcagatagaggagtgactgaaactttgttgagaaaatatagcattttacataagaaccctgtggaacaggaagtcaggaaggccatgaaaatctgcttaataagagctccatcggcatacagtatttgttatggaagctttatgtgtttaggccttgttcgtttaggaggtggatcgaggggaattagaggaattgaataggaagggatttgatccccctcaatcccctccgatccccatacaaccgaacatggcctgagtagaaagttttcgtctaagcggcattcagtgatgagctatatttccaaattttcatctgtccattttctgacgattttatttcatgccacatgtcctgcatggaatgtgcaggaaatcgggtcaggggtcctcggtttttggactttggagcaccgatgacttaagtgatcctccattgtgcttcgaacgttgagccttgggagatgcatgctggaactggctgctggtgatggtggcggcggcggcatctgaaggcaggatacactgtagaaacagaagtttgccactaagccagccgaacgcttccataagccatcaatgttagccaactaactgacatgtgtatatacacacacatcatctcagaaagaagccgtcattccgtgggaagtgctgcgtaaactcctgataataggcgtggtcagcgtcggacaagaaattgagagcttcattttctttctttcacgtgggaaagatacaattttgttgcctcctgacgatcagctaaaagggggaggaaatatccatgctcttcatctgggaaagatgcaaaaaccatccagctttatcatctttgctccttcagtaccgtgcctggaatcctgctttaccaatttttagcacccaaaaaaagaaaaacaaaaaaaaactatctgtggcgccccttgacacaaactattttcccggttctaaactattaagagatgtagtaatgcaaaccatgaaaaatccacggaggccagaaatcttgcggacaaattctgtgggtctgtttgtcggctcagccatgaggcgcaactttaatgac

SEQ ID NO: 212170 - DNA, 2002 bp, Zea Mays
gaagttttccctggattgcatattgatccaggctttttcaataaattaaggaaggttacagttcgtgagaatagttcaagtctgtctggtgtatgtgtatcatcgcattcactttatggaggcttgttctacctaatacctatggtcccgtgaatgctactgttctgatttggatcctgtacagatggagttcaacttcaagttgatgggatcattcgttagatcttattcattgccgagtagaggaacttacggttgaagattttctttatgatgatgattacaagatagacctttccgggtctaatctggatgtccttaataacctggaagggatcgttcagctggaatatccacagttaaatttgccgcaagagttagcccctaatgtgtacattgacatgagttactgtggacagaatgctgggggtgttttactgcacatgacagatttgttcacaacaatgacttcggcaccttctgcattcctgaagccaaaatgcgctctctgggactgccccaggcctgctgttggatcagaaagatggcatgattattgcagcatgtatcatgctgatttggctgtgcaggaagagggccctccaggcacaatgcctgtgatccgtccaagaggcattgatctgaaagatggccccctgtttgctgctcttagtgcaaaaatccaaggaaaaaatgttgggatccctatctgtgaaggagctgccactgcaaagtctccgtggaatgcacctgaactgttcgatctttacatctttgaaggtgagtctatcagagaatggttgttttttgacaaaccaaggagggcatttgttagtggaaatcggaagcagcggtccttgccagattacggcggccgtggttggcatgaatctaggaagcaggcgatgaaggactttgggggtctgaagaggtcctattacatggatccacagccatccaacagctacgaatggcacctctacgaatatgagatcaatgagtgcgatgcttttgccttatatcggcttgagttcaagtcttcagatgcaaagaagattgtgaaatccaaattagcctgtaatccactgaatgaaattcagcagcaaatggttagactcagtgcagacagtcctgtagacaacaaacggacggcccggggcaggcaacatgctaacccgacagatgtcgatactaacatctattcagttccaaacaccacagctcaagccaatgttccaaatgcttatcagccagggtcacaagtggaccagatgacatatttgaatggtagtgtcgtttatgggcctcatctgccgtatggttactccactgaaagaagtgacttttattggaactcagctgatgggacatgagaagatgaacacatattcgatttatggcatatttggccttcaaattctaacagttccagttatggttattgggtctactctattagcatgaccctcccatcttcttttaattggaactggtccaatctacaggaaacatctctgaaacaaaggatgtcaatactgcagttctattttctgtggtaacttttgttgttgtaatataggtgtatcttgaaaatagcaagcaagcatctccccgatgtgcatgcagctgtatcatatgcaagataaatctctggtttggtggactggtaacctgtcacgctggtggttccatttatctgtcacgttgtacgtgcatcaatacatcctgttctgaatctggtgggtgcaatctttatccgcaaactccaattatgctcttgaaacgtccctccattttgcagctgcaggttcgtgattaacatgtgttgtttggaagccaggagattagagtgtttggaagtcaggagattagagggaattgaggcagatacaatccctaactattcaaaattaaataggagattgccgatcccccttcatcccttggcccacctctcgtggcgtcactattttctcgcccagacgcccgagcgcctccgtcc

SEQ ID NO: 212171 - DNA, 939 bp, Zea Mays
cgcgcgccgggccgacgcccatccaccatccatcgcatccaagaattgaccgactcccagtgacgccctgtgtgctggcttggctctgcctctgtgtgttggcctgttgggtagagagagactggtgaccgaagaagcaaggaaggcagctgtgctgtgcagtgagaggtccgtgcaggcaaagcctagctgcagttgcttgcttgccatccacaccacacacccacagcaaagccacgaaccaactcatcgggcgcggagaccaccgcggggggaaaagcgagggaggggggagaggactgaagagaaatcatggagccgatttgctgtggagattcgggcgcgtgatccggtcggatcttgctttcccggggggcgatcgaggccacgccgctgctgccgcggtgccctccctctgcctctgggctctgcgtgtgacgtgccgtgccatggcgctcgccctcgcctatatccccagcctccctcgccccgccgctggccgccgcattcagtaaaaagccacctaccctaccctcctgcgctggtactacttactacctagccaggccaaggagcccaacgagggggaacgctgcggtaggcgcgcgctgctcgtcccaccccacgccgccatgacggtgccagatgccgagtcgcgcttccatgtcctcgcggtggacgacagcctcgtcgacaggaaactcatcgagatgctgctcaagacctcgtcctaccaagtgaccacggtggattccgggagcaaggcgctggagctgctggggctgagggacgcgtcgtcgccgtctccgtcctcgcctgaccaccaggagatcgacgtgaatctcatcatcactgactactgcatgccaggcatgacaggatacgatctgctcaagagagtgaagagtgagatctcatctttgcttgctcaaattgccg

SEQ ID NO: 212172 - DNA, 1477 bp, Zea Mays
acgatttcaattgccacgatcatggtgccaatagtctgaagccggggcatagacggtgccatgtttgcaaaattctcaccgtatctaggggcaacaactaaaatcactccaccttagcccaaaatcaattcggatccgcctccatggctgccgcttcgcagctcctctctctgttcttcctcctcctcctccctgcttgtgatgccatctactgcgacgaagacgactgctacgacctcctaggggttaagcaggacgcgaacgcgtcagacatcaagaaagcgtactacaagctctctctcaaacaccacccggacaagaatcccgatccggagtcgcggaagctcttcgtcaagatcgccaatgcttacgagattctgaaggatgaatccactagggcgcagtatgactttgccattgaacatccggaggaggttttctataacacagctcagtactatagggcatactatggacataaaacggatcctcgtgcagtgttgattggtcttcttctaattgtttcagcatttcaatacattaatcagctaacgaggtataaccaggcctgtttcagtgatgagagttgtctcattgagtcaccaagttatgggttcgaagcagcctctctgcatatgtgcagaaggccatgaaaagtgtcaagcaaactcctgcttacaaaaataggttaaaagctttggagtatgagcgaacaggaggaattgctagcaaaaagaagggcatcaagcaggtggataagaaagttgaagaagagctaagtaatgaagttgaattgcaaattcatggggttgaaaaaccgtctgtttggaggctgtttggtgtccaatttatactttggccttactctgttggcaaggcgcttacttggaagatttgttggttttggagataccgggtaaagaaattaccatatacatgggaggatgcttgctacttgacctggatttcactccaaatacctgcgaatgcatggaaaaatatggatgagtccaggaaggaggaccttgtgagaagacacctctgggaaaagagcaacatggagaggtatacttcagggacgaggaaggaaccaaagcgtaggaggtagctgtgcaacatttttgacctgagactacagcaactttaaacaatacaacatactcctatattggagtgaaaagttattgaccaggcttgagttcaccgatagctaattgctaggatccccgggaagtggcatggctaaggaatcatgtttggaggacaattcatgtaataaagtgatcaaggcgacttttgtaggtgtttcttaatcttaatttctgagtagctaataactgtaaacgaacgagtcatgcttcatcgctccactcaacgtaccaaaatcactgcaaagagaacatactaatgcacttcctctcgtctactgctgtatgcacctgcagccattttggtagtcatcaagttgaacacatgc

SEQ ID NO: 212173 - DNA, 2678 bp, Zea Mays
cccacctccagcgtagaaagggaaaaaaaaaaggggaagcctcttctctccaagtcacgcccctcccacctcgccggcgcgcccgcctcagccgccatgagcgcgctccaggcctccctcctcctccgcccgctcccctcgccactgcccccgcgccgccggcagccgctcccctctgccttcgcctctttgccccgcggtgccaacgcgccccgccgtgccccgctccgcctccgcgcattggaccccatcgcgccgcagcccgacgcctccgagccgcccgcggctgcatcctcgtccgcggcggaggcggaggagtcggagagcacgacgatgacggagtcgacggcacagcccgccacgatgagcgggaaggaggagctggaggacctggtgggcaaggctagggcctgggccgtggcggtcgcggccgcggtggtggccgcggtcaggaggttcgtcgactgggtgctgtcgaggaactggatgagctggtggcccttctggagatccgaccaccgactgcaggggctgatcgaagaggcggacgccaaccccaacgacgctgccaagcagagcgcgctcctccacgagctcaacaagttcagccctgaagaggttattaaaaggtttgagcagcgaagccatgctgtggatagcaagggggctgcagagtacctgcgggcacttattctcactaacactatagcagattaccttccagatgaacaatctgggagatctgcaagtctgccagccctgttgcaagagttgaaacaacgtgtatctgggaatgaggataaacctttcatgaaccctgggatatcagaaaagcaacctttacatgttgtaatggttgaccccaaatctacaggtagatctacacgctttgctcaagaaattgtctcgacgatgttgtttacaattgctgtcggcgtaatgtgggtgatgggtgctgctgcacttcaaaagtatattgggagcttaggtggaattggggcatctggtgttggttctagctcatcatattctccaaaagagatgaataaggatatcatgccagagaagaatgtcaagacatttaaagatgtcaaaggttgtgatgatgcaaaaaaggaacttgaggaggtagttgagtatctcaagaacccttcaaagttcactcgccttggtggaaagctacctaagggcatacttttgactggtgctccaggaactgggaagacactactagcaaaggccattgctggagaagctggtgtaccattcttttaccgagcaggctctgaatttgaggaaatgtttgttggtgttggtgctcggagagtgaggtcattgtttcaagctgcaaagaagaaggcgccatgcattgtcttcattgatgaaatagatgctgtgggttcaactagaaaacagtgggaagggcacacaaagaagacgttgcatcaacttcttgttgagatggacgggtttgaacaaaatgagggaataattgtgatggctgcaacaaacttggcagacattcttgatcctgcactcacaagacctggtagatttgataggcatattgtcgtcccaagtccagatgtgcggggtcgccaagagattctggagctctatttgcaagataagccagtggcaaatgatgtagatatcaatgcaattgcccgtagtacacctggctttaatggggctgacctagccaaccttgtaaacattgcagcgataaaggctgcagttgaaggtgcggacaagttgaatgctgttcagttggagtttgccaaagatcgtattatcatgggaactgagaggagatcaatgttcatatcagatgaatcgagaaagcttactgcgtaccatgaaagtggacatgctattgttgcgctcaacacccagggtgctcaccccatacacaaagcaactatccttcctcgtgggtctgcccttggaatggtcacacaactcccctcacaggatgagacttctattagcaagaaacaactccttgcacgtcttgatgtttgcatgggtgggagggttgctgaagagctgatatttggggaagacaatgttacaactggggcgagaaatgaccttcacactgcaacagagcttgcccagtacatggtatcaaactgtgggatgagtgatgctatcggtcctgtgcatgtgaaagagcgaccaagtgtagagatgcaatcaaggatagatgctgaggtggtgaagctcctaagagaagcttatgggcgggtcaaacgattgcttaaaaagggcgcaacacaccttcggtacatttttcaccttggcaccatttccatttgaggagcagccagtaaatcagaaaatgagaagattggtgttggaaaagccgatgcctgcttattgataattcttgggatggaagaccgccatggtggccggcaaggctctgggttgcaaaaccctccatacttttggttttagctaggatagatataggtgcaacattgcatgctctgaatgctaggtttctggctagggtaacatgtttaccatgttctttttacttctttattacatttgctgtaaggaaatcgtacatatggcggtagtttttttttcaaacaagcactgtttgttttttgtcaaacaatatacgttcaatgtatttgtattgctaacatgcacttgatgccttg

SEQ ID NO: 212174 - DNA, 2883 bp, Zea Mays
ctccaagtcacgcccctcccacctcgccggcgcgcccgcctcagccgccatgagcgcgctccaggcctccctcctcctccgcccgctcccctcgccactgcccccgcgccgccggcagccgctcccctctgccttcgcctctttgccccgcggtgccaacgcgccccgccgtgccccgctccgcctccgcgcattggaccccatcgcgccgcagcccgacgcctccgagccgcccgcggctgcatcctcgtccgcggcggaggcggaggagtcggagagcacgacgatgacggagtcgacggcacagcccgccacgatgagcgggaaggaggagctggaggacctggtgggcaaggctagggcctgggccgtggcggtcgcggccgcggtggtggccgcggtcaggaggttcgtcgactgggtgctgtcgaggaactggatgagctggtggcccttctggagatccgaccaccgactgcaggggctgatcgaagaggcggacgccaaccccaacgacgctgccaagcagagcgcgctcctccacgagctcaacaagttcagccctgaagaggttattaaaaggtttgagcagcgaagccatgctgtggatagcaagggggctgcagagtacctgcgggcacttattctcactaacactatagcagattaccttccagatgaacaatctgggagatctgcaagtctgccagccctgttgcaagagttgaaacaacgtgtatctgggaatgaggataaacctttcatgaaccctgggatatcagaaaagcaacctttacatgttgtaatggttgaccccaaatctacaggtagatctacacgctttgctcaagaaattgtctcgacgatgttgtttacaattgctgtcggcgtaatgtgggtgatgggtgctgctgcacttcaaaagtatattgggagcttaggtggaattggggcatctggtgttggttctagctcatcatattctccaaaagagatgaataaggatatcatgccagagaagaatgtcaagacatttaaagatgtcaaaggttgtgatgatgcaaaaaaggaacttgaggaggtagttgagtatctcaagaacccttcaaagttcactcgccttggtggaaagctacctaagggcatacttttgactggtgctccaggaactgggaagacactactagcaaaggccattgctggagaagctggtgtaccattcttttaccgagcaggctctgaatttgaggaaatgtttgttggtgttggtgctcggagagtgaggtcattgtttcaagctgcaaagaagaaggcgccatgcattgtcttcattgatgaaatagatgctgtgggttcaactagaaaacagtgggaagggcacacaaagaagacgttgcatcaacttcttgttgagatggacgggtttgaacaaaatgagggaataattgtgatggctgcaacaaacttggcagacattcttgatcctgcactcacaagacctggtagatttgatagattgtcgtcccaagtccagatgtgcggggtcgccaagagattctggagctctatttgcaagataagccagtggcaaatgatgtagatatcaatgcaattgcccgtagtacacctggctttaatggggctgacctagccaaccttgtaaacattgcagcgataaaggctgcagttgaaggtgcggacaagttgaatgctgttcagttggagtttgccaaagatcgtattatcatgggaactgagaggagatcaatgttcatatcagatgaatcgagaaagcttactgcgtaccatgaaagtggacatgctattgttgcgctcaacacccagggtgctcaccccatacacaaagcaactatccttcctcgtgggtctgcccttggaatggtcacacaactcccctcacaggatgagacttctattagcaagaaacaactccttgcacgtcttgatgtttgcatgggtgggagggttgctgaagagctgatatttggggaagacaatgttacaactggggcgagaaatgaccttcacactgcaacagagcttgcccagtacatggtatcaaactgtgggatgagtgatgctatcggtcctgtgcatgtgaaagagcgaccaagtgtagagatgcaatcaaggatagatgctgaggtggtgaagctcctaagagaagcttatgggcgggtcaaacgattgcttaaaaagcatgagaagcaattacatgctttggcaaatgcgctgctggagcgtgaaacacttactgcagatgagatcaacaaagtagttcacccttaccaagaagaaccccagttttccttccaagacgaggagtttgccctcacttaaaagattcctttgttgcatccagattttacctactgtgaattgtaaatccgtgtacagtaagtggcatctagatgagccatcgaagtttgttcacatgcccccttctgcaaaatagggcgcaacacaccttcggtacatttttcaccttggcaccatttccatttgaggagcagccagtaaatcagaaaatgagaagattggtgttggaaaagccgatgcctgcttattgataattcttgggatggaagaccgccatggtggccggcaaggctctgggttgcaaaaccctccatacttttggttttagctaggatagatataggtgcaacattgcatgctctgaatgctaggtttctggctagggtaacatgtttaccatgttctttttacttctttattacatttgctgtaaggaaatcgtacatatggcggtagtttttttttcaaacaagcactgtttgttttttgtcaaacaatatacgttcaatgtatttgtattgctaacatgcacttgatgccttg

SEQ ID NO: 212175 - DNA, 2868 bp, Zea Mays
ctccaagtcacgcccctcccacctcgccggcgcgcccgcctcagccgccatgagcgcgctccaggcctccctcctcctccgcccgctcccctcgccactgcccccgcgccgccggcagccgctcccctctgccttcgcctctttgccccgcggtgccaacgcgccccgccgtgccccgctccgcctccgcgcattggaccccatcgcgccgcagcccgacgcctccgagccgcccgcggctgcatcctcgtccgcggcggaggcggaggagtcggagagcacgacgatgacggagtcgacggcacagcccgccacgatgagcgggaaggaggagctggaggacctggtgggcaaggctagggcctgggccgtggcggtcgcggccgcggtggtggccgcggtcaggaggttcgtcgactgggtgctgtcgaggaactggatgagctggtggcccttctggagatccgaccaccgactgcaggggctgatcgaagaggcggacgccaaccccaacgacgctgccaagcagagcgcgctcctccacgagctcaacaagttcagccctgaagaggttattaaaaggtttgagcagcgaagccatgctgtggatagcaagggggctgcagagtacctgcgggcacttattctcactaacactatagcagattaccttccagatgaacaatctgggagatctgcaagtctgccagccctgttgcaagagttgaaacaacgtgtatctgggaatgaggataaacctttcatgaaccctgggatatcagaaaagcaacctttacatgttgtaatggtagatctacacgctttgctcaagaaattgtctcgacgatgttgtttacaattgctgtcggcgtaatgtgggtgatgggtgctgctgcacttcaaaagtatattgggagcttaggtggaattggggcatctggtgttggttctagctcatcatattctccaaaagagatgaataaggatatcatgccagagaagaatgtcaagacatttaaagatgtcaaaggttgtgatgatgcaaaaaaggaacttgaggaggtagttgagtatctcaagaacccttcaaagttcactcgccttggtggaaagctacctaagggcatacttttgactggtgctccaggaactgggaagacactactagcaaaggccattgctggagaagctggtgtaccattcttttaccgagcaggctctgaatttgaggaaatgtttgttggtgttggtgctcggagagtgaggtcattgtttcaagctgcaaagaagaaggcgccatgcattgtcttcattgatgaaatagatgctgtgggttcaactagaaaacagtgggaagggcacacaaagaagacgttgcatcaacttcttgttgagatggacgggtttgaacaaaatgagggaataattgtgatggctgcaacaaacttggcagacattcttgatcctgcactcacaagacctggtagatttgataggcatattgtcgtcccaagtccagatgtgcggggtcgccaagagattctggagctctatttgcaagataagccagtggcaaatgatgtagatatcaatgcaattgcccgtagtacacctggctttaatggggctgacctagccaaccttgtaaacattgcagcgataaaggctgcagttgaaggtgcggacaagttgaatgctgttcagttggagtttgccaaagatcgtattatcatgggaactgagaggagatcaatgttcatatcagatgaatcgagaaagcttactgcgtaccatgaaagtggacatgctattgttgcgctcaacacccagggtgctcaccccatacacaaagcaactatccttcctcgtgggtctgcccttggaatggtcacacaactcccctcacaggatgagacttctattagcaagaaacaactccttgcacgtcttgatgtttgcatgggtgggagggttgctgaagagctgatatttggggaagacaatgttacaactggggcgagaaatgaccttcacactgcaacagagcttgcccagtacatggtatcaaactgtgggatgagtgatgctatcggtcctgtgcatgtgaaagagcgaccaagtgtagagatgcaatcaaggatagatgctgaggtggtgaagctcctaagagaagcttatgggcgggtcaaacgattgcttaaaaagcatgagaagcaattacatgctttggcaaatgcgctgctggagcgtgaaacacttactgcagatgagatcaacaaagtagttcacccttaccaagaagaaccccagttttccttccaagacgaggagtttgccctcacttaaaagattcctttgttgcatccagattttacctactgtgaattgtaaatccgtgtacagtaagtggcatctagatgagccatcgaagtttgttcacatgcccccttctgcaaaatagggcgcaacacaccttcggtacatttttcaccttggcaccatttccatttgaggagcagccagtaaatcagaaaatgagaagattggtgttggaaaagccgatgcctgcttattgataattcttgggatggaagaccgccatggtggccggcaaggctctgggttgcaaaaccctccatacttttggttttagctaggatagatataggtgcaacattgcatgctctgaatgctaggtttctggctagggtaacatgtttaccatgttctttttacttctttattacatttgctgtaaggaaatcgtacatatggcggtagtttttttttcaaacaagcactgtttgttttttgtcaaacaatatacgttcaatgtatttgtattgctaacatgcacttgatgccttg

SEQ ID NO: 212176 - DNA, 2062 bp, Zea Mays
ggacccatttgggtctatagtacgcagccttccctgcatttgcaagagactgtttccacaaaatgaataattggtgatgggtgctgctgcacttcaaaagtatattgggagcttaggtggaattggggcatctggtgttggttctagctcatcatattctccaaaagagatgaataaggatatcatgccagagaagaatgtcaagacatttaaagatgtcaaaggttgtgatgatgcaaaaaaggaacttgaggaggtagttgagtatctcaagaacccttcaaagttcactcgccttggtggaaagctacctaagggcatacttttgactggtgctccaggaactgggaagacactactagcaaaggccattgctggagaagctggtgtaccattcttttaccgagcaggctctgaatttgaggaaatgtttgttggtgttggtgctcggagagtgaggtcattgtttcaagctgcaaagaagaaggcgccatgcattgtcttcattgatgaaatagatgctgtgggttcaactagaaaacagtgggaagggcacacaaagaagacgttgcatcaacttcttgttgagatggacgggtttgaacaaaatgagggaataattgtgatggctgcaacaaacttggcagacattcttgatcctgcactcacaagacctggtagatttgataggcatattgtcgtcccaagtccagatgtgcggggtcgccaagagattctggagctctatttgcaagataagccagtggcaaatgatgtagatatcaatgcaattgcccgtagtacacctggctttaatggggctgacctagccaaccttgtaaacattgcagcgataaaggctgcagttgaaggtgcggacaagttgaatgctgttcagttggagtttgccaaagatcgtattatcatgggaactgagaggagatcaatgttcatatcagatgaatcgagaaagcttactgcgtaccatgaaagtggacatgctattgttgcgctcaacacccagggtgctcaccccatacacaaagcaactatccttcctcgtgggtctgcccttggaatggtcacacaactcccctcacaggatgagacttctattagcaagaaacaactccttgcacgtcttgatgtttgcatgggtgggagggttgctgaagagctgatatttggggaagacaatgttacaactggggcgagaaatgaccttcacactgcaacagagcttgcccagtacatggtatcaaactgtgggatgagtgatgctatcggtcctgtgcatgtgaaagagcgaccaagtgtagagatgcaatcaaggatagatgctgaggtggtgaagctcctaagagaagcttatgggcgggtcaaacgattgcttaaaaagcatgagaagcaattacatgctttggcaaatgcgctgctggagcgtgaaacacttactgcagatgagatcaacaaagtagttcacccttaccaagaagaaccccagttttccttccaagacgaggagtttgccctcacttaaaagattcctttgttgcatccagattttacctactgtgaattgtaaatccgtgtacagtaagtggcatctagatgagccatcgaagtttgttcacatgcccccttctgcaaaatagggcgcaacacaccttcggtacatttttcaccttggcaccatttccatttgaggagcagccagtaaatcagaaaatgagaagattggtgttggaaaagccgatgcctgcttattgataattcttgggatggaagaccgccatggtggccggcaaggctctgggttgcaaaaccctccatacttttggttttagctaggatagatataggtgcaacattgcatgctctgaatgctaggtttctggctagggtaacatgtttaccatgttctttttacttctttattacatttgctgtaaggaaatcgtacatatggcggtagtttttttttcaaacaagcactgtttgttttttgtcaaacaatatacgttcaatgtatttgtattgctaacatgcacttgatgccttg

SEQ ID NO: 212177 - DNA, 1301 bp, Zea Mays
aactttctatctgaagttcagtaattctctcggcaactcagctcccgccagacaatagccaccacctccgacgccgcgtcctcgtcctctttcgcttgaaccctagcctcgcatcggccaccgccaccgctcttcgtcggcagcttcggtgcggctgaacggccgcgatggacaggcacggctcggctcggctggccacccccgaggatgtcttcacggatttccgtgcccgccgtgacggcattctcaaggcactcaccaccgatgtggagaagttctacaagttgtgcgacccagagtataaggataacttgtgcctgtatggactacctaacaaaacctgggaagtgaacgttcctgctgcggaaattcctccagaactaccagagccagcagagggaataaacgttactcgcgattcaatgccaaaggaagattggctctcgttcgtagctgtgcacagtgatgcatggttggttgctgtggcatttcactttggggctctccacggttttgataaagacgccaggagacaactccacataatgatcaataatcatcccactgtatatgaagttgtgatagggagtggggagaagcaaccaaaagcccacaacacaaattacgaaaccaagtcaagttctatcaaggaacctagttctagcagcaagctagcagagcagcctctaccaaagaaggagcgacagatcatcaaagaagatggaggcgacaaggatgaagctttcctgtgcggtacatgtggagggatgtactcggaaaatggagtattctggatcggctgcgacatttgcgacaagtggtaccatggtgactgtgtccgcatcacacctgcggaggcaaagcacatcgatcagtacggttgtcccgcttgcagcaacaagaggaacatagagagacgactccacatgatgatcaataatcatgccactgtatctgaagttgtgacagggagtggggagaagcaaccaaaagcctgcaacacaaattatgaaaccaagtcaagttctattaaggaacccggttctagcagcaggctagcagagcagcctctaccaaagaaggagcgacaaatcatcaaagaagatggaggcggcaaggatcaagctttccagtgcggtacatgtggagggatgtactcggaaaatggagtattctggattggctgcgacatttgcgataagtggtaccatggtgactgtgtccgcatcacacctgtggaggcaaagcacatcgatcagtacagttgccccgcttgcagcaacaagaggagcagagagtga

SEQ ID NO: 212178 - DNA, 2000 bp, Zea Mays
ggagaatctgatgagaacattctctatccgttaacaagcaaacagcagaggcttcgtttttccttcacaatggaaggtttgatgacatacaaacagttcatgctagttcttgaggatgatatttcaccaagtgaagctgaacgcaggtaccaagaatatagaactgagtatatcacaactcagaaacgtgcttattttgatctccacaaaaacgaagattggctgaaagacaagtaccacccaactaacctattatctgttatcgaaaggaggaatgaacgttgcaaggttatagcaaaggatttctttcttgatttgcagaatggaactctggacctaggccctggaataactgggggtgcagcaagtaaaccaggtggtagtgatggaaattctgatgatgatacggacaatgacaagagaagaaagcatggcaaagattcctcaaagggaactgattctatttctggtgccctcaaggctcatccagttagttctgaatcacgccgagtccaagctgacatagagcaaactctagctcttgtgcgtaagcttgattctgagaagggcattgaggaaaatgtactgtcaagtggtgatcatgacaagtcagatgtagacaaatcacacataggatctatggggcctataattataatcagaggtttaacgactgtcaaaggcctagagggtgttgagctcctagacactattcttacctatttatggcgtattcatggtgttgattactatggcacgtcagagtcgcatgaggccaagggccttcgtcacgtgagagtagacagtaagacttctagcacatctgatgtcagtgctgctgattgggagaagaagctggatactttctggcaggaaagactgaatggtcaagacccactggtcatacttactgctaaggacaaaattgatgcagcagctgctgaagttttagaacctctcgtcaggaaaatcagggatgaaaaatatggatggaaatatggctgtggagccaagggctgtacaaaactttttcatgctcctgagtttgtccacaagcatttgaggctcaaacatccagaccttgtattggagtctacgtcaaaagttcgagaggatctttatttccaaaactacatgaaggaccctaatgcaccaggtggaaccccagtgatgcaactgtctgcaccagacagaggaagacggagacctagcatggacagtcgtctgaaatttgaccgtggcagtaacaaagaacatgataaagctgagagagatggaggcagatatggtagagacgatcactctccaagccgtgatgggcctgatgatcagatgtttgatggtttccgtggacggccctctaatgctccttttgttgctgaattcccccctccaccgatattgatgccagtacctggtgctggtcccctaggaccatttgttcctgcacctccagagatagcgatgcatatgctgagagagcaagggccacctcctccgtttgaaccaaatggcgcaccacatggcagcacaggaatgctcgggccaatgctgggtggttcagcaccgattatagctatgcctccgaatttccgccatgaccctcgccgtctgagaagttataacgacctcgatgcccctgatgaggaagttactgtccttgactacagaagcttgtagggtccagcatccattggagatttgggctgtttcctctttatatgaaggggaaaaaaggaaggttatggacaagtaaatgaatttttttggtcgcctgtgtatcctgttagattctgttgtaacttgaatagccggaatttctatttgctctcgcgttcgtcgaaccatactccctgaatgcgctgccgttgctacagttgttggccaactttctttgacacaacgctgtagtactccctgtcccaaaaaaataggacagatattttttttgagatgtcttttgaagcgaaactttgacgataatttatttttaaaatatg

SEQ ID NO: 212179 - DNA, 2005 bp, Zea Mays
attctctatccgttaacaagcaaacagcagaggcttcgtttttccttcacaatggaaggtttgatgacatacaaacagttcatgctagttcttgaggatgatatttcaccaagtgaagctgaacgcaggtaccaagaatatagaactgagtatatcacaactcagaaacgtgcttattttgatctccacaaaaacgaagattggctgaaagacaagtaccacccaactaacctattatctgttatcgaaaggaggaatgaacgttgcaaggttatagcaaaggatttctttcttgatttgcagaatggaactctggacctaggccctggaataactgggggtgcagcaagtaaaccaggtggtagtgatggaaattctgatgatgatacggacaatgacaagagaagaaagcatggcaaagattcctcaaagggaactgattctatttctggtgccctcaaggctcatccagttagttctgaatcacgccgagtccaagctgacatagagcaaactctagctcttgtgcgtaagcttgattctgagaagggcattgaggaaaatgtactgtcaagtggtgatcatgacaagtcagatgtagacaaatcacacataggatctatggggcctataattataatcagaggtttaacgactgtcaaaggcctagagggtgttgagctcctagacactattcttacctatttatggcgtattcatggtgttgattactatggcacgtcagagtcgcatgaggccaagggccttcgtcacgtgagagtagacagtaagacttctagcacatctgatgtcagtgctgctgattgggagaagaagctggatactttctggcaggaaagactgaatggtcaagacccactggtcatacttactgctaaggacaaaattgatgcagcagctgctgaagttttagaacctctcgtcaggaaaatcagggatgaaaaatatggatggaaatatggctgtggagccaagggctgtacaaaactttttcatgctcctgagtttgtccacaagcatttgaggctcaaacatccagaccttgtattggagtctacgtcaaaagttcgagaggatctttatttccaaaactacatgaaggaccctaatgcaccaggtggaaccccagtgatgcaactgtctgcaccagacagaggaagacggagacctagcatggacagtcgtctgaaatttgaccgtggcagtaacaaagaacatgataaagctgagagagatggaggcagatatggtagagacgatcactctccaagccgtgatgggcctgatgatcagatgtttgatggtttccgtggacggccctctaatgctccttttgttgctgaattcccccctccaccgatattgatgccagtacctggtgctggtcccctaggaccatttgttcctgcacctccagagatagcgatgcatatgctgagagagcaagggccacctcctccgtttgaaccaaatggcgcaccacatggcagcacaggaatgctcgggccaatgctgggtggttcagcaccgattatagctatgcctccgaatttccgccatgaccctcgccgtctgagaagctcttacgtggcttttgttgcagttataacgacctcgatgcccctgatgaggaagttactgtccttgactacagaagcttgtagggtccagcatccattggagatttgggctgtttcctctttatatgaaggggaaaaaaggaaggttatggacaagtaaatgaatttttttggtcgcctgtgtatcctgttagattctgttgtaacttgaatagccggaatttctatttgctctcgcgttcgtcgaaccatactccctgaatgcgctgccgttgctacagttgttggccaactttctttgacacaacgctgtagtactccctgtcccaaaaaaataggacagatattttttttgagatgtcttttgaagcgaaactttgacgataatttatttttaaaatatg

SEQ ID NO: 212180 - DNA, 1540 bp, Zea Mays
aattatacttggggattgaaaccataccagccgaacacagcctcaatgggttctataggaggacacacaaccacagctaccgccgaccggcgccgccgcgtgctgttcttcccgctcccgtaccagggccacatcaaccccatgttccaactcgccggcctcctccacttgcgcggtttctccgtcaccgtcttccacaccgacttcaacgctcccgacaagtcccgccaccctgcctacgacttcgtccccgttcccgtccgcggctgcttgccgaagggcagctcggatgccttgcaggtgaccgtggagcgcatcctcgccgtgaatcgcgcctgcgaggctccgttccgggagcgcctggcctctctgctggcgcgggaggacgtcgcgtgcctggtcgctgacgcccacctgctgacgctgctggacgtggcgcgggggctcggcgtgccgacgctggtgctgcgcaccggcagcgcggcgtgcctccgcatgttcgcggcgttccccgcgctctgcgacaagggagtcgcagctggagacgccggtgactgagctgccgccgtaccgcgtccgggacctgccgtccaccaccagcgcctgccacggcgtaataagcgaggtgatttcccgtttagtgacggccgtgacgacctcctcgggtctcatcctcaacaccatggacgcgctcgagtgcggcgagctggcgtcgctccggcgagacttcggcgtccccgtgttcgacatcggcccgctccacatgctctctccggctgcctcgagcagcttgctactgcaagaccgcggctgcctcgagtggctcgacgcgcaagccccggcgtccgtgctctacgtcagcttcggcagcctcgccagcatgtccgccgccgagctggtggaaacagcctggggcatagccaacagcggctataccttcctgtgggttctccggccgggcctcgtccgcggctcgcagacgtcggaggcggcgccacccctgcccgacggcttcgacgccgcgacgcgcgggcggggcatggtcgtgagctgggcgccgcaggaggaggtcctggcgcaccctgccgtgggcgcgttctggacgcactgcggctggaactcgacgctagagagcttgtgcgcgggcgtgccggtcattgcccgcccgtgcttcggcgaccagatggggaacgcgaggtacgtggaccacgtgtggcggaccggcctcacgctcgacggcgtgctcgagaggggcgaggtggaggcggccgtcgcggcgctgatggcgccaggagagcccggcgacgggctgcgtcggagggcgcgggagctcgagagcagcgcggcggattgcatgaccaaggatgggtcgtcctgcacgaatgtcgacaagctggtagaccacattctgacactgtaggcgtttggtacaggagcagccacgtggtgctgttcttgggtactgtttttctttgcggttgaaaaataaataaaaaactggctggagcttatgatcctcaactcgtcactcagagtcaca

SEQ ID NO: 212181 - DNA, 3057 bp, Zea Mays
tcgtcagttgttgtcgactcatccaagcagacccgagatacccaaaccctcgcaccttctcggcggtggcggcggcggcgtacgggacggcagagatggccatggaggcggtggccacggtgagctccgccagtgggctccttgctatgctgcaggagcctgcgccggagctgaagctgcacgcgctcgcccgcctcaactccgtcgtccacctcttctggcccgagatctccaccagcgttcccaccattgagagcttgtacgaagatgaggagtttgagcagaggcagcttgcagcacttgttgtttctaaggtattttactacctgggcgagctaaatgattcactgtcatatgcacttggtgctggacccctatttgatgtttccgacgattctgattatgcccatgctcttttggccaaagcattagacgaatatgccagtatcaaaaccagagccttgaaagctacagaggaggaagagaacattgatcctcgattagaggccatagtggagaggatgcttgaaaagtgtatttttgatgggaaatatcaacaggccatgggtatggctgttgaatgcagaaggctggataagctggaggaagcgattgttgggtgtgataacattcagggggctctatcatattgcatcaatctttctcatcaatacgttaatcaccgtgaatatcgtttcgaggttctccgctgtcttgttaaaatataccaaactttgccaaatccagactatctgagcatttgccagtgtcttatgtttttgggtgagccagaaactgttgcatgcatattggacaagctgctttctggaaacaaggatgatgctctccttgcatatcaaattgcctttgatcttgttgagaatgaaaaccaggctttccttttgaatgtgagaaatcgtttgtcctcaccgactcctgtgccatctaaccctgacagtgggccagccgtacaagatgaccaaactgccagtactgtgggtacagacacagaagcagctggagatgttcagatgagagatgatacaagtacaccaaatggaactgctcacagtgtggatccaaatgaggtagcgcatgctgacaggcttgaaaaaattaaagggatactgtcaggggaaacttccattcagctggcattgcaatttctatacagccacaacaggtctgatcttttaattctgaagacaataaaacaggctgtggaaatgaggaatagcgtttgtcacagtgcaacaatatgtgccaatgcaatcatgcatgcgggaactactgtagatacctttctaagagagaacctggagtggttaagcagggcaaccaattgggcaaaattcagtgcaactgctggactaggtgtcattcatagaggtcatcttcaacaagggcgggctttgatggccccctacctacctcaaagtggtgcagttggtggtgggagtccatattcagaaggtggtgccctctacgcactaggtttgattcatgccaatcatggtgaaggaatcaaacaattcctccgtgaaagtcttcgcaactccagtgcagaggtcatccagcatggtgcatgtttggggcttgggcttgcagctttgggaaccgcagatgaggaaatatatgaggacataaagaatgtcctttacacagacagtgctgttgctggtgaggcagctggtattggcatgggcttgctcatggttgggaccgccagtgagaaggctagtgagatgcttgcttatgcacattgggctcaactctgatttgaaagtgccaaagtttgaattcctgtcgcatgctaaaccgtctctctttgagtatcccaaaccgacaactcagcagactacaacttcaacagtgaagctgccagcagccattctgtcaacttatgcgaaggcaaaatctagggcaaagaaggacgcagaaagcaaagctaaccaggagaaggccacagaagaggcttctggttctacctcaagcaagacggctaaagctcaggagaaggatgctgatgcaatgcaggttgacaatgccagtgagaagaaagctcctgaaccagaagcgacttatcagctccttacgaatccagctcgcgtgatccctgcccaggagaagttcatcaagctccttgaaaacagccgatatgtacctgtgaaaccagcgccttctggattcatcctcctccgagacctgcagccgactgaggctgaggatcttgcgctgaccgatgcccccacaacagtcgcaggaagcaccggcaacactgcccctgctgcaggccaacaggggtcaggatcatcagccatggccgtggacgatgagccacagccgccacaaccctttgagtacacctcgtgagcgaccgagcgtcaccttttcttattcgttttttttttgactttttgagtatgtagtgtgcggaaatttgttgttggctggaagaccttttgtagaaacatgagtagagaattttacttgaattgaagctataggatcaacgttgggaatctgggatatagcccaggtcaaaacccgcgctcccgcctgtgatcttttttttcgtgcaatgcaaagtcgagttgacatgagctgaacacggcggtaaaaatacgaaaatgttcggggcaaaccttctcggtgaaattgtaaaaaccctttcgagaaccataactcgaagttctaaatgtctttaaaactatgtagtacattcgtagtgcgtttctagaaaaaagtatatgaaaaatatcaatttcaggcaaatatgcattagaggacgagaaattttgggatttgtcctcacttgatatgtcgtttcaacattaaatttacaaaacgagattttttaaattttgcgctaatgcatatctatagatgcactattggtgtgcagagttccatttttaaaaaaacgcctaaacgttttttttctaaagagtttttaccatttcacagagtaaagggcccgccgagaattcgacgtggcgcagacatcggtcagggagattttacactagtctccaaatggtgcaccgtagggtgaag

SEQ ID NO: 212182 - DNA, 2144 bp, Zea Mays
ccagactcagggtgcgcttgtaaaaaacccaaaaataaaacactgtgaatacccctattctccatttctccttccgccgccgcacttgtcccctgaccctaggtcaaagtatcgccgacttcgccagccggatcatgtcgaccagcgccaacccgaaactgaagcggcggcgggggggcttgcggaagcagggtcctgggtaccccacggtggccaccacgggggcaatgtttgcccatgaggtgggcgccgaagggccacggagggacacgaggcaaggacccgcgttgcctagggtggttgccacctcgaccaggggaggaggtgccattgagcagggcgctgacggaatggaaggttcggcgtcgaaaactgataggagcgttcacgaggcagttggcgtcgatggcacgtacctcaccgagacacggtttgatcaatgtgccatttctccactgtcactgaaagccatcaaagatgctggatatgagaggatgactcgggtgcaggaggctactctgccaataattcttcaaggaaaggatgttcttgcaaaagcgaagacaggaacagggaaaacagttgcctttttgccatcgaagttctctctgcattacctcgttcaacttctataaatttgctggtgatgtgccctaccagggagcttgcaaaccaattggctgctgaggccaggaagcttctcaagtatcatcgctcactgggtgtgcaggttgtaataggtggcacacggttacctcaagagcaacggagcatgcaagctaacccatgtcagattcttgttgctactcctggaaggctaaaggatcatcttgagaacacgcctggattctccacccgaattagaggtgtcaaggttcttgttctagatgaggctgaccgcctgttggatatgggatttagaagagacattgagaaaataattactttcatccctaaagataggcaaacactgctgttttctgctactgtttcagaagagatccaccaaatttctcacctcgcaatgagaaaggattatgatttcattaacgctgttcaagagggtgatgaggagacacatgcccaggtaaaccaaacgtacatggttgcacctctaggtctgcacctccccatattgtatgatgtgttgaagaagcatgttgcagaagatgcagaatacaaagttatagtattctgtactactgcaatggttacaagacttgttgctgaggtactctcccagctaaaactgaatataagagagattcattccagaaagacacaatctgcaagaactaaggtctcagatgaattcaggaagtcaaagggtctcatattagtcagctccgacgtatctgcccgtggtgtagattatcctgatgtcacccttgtcatgcaagttggtctgccagctgatagagaacagtatatacatagactcggaaggactggacggaaaggcaaggaagggcaaggcatcttactactggctccctgggaaatgcattttcttagtacagttaacgatttgtcaatatcagaggctgcaacaccttcggttgattcaagcattcaggcagcagtcaaagacgcagtcagaagagtggagatgaagagcaaggaatcagcctaccaggcatggctggggtactacaactcgcacaaggctaccaaccgtgacaaggccagactcgtgatgctggctgaagagttcagtcagagcattgggctcgcagtcccgccagccattcccaaacaaattctacggaagatgggcctcagcaacgttcctgggctccggtcttcgtaactaaccgtggtgatccagatccagcagaacttgaccagtgcttgtaccagcttgctaaacgctggctcttccaccaccatcgctgcacgccctacgattagtattcaactatgtcatgttttcattcaaaagggcacgggctcgtatcaatcagttccggggaggaaaagaaaatgtatgtatttgctggcactggcagcaccacatgtgagacatgccagttgatatattcattgtgatagtagacttgtcctgctacatttatttccgaagttattggcattgcaattctcgcatgcgtgcatcattcatccatatccatggcaagctgtag

SEQ ID NO: 212183 - DNA, 2509 bp, Zea Mays
gagctgtgcaggcggcggggcacgctctagctggggaacgacgagctcggcaaaggcgatgaacgccgaagatttacaatggagaaccaccactccaccagccgacgcgcgtacagttgcgtcgggcagaggtacaggcgtacagccgtcggatgtcacaatgctgatgtcgagcttagctgattcaatttgggtggagaagggaaggagaaagagaacacaggtcccacatgtaatagcttgaggtccacatgtacgacggacggaaagttaccgtgatgccaattctgagttgaagtggatgtaggaggaaactgagcaatcaatttgggcagcggagcaaagtgaccagactcagggtgcgcttgtaaaaaacccaaaaataaaacactgtgaatacccctattctccatttctccttccgccgccgcacttgtcccctgaccctaggtcaaagtatcgccgacttcgccagccggatcatgtcgaccagcgccaacccgaaactgaagcggcggcgggggggcttgcggaagcagggtcctgggtaccccacggtggccaccacgggggcaatgtttgcccatgaggtgggcgccgaagggccacggagggacacgaggcaaggacccgcgttgcctagggtggttgccacctcgaccaggggaggaggtgccattgagcagggcgctgacggaatggaaggttcggcgtcgaaaactgataggagcgttcacgaggcagttggcgtcgatggcacgtacctcaccgagacacggtttgatcaatgtgccatttctccactgtcactgaaagccatcaaagatgctggatatgagaggatgactcgggtgcaggaggctactctgccaataattcttcaaggaaaggatgttcttgcaaaagcgaagacaggaacagggaaaacagttgcctttttgcttccagccatcgaagttctctctgcattacctcgttcaacttctataaatttgctggtgatgtgccctaccagggagcttgcaaaccaattggctgctgaggccaggaagcttctcaagtatcatcgctcactgggtgtgcaggttgtaataggtggcacacggttacctcaagagcaacggagcatgcaagctaacccatgtcagattcttgttgctactcctggaaggctaaaggatcatcttgagaacacgcctggattctccacccgaattagaggtgtcaaggttcttgttctagatgaggctgaccgcctgttggatatgggatttagaagagacattgagaaaataattactttcatccctaaagataggcaaacactgctgttttctgctactgtttcagaagagatccaccaaatttctcacctcgcaatgagaaaggattatgatttcattaacgctgttcaagagggtgatgaggagacacatgcccaggtaaaccaaacgtacatggttgcacctctaggtctgcacctccccatattgtatgatgtgttgaagaagcatgttgcagaagatgcagaatacaaagttatagtattctgtactactgcaatggttacaagacttgttgctgaggtactctcccagctaaaactgaatataagagagattcattccagaaagacacaatctgcaagaactaaggtctcagatgaattcaggaagtcaaagggtctcatattagtcagctccgacgtatctgcccgtggtgtagattatcctgatgtcacccttgtcatgcaagttggtctgccagctgatagagaacagtatatacatagactcggaaggactggacggaaaggcaaggaagggcaaggcatcttactactggctccctgggaaatgcattttcttagtacagttaacgatttgtcaatatcagaggctgcaacaccttcggttgattcaagcattcaggcagcagtcaaagacgcagtcagaagagtggagatgaagagcaaggaatcagcctaccaggcatggctggggtactacaactcgcacaaggctaccaaccgtgacaaggccagactcgtgatgctggctgaagagttcagtcagagcattgggctcgcagtcccgccagccattcccaaacaaattctacggaagatgggcctcagcaacgttcctgggctccggtcttcgtaactaaccgtggtgatccagatccagcagaacttgaccagtgcttgtaccagcttgctaaacgctggctcttccaccaccatcgctgcacgttcaaacaggccctacgattagtattcaactatgtcatgttttcattcaaaagggcacgggctcgtatcaatcagttccggggaggaaaagaaaatgtatgtatttgctggcactggcagcaccacatgtgagacatgccagttgatatattcattgtgatagtagacttgtcctgctacatttatttccgaagttattggcattgcaattctcgcatgcgtgcatcattcatccatatccatggcaagctgtag

SEQ ID NO: 212184 - DNA, 1434 bp, Zea Mays
cgacctccaggaaggaccgcactccttagtccttacacccaccaccaccagacccctgtcgcactcgtgtgccggccggcgacggcgatgatggcgactggccgatcgctcgccggggtatactccgccagagccacccgccccatgcctctacgcgccggcgcacgggcgccctgcgccggtgccgccgcggccgagcctgcggccgagcacgtgcggaggctcgtggcggagttcgacccggcggtcccgctggactccgcggtcacgccgccgagcgggtggtacaccgacccggattttctccagctcgagatcgacagcgtcttcttccgcgggtggcaggctgtcggtcacatatggcaagtgaagaacccaaatgatttcttcacaggaagatgaagcaacaggctgggaaatgtggaatttgtcgtatgtcgggatgcaaatgggaaacttcatgctttccacaatgtgtgccgacatcatgcttcactccttgcatgtggaagtggtcataagacttgcttccagtgcccttaccatggatggacatatggattggatggcacccttctgaaggctacaagaatatcaggaattaaaaacttcaataagaatgattttggtctcataccaatcaaggtggctacttggggaccttttgtgttgatcagatttgatgatgagtccactgaagataatgtttatgacacagttggaaatgaatggttgggtagtgcttcagatctgttgggtacaaatggcattgacacttcactgccgcatatttgcaggcgagaatatattatcaactgtaactggaaggtcttctgtgacaattacctagacggtggatatcatgttccatacgcacatggggatcttgcatcgggtctgcagcttcaatcctatgaaacacttacatatgaaagagttagtgttcaaagatgtgaaagtgcaccagcagaaccagatgacttcgatcgcttagggacaaaagctctatatgcctttgtttatccaaactttatgatcaacagatatggtccatggatggacactaatctagctgtcccattagattcaaccagatgcaaggtggtatttgattattttcttgacaagtctctgctggatgaccagtgctttatcaagaaaagcctcgaagacagtgagcaagtacagatagaagacattgcactgtgtgagggggttcagcgtggcctggaatcgccggcctacagtgttggaagatacgctccgtctgtggagatggccatgcaccacttccaccgcctcatgcatgctaaccttagacactgcatgaacactgttctctattgcaatcttgtgaattcagccacatttcagttacacaaaaaacatgtttgctggttatgaattttttagatgcataaaatactttctgaa

SEQ ID NO: 212185 - DNA, 1422 bp, Zea Mays
cgacctccaggaaggaccgcactccttagtccttacacccaccaccaccagacccctgtcgcactcgtgtgccggccggcgacggcgatgatggcgactggccgatcgctcgccggggtatactccgccagagccacccgccccatgcctctacgcgccggcgcacgggcgccctgcgccggtgccgccgcggccgagcctgcggccgagcacgtgcggaggctcgtggcggagttcgacccggcggtcccgctggactccgcggtcacgccgccgagcgggtggtacaccgacccggattttctccagctcgagatcgacagcgtcttcttccgcgggtggcaggctgtcggtcacatatggcaagtgaagaacccaaatgatttcttcacaggaaggctgggaaatgtggaatttgtcgtatgtcgggatgcaaatgggaaacttcatgctttccacaatgtgtgccgacatcatgcttcactccttgcatgtggaagtggtcataagacttgcttccagtgcccttaccatggatggacatatggattggatggcacccttctgaaggctacaagaatatcaggaattaaaaacttcaataagaatgattttggtctcataccaatcaaggtggctacttggggaccttttgtgttgatcagatttgatgatgagtccactgaagataatgtttatgacacagttggaaatgaatggttgggtagtgcttcagatctgttgggtacaaatggcattgacacttcactgccgcatatttgcaggcgagaatatattatcaactgtaactggaaggtcttctgtgacaattacctagacggtggatatcatgttccatacgcacatggggatcttgcatcgggtctgcagcttcaatcctatgaaacacttacatatgaaagagttagtgttcaaagatgtgaaagtgcaccagcagaaccagatgacttcgatcgcttagggacaaaagctctatatgcctttgtttatccaaactttatgatcaacagatatggtccatggatggacactaatctagctgtcccattagattcaaccagatgcaaggtggtatttgattattttcttgacaagtctctgctggatgaccagtgctttatcaagaaaagcctcgaagacagtgagcaagtacagatagaagacattgcactgtgtgagggggttcagcgtggcctggaatcgccggcctacagtgttggaagatacgctccgtctgtggagatggccatgcaccacttccaccgcctcatgcatgctaaccttagacactgcatgaacactgttctctattgcaatcttgtgaattcagccacatttcagttacacaaaaaacatgtttgctggttatgaattttttagatgcataaaatactttctgaa

SEQ ID NO: 212186 - DNA, 3572 bp, Zea Mays
cttctccatcggctgcatctcactttctttctctctgcgttcgccatgctctcgctttccttctctctgctttgcttttgtgtcgtcgatgtcgaaaactccttccagaccaagcttcgtctgctgtcggcttgcaccagtcctcacggcccacgtcgagggagacgaagggataggaggcggaggcggaggttgcaaaaaatggccgggagcatgcaggcggtggacccagcgggccggataagcgcgttgctcgcattgcgccagctcctcgccatgctctagccgctggccctgctccgccctttcattggcgcgcgtggccggggcgtccgatgttgcggcctccgtgttggggctagcgggaaaaggggaaggcggcggcgtcagcggttctacgggtgccggccgtctcgcccatggtcgccacacgaaggaagatagccacgcgccggacgcaggaggccaggcgggtgtacgatctgatccccaggtctccacggattgttggattggtcttggcctcttcagtattcttgcagcatgcatgtgggtagtatcatggaactgctgttgacgccagagtccgatcttggttatatggtcactcacatatcacttaacactgatggttcatcactgctgcttgttggatcacataacttaaatatcatgtatgtacatgagaggatatctgaagatggggatacaatcatatgcaggactgcaccgattgcttctcagatcctacccagtgacagtgatggcataaaagttctccaggcatcttggcatccctttagcaataaccattttgcagttttgacatcagatgctgttttcaggttatttgatctttcatccgatttagaacagccagagcagggattttatttgcagccaattgtacctgggaaatgtcaaaatgcttcagcgatttgtccagtgggtttctcttatgggagcgatcatctatgggatagattttcggttttcatcttattcagtgatggttcaatttttgtcctctgcccagttgttccatttggaagtgactatagcaagaagcatattcaggaaatatatgaagatgttaatgcatttggattgaaatcttcaaatccaaatgttgtcactaattcacatttggccatagcttggttggaggcaacatttcctgacctgttacatcaatcaacagataccagttttctgatgtcaaaagctcatgcatatgcgccattagatgattctctaacattacaggggcctctttgtacagtttgtgaggaaagtaatgaatctgaaagcaagagcagcagttgtgaaggaaaagctgtaggttttatgtacagttctgctggcaaagattcagttcttgtgactgcctggggtagtgggctgcttcaggttgatgctcttgcagatgaaattcaaccgcggtggaacattggggttccttcgcgtcttaatgtcgattcacatggacaaataaataatgttgccatgatatgtgactccaattcgcaagatccattggcgttgagatcgcatcgaccatctagtacaggatcaaacgtgaagagcaacatagaagctgtttggatgggacactctcctcctttgctaaggctcgcaattgtggatttggcattaccaaaaactcctaatgataactctctgtcattgtttgctgatccccttgttccagagagattttattgtgcgcatggtggggggcttgacatggtcacactgcacttcctaccattttcataccctgaaatgtcttcgacaccaccctctgtgcatcctgtcctcactacagggaacagcgaaacaagctcaccttttctttctggatttgttaccatagctgatgcatatggtcatgtacagttagctggcatcacatgcttgggtgagtgctttgtggtggagatgaagggttggaaggaaccggcacctcttcagcttgacttagaaagcaaaatcgtcaaggatgtggagcctcctgcaactggaatgatcagcaaagaacttattgctggtccagacccacccatacttccatcatcttcaagcctgaaatcgttgaccccagactctattgaaggaaaatctacacttcaccactatattaaggtcttccatgagtactatgtggagtacggacacaaggtgttcattgaactcaaggagcatgcggactatttgaagacagaaatggaagataaacagaaacgcttggaagcagtgaagaaatcacttatatccgtagaagccaaagatggagacatcaacaagaggatagatcgggccttcaaggtgtatgaactgttggagaagcgaatagatagcttcaagatgcttcctgctgcaaacaagaaaccattaacccaggcagagcaggagttcaaatcacagcttgatcggttcgcagatgtggagctggatgctttgcgttcctccattgccgccctgagtgctaggatgaaacgttttgctcagcaatccacgggcagtgcggctagcacaggaatggtgccatggcaggcacaaagggctggacggagccatatctcagaatcccagatgtcacttctgaaatcttcgcttgagaagctctccctcctcaacgaagagaacagtctgaagctccggcttattgatcatgaactcaagaaccaggaacgataggttggcaggtccatgtgcgacttattgccatattggtattttgttgttcggacactaagtacaggatccataggagcctgtttgctgtcactttctgtggggggctcgcgaactgcatttgcatgtcagcgtgttgtaagttgtaactagcaatacagaaccaagtgcaaaccgctacaccttttcctcctgcagatcgggaccggtagggaaggtttaaggcgtgtttggtgtgtggcgtatggcgccacgccacgcctaagttgcggcggccgaattggccgccacaactgcggcacgaaaagtgcggcggatggcggtggcgtaggcaaggtaccaaacacgcctttagtgctctgtgttttgtactgcatggtctgaagctgcagagtgcagactaccattggagggtaacgagtagtcccagcaagtggtacagccatacaggcgagatggcatgtgcctgggaaatgagaatagagtgatcgaacctgcttcgaattatttaggggactgactgctcttatttcattgttttgctttttcttttgcgtgtactagggtttagtggccacgcttttgtttattttaccatcaggaatacatctttaatcagttaccctatcgtatctattatcttatctcaaagtttactctatagttagtgtaatctataatgcaaaattttcatacattttatatgatgtgctgcagacagccttaggccgtgtttgtttcggattataatatctccagattatataatccagcacaaataattcagcaggtaaataaatacctatattatgggttcaaattatataatctaaagttcatattatgattaatctctcaagagtagcttatttaag

SEQ ID NO: 212187 - DNA, 3927 bp, Zea Mays
cttctccatcggctgcatctcactttctttctctctgcgttcgccatgctctcgctttccttctctctgctttgcttttgtgtcgtcgatgtcgaaaactccttccagaccaagcttcgtctgctgtcggcttgcaccagtcctcacggcccacgtcgagggagacgaagggataggaggcggaggcggaggttgcaaaaaatggccgggagcatgcaggcggtggacccagcgggccggataagcgcgttgctcgcattgcgccagctcctcgccatgctctagccgctggccctgctccgccctttcattggcgcgcgtggccggggcgtccgatgttgcggcctccgtgttggggctagcgggaaaaggggaaggcggcggcgtcagcggttctacgggtgccggccgtctcgcccatggtcgccacacgaaggaagatagccacgcgccggacgcaggaggccaggcgggtgtacgatctgatccccaggatgcagacctggacatgccatgcgcccatgccttcttggtggttggtttgttcttcagatgtagaaagctacccgaaatccattgaactttggcagtctttttcatggtttcctgctcctatttctatggcggcctcgtcttgtttgtcagtcaagcaacaaccatgtggcacagattaataattcaattcaaggaaatataagtactgttgtatgccattctccagtcaattctatagcacggagggtgcttggttcgtttatccgaaatttgtcaggctcagctcaggctccgctcgaagcactgatgacctacatgatgattggtgccacacgccatgccacaacctttgtgtctccacggattgttggattggtcttggcctcttcagtattcttgcagcatgcatgtgggtagtatcatggaactgctgttgacgccagagtccgatcttggttatatggtcactcacatatcacttaacactgatggttcatcactgctgcttgttggatcacataacttaaatatcatgtatgtacatgagaggatatctgaagatggggatacaatcatatgcaggactgcaccgattgcttctcagatcctacccagtgacagtgatggcataaaagttctccaggcatcttggcatccctttagcaataaccattttgcagttttgacatcagatgctgttttcaggttatttgatctttcatccgatttagaacagccagagcagggattttatttgcagccaattgtacctgggaaatgtcaaaatgcttcagcgatttgtccagtgggtttctcttatgggagcgatcatctatgggatagattttcggttttcatcttattcagtgatggttcaatttttgtcctctgcccagttgttccatttggaagtgactatagcaagaagcatattcaggaaatatatgaagatgttaatgcatttggattgaaatcttcaaatccaaatgttgtcactaattcacatttggccatagcttggttggaggcaacatttcctgacctgttacatcaatcaacagataccagttttctgatgtcaaaagctcatgcatatgcgccattagatgattctctaacattacaggggcctctttgtacagtttgtgaggaaagtaatgaatctgaaagcaagagcagcagttgtgaaggaaaagctgtaggttttatgtacagttctgctggcaaagattcagttcttgtgactgcctggggtagtgggctgcttcaggttgatgctcttgcagatgaaattcaaccgcggtggaacattggggttccttcgcgtcttaatgtcgattcacatggacaaataaataatgttgccatgatatgtgactccaattcgcaagatccattggcgttgagatcgcatcgaccatctagtacaggatcaaacgtgaagagcaacatagaagctgtttggatgggacactctcctcctttgctaaggctcgcaattgtggatttggcattaccaaaaactcctaatgataactctctgtcattgtttgctgatccccttgttccagagagattttattgtgcgcatggtggggggcttgacatggtcacactgcacttcctaccattttcataccctgaaatgtcttcgacaccaccctctgtgcatcctgtcctcactacagggaacagcgaaacaagctcaccttttctttctggatttgttaccatagctgatgcatatggtcatgtacagttagctggcatcacatgcttgggtgagtgctttgtggtggagatgaagggttggaaggaaccggcacctcttcagcttgacttagaaagcaaaatcgtcaaggatgtggagcctcctgcaactggaatgatcagcaaagaacttattgctggtccagacccacccatacttccatcatcttcaagcctgaaatcgttgaccccagactctattgaaggaaaatctacacttcaccactatattaaggtcttccatgagtactatgtggagtacggacacaaggtgttcattgaactcaaggagcatgcggactatttgaagacagaaatggaagataaacagaaacgcttggaagcagtgaagaaatcacttatatccgtagaagccaaagatggagacatcaacaagaggatagatcgggccttcaaggtgtatgaactgttggagaagcgaatagatagcttcaagatgcttcctgctgcaaacaagaaaccattaacccaggcagagcaggagttcaaatcacagcttgatcggttcgcagatgtggagctggatgctttgcgttcctccattgccgccctgagtgctaggatgaaacgttttgctcagcaatccacgggcagtgcggctagcacaggaatggtgccatggcaggcacaaagggctggacggagccatatctcagaatcccagatgtcacttctgaaatcttcgcttgagaagctctccctcctcaacgaagagaacagtctgaagctccggcttattgatcatgaactcaagaaccaggaacgataggttggcaggtccatgtgcgacttattgccatattggtattttgttgttcggacactaagtacaggatccataggagcctgtttgctgtcactttctgtggggggctcgcgaactgcatttgcatgtcagcgtgttgtaagttgtaactagcaatacagaaccaagtgcaaaccgctacaccttttcctcctgcagatcgggaccggtagggaaggtttaaggcgtgtttggtgtgtggcgtatggcgccacgccacgcctaagttgcggcggccgaattggccgccacaactgcggcacgaaaagtgcggcggatggcggtggcgtaggcaaggtaccaaacacgcctttagtgctctgtgttttgtactgcatggtctgaagctgcagagtgcagactaccattggagggtaacgagtagtcccagcaagtggtacagccatacaggcgagatggcatgtgcctgggaaatgagaatagagtgatcgaacctgcttcgaattatttaggggactgactgctcttatttcattgttttgctttttcttttgcgtgtactagggtttagtggccacgcttttgtttattttaccatcaggaatacatctttaatcagttaccctatcgtatctattatcttatctcaaagtttactctatagttagtgtaatctataatgcaaaattttcatacattttatatgatgtgctgcagacagccttaggccgtgtttgtttcggattataatatctccagattatataatccagcacaaataattcagcaggtaaataaatacctatattatgggttcaaattatataatctaaagttcatattatgattaatctctcaagagtagcttatttaag

SEQ ID NO: 212188 - DNA, 4612 bp, Zea Mays
atcttttaaatgtgtagccacaatggtcaaaaactcgcacaaggcgtgagtaatctatttacacgtaaaaaaattcaaaccattatagcttttttactgtaactacgtcatttatttatatgccaaaaaaaacttcaacccaggcacacttcacgtttcatttggtgtgtgcttttgctgctttttccttacacataaaagtgttcttctctgatatctgtagttgtagatagattattgttttataactttctgttagttattgttctatcacgacctgttacctatctaatgtcctgccacaacatcgccattaatgtgtttttcagacttaagttatgaggtgtttgttctttttatatgtaaatcctaaaaattttgactccaaagtcatccattacattattttactaaatctatatctttaacttttgtgtcactctgcattttttaagattcaaaaaacatgttctgttttacagtttcatttcttgttaataatatggtattgtatttccttctatagtgctcaaacgtaatgatgtttatccttctttgataaatatagacgatcataagtaccaatccatgatgctttatccttaaactcctccacaaactcatcttttctaataaaaagttggaaaggacgagttagaatttcatgtacagtcccagtgcagcagtaaaactctccggatcgtaagtatagtttgtagtaacctctacaatttctttacattcggattttgatccataacctttgtaatcaatttgactgaatcatttatccctaagatcctatgattaaacaaccttcatcgattatagaatcccaaggagcatgccaaatttgtaggcaaattttaaatcaacagtgttggcaaggaatgataatttatagttcatttgaaatactacattaaatcttattaattgcggttacaacaaactaaagccctactcctaatctttgcatgtaacaaaaactacatgtattctatgtaatataagagcacccctacaatgcggctacttcaatgaacaatttgtaaatgcatttaaatgtactcactcaaatagtcttattttcaaaattgagttttccatttttcatagtcctatttgagttgtgattccaaatctgatataaatggttgtttatgtccccgtgcaaagtaacccatctacaaaaaaagactggtgcgtgtttatggaaacatcaataccgaggagttttcgcaaaaaaacaaggagtgtttcatgatgtaattaattagatgataagaaagaggtcttctccttggtcattgtaccaaggtgaaatagaactataagtgaatggagggagtatgtaacattctgaattcaccatgtaatatttgaacaaaataaaaaacaacagaacccaatcaattagtaacttagtactaacagctacttttttattctttgtcaaatctaatttatctcagcctcatatatggatagatcatattatggatcactaaatcaagaatggctgcattgtcatgccatattctggtacgaagagagagttcgtagcaaccatcatgtcagatccattgtttagaacaaatgttgcaaagctgttgacgccagagtccgatcttggttatatggtcactcacatatcacttaacactgatggttcatcactgctgcttgttggatcacataacttaaatatcatgtatgtacatgagaggatatctgaagatggggatacaatcatatgcaggactgcaccgattgcttctcagatcctacccagtgacagtgatggcataaaagttctccaggcatcttggcatccctttagcaataaccattttgcagttttgacatcagatgctgttttcaggttatttgatctttcatccgatttagaacagccagagcagggattttatttgcagccaattgtacctgggaaatgtcaaaatgcttcagcgatttgtccagtgggtttctcttatgggagcgatcatctatgggatagattttcggttttcatcttattcagtgatggttcaatttttgtcctctgcccagttgttccatttggaagtgactatagcaagaagcatattcaggaaatatatgaagatgttaatgcatttggattgaaatcttcaaatccaaatgttgtcactaattcacatttggccatagcttggttggaggcaacatttcctgacctgttacatcaatcaacagataccagttttctgatgtcaaaagctcatgcatatgcgccattagatgattctctaacattacaggggcctctttgtacagtttgtgaggaaagtaatgaatctgaaagcaagagcagcagttgtgaaggaaaagctgtaggttttatgtacagttctgctggcaaagattcagttcttgtgactgcctggggtagtgggctgcttcaggttgatgctcttgcagatgaaattcaaccgcggtggaacattggggttccttcgcgtcttaatgtcgattcacatggacaaataaataatgttgccatgatatgtgactccaattcgcaagatccattggcgttgagatcgcatcgaccatctagtacaggatcaaacgtgaagagcaacatagaagctgtttggatgggacactctcctcctttgctaaggctcgcaattgtggatttggcattaccaaaaactcctaatgataactctctgtcattgtttgctgatccccttgttccagagagattttattgtgcgcatggtggggggcttgacatggtcacactgcacttcctaccattttcataccctgaaatgtcttcgacaccaccctctgtgcatcctgtcctcactacagggaacagcgaaacaagctcaccttttctttctggatttgttaccatagctgatgcatatggtcatgtacagttagctggcatcacatgcttgggtgagtgctttgtggtggagatgaagggttggaaggaaccggcacctcttcagcttgacttagaaagcaaaatcgtcaaggatgtggagcctcctgcaactggaatgatcagcaaagaacttattgctggtccagacccacccatacttccatcatcttcaagcctgaaatcgttgaccccagactctattgaaggaaaatctacacttcaccactatattaaggtcttccatgagtactatgtggagtacggacacaaggtgttcattgaactcaaggagcatgcggactatttgaagacagaaatggaagataaacagaaacgcttggaagcagtgaagaaatcacttatatccgtagaagccaaagatggagacatcaacaagaggatagatcgggccttcaaggtgtatgaactgttggagaagcgaatagatagcttcaagatgcttcctgctgcaaacaagaaaccattaacccaggcagagcaggagttcaaatcacagcttgatcggttcgcagatgtggagctggatgctttgcgttcctccattgccgccctgagtgctaggatgaaacgttttgctcagcaatccacgggcagtgcggctagcacaggaatggtgccatggcaggcacaaagggctggacggagccatatctcagaatcccagatgtcacttctgaaatcttcgcttgagaagctctccctcctcaacgaagagaacagtctgaagctccggcttattgatcatgaactcaagaaccaggaacgataggttggcaggtccatgtgcgacttattgccatattggtattttgttgttcggacactaagtacaggatccataggagcctgtttgctgtcactttctgtggggggctcgcgaactgcatttgcatgtcagcgtgttgtaagttgtaactagcaatacagaaccaagtgcaaaccgctacaccttttcctcctgcagatcgggaccggtagggaaggtttaaggcgtgtttggtgtgtggcgtatggcgccacgccacgcctaagttgcggcggccgaattggccgccacaactgcggcacgaaaagtgcggcggatggcggtggcgtaggcaaggtaccaaacacgcctttagtgctctgtgttttgtactgcatggtctgaagctgcagagtgcagactaccattggagggtaacgagtagtcccagcaagtggtacagccatacaggcgagatggcatgtgcctgggaaatgagaatagagtgatcgaacctgcttcgaattatttaggggactgactgctcttatttcattgttttgctttttcttttgcgtgtactagggtttagtggccacgcttttgtttattttaccatcaggaatacatctttaatcagttaccctatcgtatctattatcttatctcaaagtttactctatagttagtgtaatctataatgcaaaattttcatacattttatatgatgtgctgcagacagccttaggccgtgtttgtttcggattataatatctccagattatataatccagcacaaataattcagcaggtaaataaatacctatattatgggttcaaattatataatctaaagttcatattatgattaatctctcaagagtagcttatttaag

SEQ ID NO: 212189 - DNA, 2837 bp, Zea Mays
tatttgaagatcctacccagtgacagtgatggcataaaagttctccaggcatcttggcatccctttagcaataaccattttgcagttttgacatcagatgctgttttcaggttatttgatctttcatccgatttagaacagccagagcagggattttatttgcagccaattgtacctgggaaatgtcaaaatgcttcagcgatttgtccagtgggtttctcttatgggagcgatcatctatgggatagattttcggttttcatcttattcagtgatggttcaatttttgtcctctgcccagttgttccatttggaagtgactatagcaagaagcatattcaggaaatatatgaagatgttaatgcatttggattgaaatcttcaaatccaaatgttgtcactaattcacatttggccatagcttggttggaggcaacatttcctgacctgttacatcaatcaacagataccagttttctgatgtcaaaagctcatgcatatgcgccattagatgattctctaacattacaggggcctctttgtacagtttgtgaggaaagtaatgaatctgaaagcaagagcagcagttgtgaaggaaaagctgtaggttttatgtacagttctgctggcaaagattcagttcttgtgactgcctggggtagtgggctgcttcaggttgatgctcttgcagatgaaattcaaccgcggtggaacattggggttccttcgcgtcttaatgtcgattcacatggacaaataaataatgttgccatgatatgtgactccaattcgcaagatccattggcgttgagatcgcatcgaccatctagtacaggatcaaacgtgaagagcaacatagaagctgtttggatgggacactctcctcctttgctaaggctcgcaattgtggatttggcattaccaaaaactcctaatgataactctctgtcattgtttgctgatccccttgttccagagagattttattgtgcgcatggtggggggcttgacatggtcacactgcacttcctaccattttcataccctgaaatgtcttcgacaccaccctctgtgcatcctgtcctcactacagggaacagcgaaacaagctcaccttttctttctggatttgttaccatagctgatgcatatggtcatgtacagttagctggcatcacatgcttgggtgagtgctttgtggtggagatgaagggttggaaggaaccggcacctcttcagcttgacttagaaagcaaaatcgtcaaggatgtggagcctcctgcaactggaatgatcagcaaagaacttattgctggtccagacccacccatacttccatcatcttcaagcctgaaatcgttgaccccagactctattgaaggaaaatctacacttcaccactatattaaggtcttccatgagtactatgtggagtacggacacaaggtgttcattgaactcaaggagcatgcggactatttgaagacagaaatggaagataaacagaaacgcttggaagcagtgaagaaatcacttatatccgtagaagccaaagatggagacatcaacaagaggatagatcgggccttcaaggtgtatgaactgttggagaagcgaatagatagcttcaagatgcttcctgctgcaaacaagaaaccattaacccaggcagagcaggagttcaaatcacagcttgatcggttcgcagatgtggagctggatgctttgcgttcctccattgccgccctgagtgctaggatgaaacgttttgctcagcaatccacgggcagtgcggctagcacaggaatggtgccatggcaggcacaaagggctggacggagccatatctcagaatcccagatgtcacttctgaaatcttcgcttgagaagctctccctcctcaacgaagagaacagtctgaagctccggcttattgatcatgaactcaagaaccaggaacgataggttggcaggtccatgtgcgacttattgccatattggtattttgttgttcggacactaagtacaggatccataggagcctgtttgctgtcactttctgtggggggctcgcgaactgcatttgcatgtcagcgtgttgtaagttgtaactagcaatacagaaccaagtgcaaaccgctacaccttttcctcctgcagatcgggaccggtagggaaggtttaaggcgtgtttggtgtgtggcgtatggcgccacgccacgcctaagttgcggcggccgaattggccgccacaactgcggcacgaaaagtgcggcggatggcggtggcgtaggcaaggtaccaaacacgcctttagtgctctgtgttttgtactgcatggtctgaagctgcagagtgcagactaccattggagggtaacgagtagtcccagcaagtggtacagccatacaggcgagatggcatgtgcctgggaaatgagaatagagtgatcgaacctgcttcgaattatttaggggactgactgctcttatttcattgttttgctttttcttttgcgtgtactagggtttagtggccacgcttttgtttattttaccatcaggaatacatctttaatcagttaccctatcgtatctattatcttatctcaaagtttactctatagttagtgtaatctataatgcaaaattttcatacattttatatgatgtgctgcagacagccttaggccgtgtttgtttcggattataatatctccagattatataatccagcacaaataattcagcaggtaaataaatacctatattatgggttcaaattatataatctaaagttcatattatgattaatctctcaagagtagcttatttaag

SEQ ID NO: 212190 - DNA, 1182 bp, Zea Mays
caagaagagaaatctcgggcgggtgagcagcccaacaggcaacagcagctctccaccttcctcaccctttcctcctgaatcctgatatttcctcctttccccatcccttcccctggcttcacggctcggctggctgcacgccggagccccggcgccagatctcgccaagtgccagggccgccgcaggcccctctttgcctgcgcgagtctcagaatcccgagagggaaaaagaaaagaaaagatgatgacttcctctgcctgttactacctgtgccgctccctcgtccgggctcctccgctcaagtcgaggagtgcagtgcgctgtccaagcgccgccccgccaggagccagcggtgccacctccacctccaagacacaggatccagttgaaaaccagaagctatgtgcctatttggttgagaaggcagtcaatagacttccgccaggagcagagaatatacttgggatctttgatctgcgaggctttcgggttgaaaatggtgatctccagttcctaaagtttttgatggacgttttttactattactacccgaagcggcttggccaagttctttttgtcgatgctccatttgtttttcaaccaatgtggcaggttgttaaacctctgttgaaatcatatgcctccctggtaagattttgtgataccgagactgtgaggaaggaatacttcaaagaagaaactgtgcctcctgatttccgcgattaggtggtctcggaaacatgacctttaattgattgagaatcgattggcacccaggggggctggcgccttcctataccttttgattaacttctcaaaagttgctcagacgacaacaaacgattggagagtccagtaaaaaatgaccctgtagtcctgtacttgtataacttctgcgaagtagaatgctgagtttaggctgctgtctggagtgctcctgtaccatatttttctggttttggatgaagctatatggaccaaattcatctctgttgaacaattgccaattacataacttgtgtttgcccaattccatggtgtagtaccataacttctcagtgcagtgcagacaacacatggattccatttttgattaaagtatcatctgctacaaatatgaatcatggtttagtttgtagacatcataaagaaacacacagattaatcaaaccagtcttcg

SEQ ID NO: 212191 - DNA, 1401 bp, Zea Mays
cctggcttcacggctcggctggctgcacgccggagccccggcgccagatctcgccaagtgccagggccgccgcaggcccctctttgcctgcgcgagtctcagaatcccgagagggaaaaagaaaagaaaagatgatgacttcctctgcctgttactacctgtgccgctccctcgtccgggctcctccgctcaagtcgaggagtgcagtgcgctgtccaagcgccgccccgccaggagccagcggtgccacctccacctccaagcttgtcctagaggtgaaagaacggctagcaagggagcacccaggcctccccacgggcaggaacgggagggacgatgacgacatggtcctctggttcctaaaggaccgcaagttctccgtcgatgaagccgtctccaagctcaccaaggcgatcaaatggcgttaggactttggtgttgcagagttatcagaggaatcagtgaaaatcctgtaccaaactggcaaggcatatgtacatgattccttggacatttatggccgaccagtgctaattgtagtggcagccaaacattttccttcgacacaggatccagttgaaaaccagaagctatgtgcctatttggttgagaaggcagtcaatagacttccgccaggagcagagaatatacttgggatctttgatctgcgaggctttcgggttgaaaatggtgatctccagttcctaaagtttttgatggacgttttttactattactacccgaagcggcttggccaagttctttttgtcgatgctccatttgtttttcaaccaatgtggcaggttgttaaacctctgttgaaatcatatgcctccctggtaagattttgtgataccgagactgtgaggaaggaatacttcaaagaagaaactgtgcctcctgatttccgcgattaggtgacatgattatttcttcagtaattgcaagtggtctcggaaacatgacctttaattgattgagaatcgattggcacccaggggggctggcgccttcctataccttttgattaacttctcaaaagttgctcagacgacaacaaacgattggagagtccagtaaaaaatgaccctgtagtcctgtacttgtataacttctgcgaagtagaatgctgagtttaggctgctgtctggagtgctcctgtaccatatttttctggttttggatgaagctatatggaccaaattcatctctgttgaacaattgccaattacataacttgtgtttgcccaattccatggtgtagtaccataacttctcagtgcagtgcagacaacacatggattccatttttgattaaagtatcatctgctacaaatatgaatcatggtttagtttgtagacatcataaagaaacacacagattaatcaaaccagtcttcg

SEQ ID NO: 212192 - DNA, 643 bp, Zea Mays
ctggcttcacggctcggctggctgcacgccggagccccggcgccagatctcgccaagtgccagggccgccgcaggcccctctttgcctgcgcgagtctcagaatcccgagagggaaaaagaaaagaaaagatgatgacttcctctgcctgttactacctgtgccgctccctcgtccgggctcctccgctcaagtcgaggagtgcagtgcgctgtccaagcgccgccccgccaggagccagcggtgccacctccacctccaagacacaggatccagttgaaaaccagaagctatgtgcctatttggttgagaaggcagtcaatagacttccgccaggagcagagaatatacttgggatctttgatctgcgaggctttcgggttgaaaatggtgatctccagttcctaaagtttttgatggacgttttttactattactacccgaagcggcttggccaagttctttttgtcgatgctccatttgtttttcaaccaatgtggcaggttgttaaacctctgttgaaatcatatgcctccctggtaagattttgtgataccgagactgtgaggaaggaatacttcaaagaagaaactgtgcctcctgatttccgcgattagattatttttagttcctccaatctctcc

SEQ ID NO: 212193 - DNA, 1165 bp, Zea Mays
tgttttttgttttgagggaaggaaatgaaacaagcagacctgagaacagtgggctctcttccgcgttggatttgctgactgaagccaaaaaggagatcgattccttttccaagggaggtcccatttcgtttgcagatctgatccagtttgcagcacaatcagcactgaagagatcgtttcttgacgctgccattgccaaatgtggtggaaatgaagagaagggaagaacactgtactctgcatatggttcaaatgggcagtggggtctgttcgatagaacgttcgggagagcagacgcacaggaagcagatccagagggaagagtgcctgactggagcaaggcttctgtgcaggagatgaaggataggttcgtcgctgttgggttgggtcctcgccagcttgctgttatgtcagcgttccttggacctgaccaggctgctacggagggacgactgatagctgatccggattgccgtccatgggtggagaagtaccagcggagccgcgagaccgtctcccggactgactatgaggttgacctgataactacactcacaaagctgagctcccttggccagaagataaactacgaagcctacacataccctaagcagaagattgacctgggaaaactgaaactgtaagagatgattgccgggcacctgcatcggccgtatccaggaatcgggagctaattgtatggtaggctctgtctgctagagtgatttgattcggcgctgacgtccaagtattggctacttactggtcagctgtcagacattcttcccacggcaattaggatggtccctgtacatggttaaattggttctcccatttcgttttgtgtgaacttgaagaggcaaacgcttgtgagaagtgaggtgttgtgtcaatccccttacgtatacgagacgactgaagaattagtagaaaagaagtgcaagtgtcatgtcttgagtctgaagtctgagctcatgtttctgaattctgatcagaagcaggacagctggctcgtcattttgcttgcccatttctctgcctcgaccactcgcaccactgccgcaaataagaataacgtgatcgtcaaacatatacggaacgataagtagcaccccctttggtcaattacattacagtggctctataatctttctctgaagtctag

SEQ ID NO: 212194 - DNA, 2910 bp, Zea Mays
atctccgatcgtccgtgtccctcaccaaaagttcaaaaccccatccaattccaaatcccacttctcgccagttcacctccgcctccgctcctcccctccccctcccgtcctgccatggccaccgcagcacgcgccctcgtcgccgcacgcccggcacggccgctgctgccgtctcggcgcctcccgtcctcctcttccatccgtcccgcgcggcaacgtgctggcgtcgggtgcgtccgctgcatggctcggcggccggattccacctattccccgctgcgttcgggccagggcggtgaccgtgcaccgactgaaatggcgcctctgttccctggctgcgactacgagcactggctcatcgtcatggacaagcccgggggcgagggcgccaccaagcagcaaatgatagattgttacatccagacccttgcccaggtggtagggagtgaagaggaggcgaagaagaggatatataatgtgtcctgcgagcgctattttggattcggatgcgaaattgacgaggagacctccaacaaactcgaaggccttccaggggttctttttgtgcttcctgactcttacgttgatgctgagaacaaggattatggtgctgagttatttgtgaacggtgaaatcgttcagcgatctccagaaaggcagagaagggtggagccagtgcctcagagagctcaggatcgaccacggtacagtgaccggacccgctatgtgaagcggagggagaaccaatcttaccagagatgatgtttccgtctctgaagatgtaaaatgtcacggtttccacaagtgtccaaatgcggtactgaagatgcagcagcaactccccactactcatatgagaatggcatccgttctgtttgccgcgcattttaagctgtatatgcttattatgcatttgggcttgtacctcagtcgatatgaacgatgtatcctttgaactaacgcattataatttttgaaaccgttttagccagaaattaatcaactgttgatgattatcatatgatataccgcatgatcatctcggaaggggcccgtccgttcgatcgttcccctctcacaaactgctccagtactccaacccgttaaactgttgatggtgacatgatgccacattgccactggcagtcatatgcatgccgtcaccatcacattctggtagagataacggtgatgcaggcaaacgggacgcggagggtgcagcccgcgatctgtaacgtgtggcgcagcgggcgatctccgattcgctgccttatcctctgctactgccgcaccaaagcgtgagcaagcctgcctcccgcgagagcgctcaaccagccaagccggcgtcagaggcgagcagagaaatggcgggagcgaacttcctctccaccgcggcgctcgtcgcccgcggcgtcgctgcctgctcttctatttcaactccgacacggaggcacccgcaaatccgggtgtgctgccgggctgacgttgaggctatggaggcctatgcccatgaagagcgccttcgattccgtcggagagatttcatcggcacctgcgtcggcaccgctattggtttggaaatgatcgacggctctacgagtttctctggagtggctactgcagctgatctcattgagcgtagacaaaggtcggagttccaatcaaaaatcaaagacaccctttacgtagccataaaggctaagccagagctcgttccatcgttgttgaccatggcactgaatgatgccatgacatacgacaagaccacaaaaactggaggcgcaaatggatctatcaggctagaaacaagcagacctgagaacagtgggctctcttccgcgttggatttgctgactgaagccaaaaaggagatcgattccttttccaagggaggtcccatttcgtttgcagatctgatccagtttgcagcacaatcagcactgaagagatcgtttcttgacgctgccattgccaaatgtggtggaaatgaagagaagggaagaacactgtactctgcatatggttcaaatgggcagtggggtctgttcgatagaacgttcgggagagcagacgcacaggaagcagatccagagggaagagtgcctgactggagcaaggcttctgtgcaggagatgaaggatagcttgctgttatgtcagcgttccttggacctgaccaggctgctacggagggacgactgatagctgatccggattgccgtccatgggtggagaagtaccagcggagccgcgagaccgtctcccggactgactatgaggttgacctgataactacactcacaaagctgagctcccttggccagaagataaactacgaagcctacacataccctaagcagaagattgacctgggaaaactgaaactgtaagagatgattgccgggcacctgcatcggccgtatccaggaatcgggagctaattgtatggtaggctctgtctgctagagtgatttgattcggcgctgacgtccaagtattggctacttactggtcagctgtcagacattcttcccacggcaattaggatggtccctgtacatggttaaattggttctcccatttcgttttgtgtgaacttgaagaggcaaacgcttgtgagaagtgaggtgttgtgtcaatccccttacgtatacgagacgactgaagaattagtagaaaagaagtgcaagtgtcatgtcttgagtctgaagtctgagctcatgtttctgaattctgatcagaagcaggacagctggctcgtcattttgcttgcccatttctctgcctcgaccactcgcaccactgccgcaaataagaataacgtgatcgtcaaacatatacggaacgataagtagcaccccctttggtcaattacattacagtggctctataatctttctctgaagtctag

SEQ ID NO: 212195 - DNA, 3034 bp, Zea Mays
ttcagttcgagtccgagtgtgcgcaggctaacggacggcccatgggagtgtcaatactcaataggctgaaggacaggacagcaaaaatatctccgatcgtccgtgtccctcaccaaaagttcaaaaccccatccaattccaaatcccacttctcgccagttcacctccgcctccgctcctcccctccccctcccgtcctgccatggccaccgcagcacgcgccctcgtcgccgcacgcccggcacggccgctgctgccgtctcggcgcctcccgtcctcctcttccatccgtcccgcgcggcaacgtgctggcgtcgggtgcgtccgctgcatggctcggcggccggattccacctattccccgctgcgttcgggccagggcggtgaccgtgcaccgactgaaatggcgcctctgttccctggctgcgactacgagcactggctcatcgtcatggacaagcccgggggcgagggcgccaccaagcagcaaatgatagattgttacatccagacccttgcccaggtggtagggagtgaagaggaggcgaagaagaggatatataatgtgtcctgcgagcgctattttggattcggatgcgaaattgacgaggagacctccaacaaactcgaaggccttccaggggttctttttgtgcttcctgactcttacgttgatgctgagaacaaggattatggtgctgagttatttgtgaacggtgaaatcgttcagcgatctccagaaaggcagagaagggtggagccagtgcctcagagagctcaggatcgaccacggtacagtgaccggacccgctatgtgaagcggagggagaaccaatcttaccagagatgatgtttccgtctctgaagatgtaaaatgtcacggtttccacaagtgtccaaatgcggtactgaagatgcagcagcaactccccactactcatatgagaatggcatccgttctgtttgccgcgcattttaagctgtatatgcttattatgcatttgggcttgtacctcagtcgatatgaacgatgtatcctttgaactaacgcattataatttttgaaaccgttttagccagaaattaatcaactgttgatgattatcatatgatataccgcatgatcatctcggaaggggcccgtccgttcgatcgttcccctctcacaaactgctccagtactccaacccgttaaactgttgatggtgacatgatgccacattgccactggcagtcatatgcatgccgtcaccatcacattctggtagagataacggtgatgcaggcaaacgggacgcggagggtgcagcccgcgatctgtaacgtgtggcgcagcgggcgatctccgattcgctgccttatcctctgctactgccgcaccaaagcgtgagcaagcctgcctcccgcgagagcgctcaaccagccaagccggcgtcagaggcgagcagagaaatggcgggagcgaacttcctctccaccgcggcgctcgtcgcccgcggcgtcgctgcctgctcttctatttcaactccgacacggaggcacccgcaaatccgggtgtgctgccgggctgacgttgaggctatggaggcctatgcccatgaagagcgccttcgattccgtcggagagatttcatcggcacctgcgtcggcaccgctattggtttggaaatgatcgacggctctacgagtttctctggagtggctactgcagctgatctcattgagcgtagacaaaggtcggagttccaatcaaaaatcaaagacaccctttacgtagccataaaggctaagccagagctcgttccatcgttgttgaccatggcactgaatgatgccatgacatacgacaagaccacaaaaactggaggcgcaaatggatctatcaggctagcccagaaacaagcagacctgagaacagtgggctctcttccgcgttggatttgctgactgaagccaaaaaggagatcgattccttttccaagggaggtcccatttcgtttgcagatctgatccagtttgcagcacaatcagcactgaagagatcgtttcttgacgctgccattgccaaatgtggtggaaatgaagagaagggaagaacactgtactctgcatatggttcaaatgggcagtggggtctgttcgatagaacgttcgggagagcagacgcacaggaagcagatccagagggaagagtgcctgactggagcaaggcttctgtgcaggagatgaaggataggttcgtcgctgttgggttgggtcctcgccagcttgctgttatgtcagcgttccttggacctgaccaggctgctacggagggacgactgatagctgatccggattgccgtccatgggtggagaagtaccagcggagccgcgagaccgtctcccggactgactatgaggttgacctgataactacactcacaaagctgagctcccttggccagaagataaactacgaagcctacacataccctaagcagaagattgacctgggaaaactgaaactgtaagagatgattgccgggcacctgcatcggccgtatccaggaatcgggagctaattgtatggtaggctctgtctgctagagtgatttgattcggcgctgacgtccaagtattggctacttactggtcagctgtcagacattcttcccacggcaattaggatggtccctgtacatggttaaattggttctcccatttcgttttgtgtgaacttgaagaggcaaacgcttgtgagaagtgaggtgttgtgtcaatccccttacgtatacgagacgactgaagaattagtagaaaagaagtgcaagtgtcatgtcttgagtctgaagtctgagctcatgtttctgaattctgatcagaagcaggacagctggctcgtcattttgcttgcccatttctctgcctcgaccactcgcaccactgccgcaaataagaataacgtgatcgtcaaacatatacggaacgataagtagcaccccctttggtcaattacattacagtggctctataatctttctctgaagtctag

SEQ ID NO: 212196 - DNA, 3030 bp, Zea Mays
cttcagttcgagtccgagtgtgcgcaggctaacggacggcccatgggagtgtcaatactcaataggctgaaggacaggacagcaaaaatatctccgatcgtccgtgtccctcaccaaaagttcaaaaccccatccaattccaaatcccacttctcgccagttcacctccgcctccgctcctcccctccccctcccgtcctgccatggccaccgcagcacgcgccctcgtcgccgcacgcccggcacggccgctgctgccgtctcggcgcctcccgtcctcctcttccatccgtcccgcgcggcaacgtgctggcgtcgggtgcgtccgctgcatggctcggcggccggattccacctattccccgctgcgttcgggccagggcggtgaccgtgcaccgactgaaatggcgcctctgttccctggctgcgactacgagcactggctcatcgtcatggacaagcccgggggcgagggcgccaccaagcagcaaatgatagattgttacatccagacccttgcccaggtggtagggagtgaagaggaggcgaagaagaggatatataatgtgtcctgcgagcgctattttggattcggatgcgaaattgacgaggagacctccaacaaactcgaaggccttccaggggttctttttgtgcttcctgactcttacgttgatgctgagaacaaggattatggtgctgagttatttgtgaacggtgaaatcgttcagcgatctccagaaaggcagagaagggtggagccagtgcctcagagagctcaggatcgaccacggtacagtgaccggacccgctatgtgaagcggagggagaaccaatcttaccagagatgatgtttccgtctctgaagatgtaaaatgtcacggtttccacaagtgtccaaatgcggtactgaagatgcagcagcaactccccactactcatatgagaatggcatccgttctgtttgccgcgcattttaagctgtatatgcttattatgcatttgggcttgtacctcagtcgatatgaacgatgtatcctttgaactaacgcattataatttttgaaaccgttttagccagaaattaatcaactgttgatgattatcatatgatataccgcatgatcatctcggaaggggcccgtccgttcgatcgttcccctctcacaaactgctccagtactccaacccgttaaactgttgatggtgacatgatgccacattgccactggcagtcatatgcatgccgtcaccatcacattctggtagagataacggtgatgcaggcaaacgggacgcggagggtgcagcccgcgatctgtaacgtgtggcgcagcgggcgatctccgattcgctgccttatcctctgctactgccgcaccaaagcgtgagcaagcctgcctcccgcgagagcgctcaaccagccaagccggcgtcagaggcgagcagagaaatggcgggagcgaacttcctctccaccgcggcgctcgtcgcccgcggcgtcgctgcctgctcttctatttcaactccgacacggaggcacccgcaaatccgggtgtgctgccgggctgacgttgaggctatggaggcctatgcccatgaagagcgccttcgattccgtcggagagatttcatcggcacctgcgtcggcaccgctattggtttggaaatgatcgacggctctacgagtttctctggagtggctactgcagctgatctcattgagcgtagacaaaggtcggagttccaatcaaaaatcaaagacaccctttacgtagccataaaggctaagccagagctcgttccatcgttgttgaccatggcactgaatgatgccatgacatacgacaagaccacaaaaactggaggcgcaaatggatctatcaggctagaaacaagcagacctgagaacagtgggctctcttccgcgttggatttgctgactgaagccaaaaaggagatcgattccttttccaagggaggtcccatttcgtttgcagatctgatccagtttgcagcacaatcagcactgaagagatcgtttcttgacgctgccattgccaaatgtggtggaaatgaagagaagggaagaacactgtactctgcatatggttcaaatgggcagtggggtctgttcgatagaacgttcgggagagcagacgcacaggaagcagatccagagggaagagtgcctgactggagcaaggcttctgtgcaggagatgaaggataggttcgtcgctgttgggttgggtcctcgccagcttgctgttatgtcagcgttccttggacctgaccaggctgctacggagggacgactgatagctgatccggattgccgtccatgggtggagaagtaccagcggagccgcgagaccgtctcccggactgactatgaggttgacctgataactacactcacaaagctgagctcccttggccagaagataaactacgaagcctacacataccctaagcagaagattgacctgggaaaactgaaactgtaagagatgattgccgggcacctgcatcggccgtatccaggaatcgggagctaattgtatggtaggctctgtctgctagagtgatttgattcggcgctgacgtccaagtattggctacttactggtcagctgtcagacattcttcccacggcaattaggatggtccctgtacatggttaaattggttctcccatttcgttttgtgtgaacttgaagaggcaaacgcttgtgagaagtgaggtgttgtgtcaatccccttacgtatacgagacgactgaagaattagtagaaaagaagtgcaagtgtcatgtcttgagtctgaagtctgagctcatgtttctgaattctgatcagaagcaggacagctggctcgtcattttgcttgcccatttctctgcctcgaccactcgcaccactgccgcaaataagaataacgtgatcgtcaaacatatacggaacgataagtagcaccccctttggtcaattacattacagtggctctataatctttctctgaagtctag

SEQ ID NO: 212197 - DNA, 2713 bp, Zea Mays
atctgaccgccgcccatgaccgaaccgaacaaaccagcggagcgtgcggtgggtgatgataattcccacatccgctgctcggggtgcggtcggcgcgtgagaccgtgcgagagagccagagagggcacgcaggacaccaccgcggcccctgccccacgcccacatcggctcccgcgtcggccccgcgtccatccggccgcctttccgctcaccgtccgccgcttcttctcccctgtgggcccgtgacctggcctccctcccacctcgccccgccgattcagctccccttcctcgacgcaggcatcggggccactcatgcataacgttcgcacggtgttccgcttccgcccgtcttgagaaactaaaacacacagagagagcagtagcggtagcgcggacggagtgggtgcccgggccgggcaccagcggaaggaagaggttgccggcggctgtagacctcacggcgatggatatcacggaggtaacggtggtgcaccacgcagcgctcgtgctggcggcgctctgggtcgccgcggcatccggctggacgcacccggcgctcttcctcgtcgggctcctgtacatatttgcggtgaatcaacgatacacaatgaggctgtggaggcggatacagtatgaggaaaggaaatgtgccaatcagagaaagcttctctctgatgcagagactgtcaggtggcttaattacgctgtggaaaagatttggccagtttgcatggagagggttgcatcccagcagttccttttacccatattcccgtggttcctagagaagttcaaaccatggacagcaaggaaagcagtaatccaaagcctttacttgggtaggaacccaccgatgtttacagatattagggtagttaaccaatcaaccgatgatgaccacttggttctagagatagggatgaattttctttcagctgacgatatggatgcaagaatggctgtgcaactaaggaagagattaggatttggcattacaacaaacatgcatataactgggatgcatgttgaaggaaagggtttgtgtgcaggttctggtaggggtgagatttctgcggcagtggccatttattgggcgtgtaagagtatgctttgttgagcctccatacttccaaatgacagtgaaaccgctgtttggtcatggacttgatgtaactgaactcccaggaatttctggatggcttgacaggatgctggatgttgccttcggacagacacttgtggagcccaacatgctagttattgatctggaaaagtttgcctctgaatcaacagataactggtttagtgttgatgagaagccacctatcgcatatgctcgagtggagatcctggaaggtgctgatatgaagccatctgatcctaatggactagctgatccatatgtgaaaggacaacttggaccctaccgttttcgcacaaagatccataagaaaactcttgatccaaaatggctcgaggagtttaaaataccaataacttcatgggaagcactcaatcttcttcatcttcaagtccgagataaggatcccatttttgatgacgctcttggcgattgttccataagcatcaacaagttaagaggtggaataaggcatgatatatggattgcactgaagaacataaagacagggaggattcacgttgctgtaactgtacttgaagaagaaaatgaaaaggtttctaatgatgaagaggaacagtgtggaatacacaaggttgacaaggctagcacaccgaggtcaagtttctcctccaggaccaaccatgaaagtgaatgttctgatgaattccggaagatgtctgatgaatttgagccagttgacatagaaggatcggaaaagcccgatgtttgggtgcatcgccctggcagttatgtcaccagtacatgggaacctcggaaaggccgtgcccggtgccaggattccagaattcaccgggagaatgattcttgtagtgatagtccaaggtcatcagtgtcaggatctcatagaagtgactccagcactgaagaacccacgagcagtaaatcgcatcgccaccttcaaaaggtcaagaagggtttgggcaagctagctggagcagtgctccaccggagcccaaaggagaatgatgacgaagcttccccatgtgtaactcctcaccaaaacattcgaccggtcggggaaagcagggtttcagtaacatatgtggtcgatcaagatccagcaggggttgacggatcggggtcgagacgagatgaccaccagcaaagccctgagagagaggagctggacagcccgagtaaaaggcatctgaggaagaaggcggtgcacatggtgaaacatgctgggaaaaccgctcataacctaaagagcatgttcagcaagaagggccttgacaagagcaaagaagaacaccgcagtgatgaggaatgcgacgaggaaggcgacgttgttgctgctagaagagtgtagaatatgcaaggcttagttctattcctttggggttgtagtatacatatagtatgtactgatgaagtgttgcacaagaggcgcttgggccatgggtctcatcggctaaatagagtattacataccacatttgacaccctctcacaaacctagacttaggtgaagcttttgatcatgaatacgttccgtttgacggtgttacactgattttcgacgactactaaagtcataatatttag

SEQ ID NO: 212198 - DNA, 2828 bp, Zea Mays
atttgcgccgccacgtgcccgctcagcttgaccaggtgacgagcccgctagctgccacgttcccccgcggtccgctgccgcgccacgcagccagctcgtatagaaatatatacggaagtactagtatttctcatcatctgaccgccgcccatgaccgaaccgaacaaaccagcggagcgtgcggtgggtgatgataattcccacatccgctgctcggggtgcggtcggcgcgtgagaccgtgcgagagagccagagagggcacgcaggacaccaccgcggcccctgccccacgcccacatcggctcccgcgtcggccccgcgtccatccggccgcctttccgctcaccgtccgccgcttcttctcccctgtgggcccgtgacctggcctccctcccacctcgccccgccgattcagctccccttcctcgacgcaggcatcggggccactcatgcataacgttcgcacggtgttccgcttccgcccgtcttgagaaactaaaacacacagagagagcagtagcggtagcgcggacggagtgggtgcccgggccgggcaccagcggaaggaagaggttgccggcggctgtagacctcacggcgatggatatcacggaggtaacggtggtgcaccacgcagcgctcgtgctggcggcgctctgggtcgccgcggcatccggctggacgcacccggcgctcttcctcgtcgggctcctgtacatatttgcggtgaatcaacgatacacaatgaggctgtggaggcggatacagtatgaggaaaggaaatgtgccaatcagagaaagcttctctctgatgcagagactgtcaggtggcttaattacgctgtggaaaagatttggccagtttgcatggagagggttgcatcccagcagttccttttacccatattcccgtggttcctagagaagttcaaaccatggacagcaaggaaagcagtaatccaaagcctttacttgggtaggaacccaccgatgtttacagatattagggtagttaaccaatcaaccgatgatgaccacttgagatagggatgaattttctttcagctgacgatatggatgcaagaatggctgtgcaactaaggaagagattaggatttggcattacaacaaacatgcatataactgggatgcatgttgaaggaaaggttctggtaggggtgagatttctgcggcagtggccatttattgggcgtgtaagagtatgctttgttgagcctccatacttccaaatgacagtgaaaccgctgtttggtcatggacttgatgtaactgaactcccaggaatttctggatggcttgacaggatgctggatgttgccttcggacagacacttgtggagcccaacatgctagttattgatctggaaaagtttgcctctgaatcaacagataactggtttagtgttgatgagaagccacctatcgcatatgctcgagtggagatcctggaaggtgctgatatgaagccatctgatcctaatggactagctgatccatatgtgaaaggacaacttggaccctaccgttttcgcacaaagatccataagaaaactcttgatccaaaatggctcgaggagtttaaaataccaataacttcatgggaagcactcaatcttcttcatcttcaagtccgagataaggatcccatttttgatgacgctcttggcgattgttccataagcatcaacaagttaagaggtggaataaggcatgatatatggattgcactgaagaacataaagacagggaggattcacgttgctgtaactgtacttgaagaagaaaatgaaaaggtttctaatgatgaagaggaacagtgtggaatacacaaggttgacaaggctagcacaccgaggtcaagtttctcctccaggaccaaccatgaaagtgaatgttctgatgaattccggaagatgtctgatgaatttgagccagttgacatagaaggatcggaaaagcccgatgtttgggtgcatcgccctggcagttatgtcaccagtacatgggaacctcggaaaggccgtgcccggtgccaggattccagaattcaccgggagaatgattcttgtagtgatagtccaaggtcatcagtgtcaggatctcatagaagtgactccagcactgaagaacccacgagcagtaaatcgcatcgccaccttcaaaaggtcaagaagggtttgggcaagctagctggagcagtgctccaccggagcccaaaggagaatgatgacgaagcttccccatgtgtaactcctcaccaaaacattcgaccggtcggggaaagcagggtttcagtaacatatgtggtcgatcaagatccagcaggggttgacggatcggggtcgagacgagatgaccaccagcaaagccctgagagagaggagctggacagcccgagtaaaaggcatctgaggaagaaggcggtgcacatggtgaaacatgctgggaaaaccgctcataacctaaagagcatgttcagcaagaagggccttgacaagagcaaagaagaacaccgcagtgatgaggaatgcgacgaggaaggcgacgttgttgctgctagaagagtgtagaatatgcaaggcttagttctattcctttggggttgtagtatacatatagtatgtactgatgaagtgttgcacaagaggcgcttgggccatgggtctcatcggctaaatagagtattacataccacatttgacaccctctcacaaacctagacttaggtgaagcttttgatcatgaatacgttccgtttgacggtgttacactgattttcgacgactactaaagtcataatatttag

SEQ ID NO: 212199 - DNA, 1059 bp, Zea Mays
tttccttgacacttgcagcatgcttctgttgacggtttttttcaaccgagccttatgcttgtaacccttcaagtctgccaacatatccaccaagcaaggagatggatgccaagttaagagacgaggaggctagaagactacgagcggctgcaaaggccaagggagaacagaaaaggactcgaccacgtgatcgatctcggagggctggaccagcaccagaagctaatgcagagattcaagcaaacttagacaggcgacgaatgataactcatgcaaatgcaaagagtaaaagtgagaagtttcctcctccgcatcaggatggaggtacgggtaatccgcttggatcctatcatcatatggagcctatgttcgagcaccaggatgcttccttcagtacagtagtccccatagagaaggggacctcacaaacatggtccgggccgttgtttgatccagcagctctcgggcagtcgaggcggaagaagcaaactaccctagatgctaaggctgctgcttactcaaagcagctccaaaaggaaaagggagggatacgagcccgataacaaaatgtcgttttcctggtgagcatgtggagggaccgtgggaaaggttcatcgcctacggatgaattttcttgttttgttcctctggtggttggaaacaggcaacaatgcgctgctgtagggtgaagtcttccggattgtgtacatgtcatgtggtagcgtttccaagtactgtttagatgcttctgaacaagctgccgtcacccggacgggactttaggggtttgagactcgtatttgtgctctttatggcaattcagttgcccatgtgtatatatggagcaattctttcttgtgtatgtacagagacggcggtagctttgatttcttaataatgaatcaagtgtgatggcgaccttcctcacgtaacagtggtccagtaattgttggttgttaaacttgctgcggtggattgcttcgccttgtgattctcaacaagaaggcaatgttctttcagttttcttgtctgtaggtgctaccgtaaacaataaacagg

SEQ ID NO: 212200 - DNA, 2879 bp, Zea Mays
gcacgctcgcaggcggccgaccgtggcccccaccaccgcctgccgccgccactgcccccctctccactcgggatcccgtcctatcgcggccgccgcaagccataatggtgagggggctggggtcgaagcggagggtggcggaggaggagtcctcggaggaggagtacgaggtggaggtggtccgcgaccacatcgcctcctcccgcggcagccgcctcgcgctcttcggctccgagctccgcctcggccgcttccgcccgcgccgccgcaggcgcctcccgctcgccgggggaaggcgccgccgagggcttcttccacggcctcgtcatccaccccgacaacaagtggtaccggttatggaccaagttcatactggtttgggcggtgtacagctccttcttcacgcccctggaattcggcttcttcagaggcctccccaagaacctcttcttcctggacgtagctgggcagactgcattcctcatcgacatcgtcgtcaggtttttcgtggcgtaccgtgacccagacacgtaccgggtcgtctacagccccgccgccattgcgctccgctactgcaaatcgagcttcgttttcgaccttcttggttgcctcccgtgggacgctatctacaaggcttgtgggagcaaagaggaagtaaggtacctgctgtggattcgcttgacacgggtcaccaaggtcacggagttcttctggcgtttagagaaggacatacgcgtcaactacctcttcaccaggatagtgaagctcatagtcgtggagctctactgcacgcacacagcggcctgcatcttctattacctggctacgacgcttcccgaatccatggaagggcacacgtggatcgggagcttgcagctgggggactacaggttcacacatttcagggagatcgatctcgccaagcgctacataacgtccttatatttcgccatcgtcaccatggcaaccgttggctacggggacatccatgccgtcaacatcagggagatgatattcatcatgatctacgtgtccttcgacatgattctaggagcctacctgatcggcaacatgaccgcgctcatcgtcaagggctccaggaccgagcggtttagggacaagatgaaggaggtgatcaggtacatgaacagaaacaaacttgggaaggaaataagggagcagatcaagggacacctgaggttgcagtatgagagcagctacaccgaagcatccgtccttcaggatatcccgatttctatccgtgcaaagatttctcaaacgctgtataagccatatatcgaaagcattccactgttcaagggatgttccgcagagttcattcaacagattgttgcaagaggagttcttcctaccaggagaagttatattggagcagggaagtgcagtcgatcagctgtacttcgtctgccacggtgcactggaaggtgtaggcatcggtgaagacgggcaagaggagactctgctaatgctggagccagagagctccttcggcgagatctcaatcctctgcaacatcccgcagccctacacggtccgcgtctgcgagctctgccggctcctgcgtctcgacaagcagtccttcaccaatatcctggagatctacttcgtcgacgggaggaggatcctgagcaatctctccgagagcgagtatggcggacgggtgaagcagctggaatcggacatcacgttccacatcgggaagcaggaggcggagctcacactgcgggtcaacagcgccgccttctatggcgacctgcaccagctgaaaagcctgatccgggcaggggctgatcccaagaacaccgactacgacggccgctcccctctgcatctcgcggcttccagagggtacgaggacgtcgtgcagttcctcatcaacgaaggcgtcgacatcgaccttaccgaccagttcgggaacacgccgttgctggaggcggtgaagcaggggcacgaacgggtggcagcgctgctgttcgccaagggtgcgaagctgagcctcaagaacgccggcagccacctgtgcacggcagttgccaagggggactcggacttcatccggcgcgccctggcctacggcgccgacccaaactgcagggactacgaccaccgcacgccgctccacatcgccgccgccgagggcctctacctcatcgccaagatgctcgtcgaggccggcgccagcgtgttcaccacggacagatggggcaccactccgctcgacgaagcgcgcaagtgcggcggccgcacgctgggggcgctgctggaggaggcgcgggccagcgagctgtccatgttcccggagcgcggcgaggaagtcagggacaaggtgcacccgcgacggtgctcggtgttcccgtaccacccgtggcgggcgagcgcaggcgaagagcggcgcgcggagggggtggtgctgtggatcccgcacaccatcgagagcctggtcgcgtcggcgcaggagaagctcggcttgcctggcccggcggcgtcgcggctgcggctgctgtgcgaggacggggccagggtgctcgacgtcgacatggtcaatgacggccagaagctctacctggtcggaggcgaggacggcgatcaggaaggtggtcagtagattgggcatccctgtgtggcatttgcatgctgcttttttttcaaccttgtatgccggttgttgtttttttggctatatatacgtgtgcagtagaagaaaatgtaatcaagtccatcatccgtgctggacactgtacagaactacaaattgggaataatgtaagatgtgaaatgaaaatgcaatgttaagtcgccccaggtcgggcggctctagccgccgccacctcctctctgcctcactgccgtcggagcta

SEQ ID NO: 212201 - DNA, 2877 bp, Zea Mays
ctactgccccacccttgggtgagctccgcctataaatgacagccccgcctccctccaagttcaaacgcacgctgcacgctcgcaggcggccgaccgtggcccccaccaccgcctgccgccgccactgcccccctctccactcgggatcccgtcctatcgcggccgccgcaagccataatggtgagggggctggggtcgaagcggagggtggcggaggaggagtcctcggaggaggagtacgaggtggaggtggtccgcgaccacatcgcctcctcccgcggcagccgcctcgcgctcttcggctccgagctccgcctcggccgcttccgcccgcgccgccgcaggcgcctcccgctcgccgggggaaggcgccgccgagggcttcttccacggcctcgtcatccaccccgacaacaagtggtaccggttatggaccaagttcatactggtttgggcggtgtacagctccttcttcacgcccctggaattcggcttcttcagaggcctccccaagaacctcttcttcctggacgtagctgggcagactgcattcctcatcgacatcgtcgtcaggtttttcgtggcgtaccgtgacccagacacgtaccgggtcgtctacagccccgccgccattgcgctccgctactgcaaatcgagcttcgttttcgaccttcttggttgcctcccgtgggacgctatctacaaggcttgtgggagcaaagaggaagtaaggtacctgctgtggattcgcttgacacgggtcaccaaggtcacggagttcttctggcgtttagagaaggacatacgcgtcaactacctcttcaccaggatagtgaagctcatagtcgtggagctctactgcacgcacacagcggcctgcatcttctattacctggctacgacgcttcccgaatccatggaagggcacacgtggatcgggagcttgcagctgggggactacaggctacggggacatccatgccgtcaacatcagggagatgatattcatcatgatctacgtgtccttcgacatgattctaggagcctacctgatcggcaacatgaccgcgctcatcgtcaagggctccaggaccgagcggtttagggacaagatgaaggaggtgatcaggtacatgaacagaaacaaacttgggaaggaaataagggagcagatcaagggacacctgaggttgcagtatgagagcagctacaccgaagcatccgtccttcaggatatcccgatttctatccgtgcaaagatttctcaaacgctgtataagccatatatcgaaagcattccactgttcaagggatgttccgcagagttcattcaacagattgtgatcaggttgcaagaggagttcttcctaccaggagaagttatattggagcagggaagtgcagtcgatcagctgtacttcgtctgccacggtgcactggaaggtgtaggcatcggtgaagacgggcaagaggagactctgctaatgctggagccagagagctccttcggcgagatctcaatcctctgcaacatcccgcagccctacacggtccgcgtctgcgagctctgccggctcctgcgtctcgacaagcagtccttcaccaatatcctggagatctacttcgtcgacgggaggaggatcctgagcaatctctccgagagcgagtatggcggacgggtgaagcagctggaatcggacatcacgttccacatcgggaagcaggaggcggagctcacactgcgggtcaacagcgccgccttctatggcgacctgcaccagctgaaaagcctgatccgggcaggggctgatcccaagaacaccgactacgacggccgctcccctctgcatctcgcggcttccagagggtacgaggacgtcgtgcagttcctcatcaacgaaggcgtcgacatcgaccttaccgaccagttcgggaacacgccgttgctggaggcggtgaagcaggggcacgaacgggtggcagcgctgctgttcgccaagggtgcgaagctgagcctcaagaacgccggcagccacctgtgcacggcagttgccaagggggactcggacttcatccggcgcgccctggcctacggcgccgacccaaactgcagggactacgaccaccgcacgccgctccacatcgccgccgccgagggcctctacctcatcgccaagatgctcgtcgaggccggcgccagcgtgttcaccacggacagatggggcaccactccgctcgacgaagcgcgcaagtgcggcggccgcacgctgggggcgctgctggaggaggcgcgggccagcgagctgtccatgttcccggagcgcggcgaggaagtcagggacaaggtgcacccgcgacggtgctcggtgttcccgtaccacccgtggcgggcgagcgcaggcgaagagcggcgcgcggagggggtggtgctgtggatcccgcacaccatcgagagcctggtcgcgtcggcgcaggagaagctcggcttgcctggcccggcggcgtcgcggctgcggctgctgtgcgaggacggggccagggtgctcgacgtcgacatggtcaatgacggccagaagctctacctggtcggaggcgaggacggcgatcaggaaggtggtcagtagattgggcatccctgtgtggcatttgcatgctgcttttttttcaaccttgtatgccggttgttgtttttttggctatatatacgtgtgcagtagaagaaaatgtaatcaagtccatcatccgtgctggacactgtacagaactacaaattgggaataatgtaagatgtgaaatgaaaatgcaatgttaagtcgccccaggtcgggcggctctagccgccgccacctcctctctgcctcactgccgtcggagcta

SEQ ID NO: 212202 - DNA, 929 bp, Zea Mays
aaggggctatctggcctagcctcacgaggtcgggctggaaaccctcgcctctcgcggtctcgcctctccaagacacccaggccgccgccttcgcctacaggcaccttgccgcctccgtccgctgcccgtggcttccgtccacctccacctcactcacccactacatcgccgaccaagcgcagcaccgcgcgtggaccagacaccgcccgtggcttccgtggaccagacgccgcccgtggcttccgtggacgcagcaccgtgcgtggaccagccgctgctacatcgccgaccagttccagctatatatgcttccctttattctgaaaagaggccagtacacacttcttgtcgtagtggtgcacaaaaaattagagaaatttctacaagcaggtagctgcgaggactgctatttagttaccaacaatgtgtccgattgttgtggcttagggacgagattcacaagcaggtgatacacaagggattttcatcaacaagtggtcgccagaagaactgaaacatcaagatggcgtttgcttttaggtcgtgtatgttgaaactatatgttttattattatgcactgagactatgtttgacattggtcgtgtacactgagactatgttttattatgagactatgttttattatgatgcactgagactatgtttgtgcacacatgttttattatgactatgtttttttatgagactatgttttattatgatgtactgagactatatttgtgtacacatgggctatgttttattgtgagactatgtttgacattggtcttgtaaagtagctgcacacattggttatatgtacactgcacacatgagcagtgtggagttctttgttggctgaaagagttccctgctggccgagtggtgtagagtcccctgctggctgccaaagagcagcagagaaagg

SEQ ID NO: 212203 - DNA, 329 bp, Zea Mays
gggagaggaaggggctatctggcctagcctcacgaggtcgggctggaaaccctcgcctctcgcggtctcgcctctccaagacacccaggccgccgccttcgcctacaggcaccttgccgcctccgtccgctgcccgtggcttccgtccacctccacctcactcacccactacatcgccgaccaagcgcagcaccgcgcgtggaccagacaccgcccgtggcttccgtggaccagacgccgcccgtggcttccgtggacgcagcaccgtgcgtggaccagccgctgctacatcgccgaccagggatactaacaaataggttctaaaattg

SEQ ID NO: 212204 - DNA, 2022 bp, Zea Mays
ttcttcttttgttgttgttttgatcaatatttatgacagagttgggagccaaacgaaggagccggctctttgtcaaccagttcagtcggtgtggaagtagaaaaatatagaaatctgtacactatcaaggccttgcctttaagtgatgtacgcttcatccgtaagtacaccccaacgtttggactggactacgtaataatcgttctctcatcaggcctggctttccctccattctatttctacaacggtggaattcgtgaattgtttgcaacactgaaacaacatgtattcatcatcaggtcggatgacgatcctaatgtttttctcgtcaacgactttcaagatccccttcagaaaagcttgtcatccttggagcttccaggagtagcctcagtagcaaatgccatgtcaagacaaaattcactcagttttactgggtcaattgatgagtccaggcatggggataatgttagacatggggcaacttctagcatgtctcagtatagctcaaagcaaaatcacaaatcaaatgatccaggtcgtgatctttcaattcaagtcttggagaaattctcattggttactaaatttgcacgagatactacatcaagcctttttcgagacaatagtggtgctcatgcttatggacgccaacaacatcaatacattttggataataaatcaactaataaacataaaaatcagtatgtaacaccagaaaaggcttcggcaccctcagcaacactcgagtcagatccattacctctcgtatggggaaaacaacgagatcacccgttaagtgtcgaagagtggacatctttcttagatcgtgaaggtaggattatggattcaaaggcactgaggaaaaaggttttctatgggggagttgatcatgctttgagaaaagaggtctggaaattcttgttggggtatcatgaatatgattcaacatatgctgagagggaataccttgctgtcatgaaacgagcagaatatgaagtcataaaatctcagtggaagagtatctcagccacccaagctaaaagattcaccaagtttagggaaagaaaaggcctaattgacaaagatgtggtgagaacagataggtccattccctattatgaaggagatgacaatcagaatgttgtagttttacgtgatattctgttaacatattccttctacaatttcgaccttggttattgccaaggaatgagtgactttttggctcccatactttatgtcatggaggatgagtctgaatcattttggtgctttgcttccctgatggaacgtctaggtgccaattttaatcgtgaccagaatggcatgcatgctcagctacttgcattatccaagcttgtggagcttcttgatccttcattgcacaactattttaggcaaaatgactgcttgaactatttcttctgtttccgctgggttcttatacaattcaaaagggagttcagtttcgaccagatcatgcttttatgggaagttctgtggtcccattatttgtcagaacatttccacttgtacttgtgcgtagcaatcttgaaaaaatatcgtcagcggataattggggagcagatggacttcgataccctccttaagttcatcaatgagctcagtggtcagatcaatcttgaccgggctatccaggacgcggaggcattgtgtactattgcaggagaaaatggggcttcctgcattccacctggaaccccaccttcaatgcccgtcgagaccgatggtggcatgtacgtgcaagaagacgaggtcttgtgagatatcggtcaccctagaaaataattgcatagaagcatcgcaagtttttatccagtagtgctttcgtcgtcgtcataaatgtgatccgttgttttacctcagctctccatcagatcttctatctcctagagcatctccatcagcctatctcatcaactgtacctaaaattagtgtttaaaaatagtgttttaggagatagagaagttgcaggtgatcttctatgtcatctatat

SEQ ID NO: 212205 - DNA, 2012 bp, Zea Mays
ttcttcttttgttgttgttttgatcaatatttatgacagagttgggagccaaacgaaggagccggctctttgtcaaccagttcagtcggtgtggaagtagaaaaatatagaaatctgtacactatcaaggccttgcctttaagtgatgtacgcttcatccgtaagtacaccccaacgtttggactggactacgtaataatcgttctctcatcaggcctggctttccctccattctatttctacaacggtggaattcgtgaattgtttgcaacactgaaacaacatgtattcatcatcaggtcggatgacgatcctaatgtttttctcgtcaacgactttcaagatccccttcagaaaagcttgtcatccttggagcttccaggagtagcctcagtagcaaatgccatgtcaagacaaaattcactcagttttactgggtcaattgatgagtccaggcatggggataatgttagacatggggcaacttctagcatgtctcagtatagctcaaagcaaaatcacaaatcaaatgatccaggtcgtgatctttcaattcaagtcttggagaaattctcattggttactaaatttgcacgagatactacatcaagcctttttcgagacaatagtggtgctcatgcttatggacgccaacaacatcaatacattttggataataaatcaactaataaacataaaaatcagtatgtaacaccagaaaaggcttcggcaccctcagcaacactcgagtcagatccattacctctcgtatggggaaaacaacgagatcacccgttaagtgtcgaagagtggacatctttcttagatcgtgaaggtaggattatggattcaaaggcactgaggaaaaaggttttctatgggggagttgatcatgctttgagaaaagaggtctggaaattcttgttggggtatcatgaatatgattcaacatatgctgagagggaataccttgctgtcatgaaacgagcagaatatgaagtcataaaatctcagtggaagagtatctcagccacccaagctaaaagattcaccaagtttagggaaagaaaaggcctaattgacaaagatgtgataggtccattccctattatgaaggagatgacaatcagaatgttgtagttttacgtgatattctgttaacatattccttctacaatttcgaccttggttattgccaaggaatgagtgactttttggctcccatactttatgtcatggaggatgagtctgaatcattttggtgctttgcttccctgatggaacgtctaggtgccaattttaatcgtgaccagaatggcatgcatgctcagctacttgcattatccaagcttgtggagcttcttgatccttcattgcacaactattttaggcaaaatgactgcttgaactatttcttctgtttccgctgggttcttatacaattcaaaagggagttcagtttcgaccagatcatgcttttatgggaagttctgtggtcccattatttgtcagaacatttccacttgtacttgtgcgtagcaatcttgaaaaaatatcgtcagcggataattggggagcagatggacttcgataccctccttaagttcatcaatgagctcagtggtcagatcaatcttgaccgggctatccaggacgcggaggcattgtgtactattgcaggagaaaatggggcttcctgcattccacctggaaccccaccttcaatgcccgtcgagaccgatggtggcatgtacgtgcaagaagacgaggtcttgtgagatatcggtcaccctagaaaataattgcatagaagcatcgcaagtttttatccagtagtgctttcgtcgtcgtcataaatgtgatccgttgttttacctcagctctccatcagatcttctatctcctagagcatctccatcagcctatctcatcaactgtacctaaaattagtgtttaaaaatagtgttttaggagatagagaagttgcaggtgatcttctatgtcatctatat

SEQ ID NO: 212206 - DNA, 2110 bp, Zea Mays
ttcttcttttgttgttgttttgatcaatatttatgacagagttgggagccaaacgaaggagccggctctttgtcaaccagttcagtcggtgtggaagtagaaaaatatagaaatctgtacactatcaaggccttgcctttaagtgatgtacgcttcatccgtaagtacaccccaacgtttggactggactacgtaataatcgttctctcatcaggcctggctttccctccattctatttctacaacggtggaattcgtgaattgtttgcaacactgaaacaacatgtattcatcatcaggtcggatgacgatcctaatgtttttctcgtcaacgactttcaagatccccttcagaaaagcttgtcatccttggagcttccaggagtagcctcagtagcaaatgccatgtcaagacaaaattcactcagttttactgggtcaattgatgagtccaggcatggggataatgttagacatggggcaacttctagcatgtctcagtatagctcaaagcaaaatcacaaatcaaatgatccaggtcgtgatctttcaattcaagtcttggagaaattctcattggttactaaatttgcacgagatactacatcaagcctttttcgagacaatagtggtgctcatgcttatggacgccaacaacatcaatacattttggataataaatcaactaataaacataaaaatcagtatgtaacaccagaaaaggcttcggcaccctcagcaacactcgagtcagatccattacctctcgtatggggaaaacaacgagatcacccgttaagtgtcgaagagtggacatctttcttagatcgtgaaggtaggattatggattcaaaggcactgaggaaaaaggttttctatgggggagttgatcatgctttgagaaaagaggtctggaaattcttgttggggtatcatgaatatgattcaacatatgctgagagggaataccttgctgtcatgaaacgagcagaatatgaagtcataaaatctcagtggaagagtatctcagccacccaagctaaaagattcaccaagtttagggaaagaaaaggcctaattgacaaagatgtggtgagaacagataggtccattccctattatgaaggagatgacaatcagaatgttgtagttttacgtgatattctgttaacatattccttctacaatttcgaccttggttattgccaaggaatgagtgactttttggctcccatactttatgtcatggaggatgagtctgaatcattttggtgctttgcttccctgatggaacgtctaggtgccaattttaatcgtgaccagaatggcatgcatgctcagctacttgcattatccaagcttgtggagcttcttgatccttcattgcacaactattttaggcaaaatgactgcttgaactatttcttctgtttccgctgggttcttatacaattcaaaagtttcgaccagatcatgcttttatgggaagttctgtggtcccattatttgtcagaacatttccacttgtacttgtgcgtagcaatcttgaaaaaatatcgtcagcggataattggggagcagatggacttcgataccctccttaagttcatcaatgagctcagtggtcagatcaatcttgaccgggctatccaggacgcggaggcattgtgtactattgcaggagaaaatggggcttcctgcattccacctggaaccccaccttcaatgcccgtcgagaccgatggtggcatgtacgtgcaagaagacgaggtcttgtgagatatcggtcaccctagaaaataattgcatagaagcatcgcaagtttttatccagtagtgctttcgtcgtcgtcataaatgtgatccgttgtaagtttggaagaatcatgaaaacctagagttgtgtgtatatactaccttgataaacctgtaattgatactttcactattctgtatggaaccccaggttttacctcagctctccatcagatcttctatctcctagagcatctccatcagcctatctcatcaactgtacctaaaattagtgtttaaaaatagtgttttaggagatagagaagttgcaggtgatcttctatgtcatctatat

SEQ ID NO: 212207 - DNA, 2078 bp, Zea Mays
ttcttcttttgttgttgttttgatcaatatttatgacagagttgggagccaaacgaaggagccggctctttgtcaaccagttcagtcggtgtggaagtagaaaaatatagaaatctgtacactatcaaggccttgcctttaagtgatgtacgcttcatccgtaagtacaccccaacgtttggactggactacgtaataatcgttctctcatcaggcctggctttccctccattctatttctacaacggtggaattcgtgaattgtttgcaacactgaaacaacatgtattcatcatcaggtcggatgacgatcctaatgtttttctcgtcaacgactttcaagatccccttcagaaaagcttgtcatccttggagcttccaggagtagcctcagtagcaaatgccatgtcaagacaaaattcactcagttttactgggtcaattgatgagtccaggcatggggataatgttagacatggggcaacttctagcatgtctcagtatagctcaaagcaaaatcacaaatcaaatgatccaggtcgtgatctttcaattcaagtcttggagaaattctcattggttactaaatttgcacgagatactacatcaagcctttttcgagacaatagtggtgctcatgcttatggacgccaacaacatcaatacattttggataataaatcaactaataaacataaaaatcagtatgtaacaccagaaaaggcttcggcaccctcagcaacactcgagtcagatccattacctctcgtatggggaaaacaacgagatcacccgttaagtgtcgaagagtggacatctttcttagatcgtgaaggtaggattatggattcaaaggcactgaggaaaaaggttttctatgggggagttgatcatgctttgagaaaagaggtctggaaattcttgttggggtatcatgaatatgattcaacatatgctgagagggaataccttgctgtcatgaaacgagcagaatatgaagtcataaaatctcagtggaagagtatctcagccacccaagctaaaagattcaccaagtttagggaaagaaaaggcctaattgacaaagatgtggtgagaacagataggtccattccctattatgaaggagatgacaatcagaatgttgtagttttacgtgatattctgttaacatattccttctacaatttcgaccttggttattgccaaggaatgagtgactttttggctcccatactttatgtcatggaggatgagtctgaatcattttggtgctttgcttccctgatggaacgtctaggtgccaattttaatcgtgaccagaatggcatgcatgctcagctacttgcattatccaaggcaaaatgactgcttgaactatttcttctgtttccgctgggttcttatacaattcaaaagggagttcagtttcgaccagatcatgcttttatgggaagttctgtggtcccattatttgtcagaacatttccacttgtacttgtgcgtagcaatcttgaaaaaatatcgtcagcggataattggggagcagatggacttcgataccctccttaagttcatcaatgagctcagtggtcagatcaatcttgaccgggctatccaggacgcggaggcattgtgtactattgcaggagaaaatggggcttcctgcattccacctggaaccccaccttcaatgcccgtcgagaccgatggtggcatgtacgtgcaagaagacgaggtcttgtgagatatcggtcaccctagaaaataattgcatagaagcatcgcaagtttttatccagtagtgctttcgtcgtcgtcataaatgtgatccgttgtaagtttggaagaatcatgaaaacctagagttgtgtgtatatactaccttgataaacctgtaattgatactttcactattctgtatggaaccccaggttttacctcagctctccatcagatcttctatctcctagagcatctccatcagcctatctcatcaactgtacctaaaattagtgtttaaaaatagtgttttaggagatagagaagttgcaggtgatcttctatgtcatctatat

SEQ ID NO: 212208 - DNA, 2115 bp, Zea Mays
ttcttcttttgttgttgttttgatcaatatttatgacagagttgggagccaaacgaaggagccggctctttgtcaaccagttcagtcggtgtggaagtagaaaaatatagaaatctgtacactatcaaggccttgcctttaagtgatgtacgcttcatccgtaagtacaccccaacgtttggactggactacgtaataatcgttctctcatcaggcctggctttccctccattctatttctacaacggtggaattcgtgaattgtttgcaacactgaaacaacatgtattcatcatcaggtcggatgacgatcctaatgtttttctcgtcaacgactttcaagatccccttcagaaaagcttgtcatccttggagcttccaggagtagcctcagtagcaaatgccatgtcaagacaaaattcactcagttttactgggtcaattgatgagtccaggcatggggataatgttagacatggggcaacttctagcatgtctcagtatagctcaaagcaaaatcacaaatcaaatgatccaggtcgtgatctttcaattcaagtcttggagaaattctcattggttactaaatttgcacgagatactacatcaagcctttttcgagacaatagtggtgctcatgcttatggacgccaacaacatcaatacattttggataataaatcaactaataaacataaaaatcagtatgtaacaccagaaaaggcttcggcaccctcagcaacactcgagatccattacctctcgtatggggaaaacaacgagatcacccgttaagtgtcgaagagtggacatctttcttagatcgtgaaggtaggattatggattcaaaggcactgaggaaaaaggttttctatgggggagttgatcatgctttgagaaaagaggtctggaaattcttgttggggtatcatgaatatgattcaacatatgctgagagggaataccttgctgtcatgaaacgagcagaatatgaagtcataaaatctcagtggaagagtatctcagccacccaagctaaaagattcaccaagtttagggaaagaaaaggcctaattgacaaagatgtggtgagaacagataggtccattccctattatgaaggagatgacaatcagaatgttgtagttttacgtgatattctgttaacatattccttctacaatttcgaccttggttattgccaaggaatgagtgactttttggctcccatactttatgtcatggaggatgagtctgaatcattttggtgctttgcttccctgatggaacgtctaggtgccaattttaatcgtgaccagaatggcatgcatgctcagctacttgcattatccaagcttgtggagcttcttgatccttcattgcacaactattttaggcaaaatgactgcttgaactatttcttctgtttccgctgggttcttatacaattcaaaagggagttcagtttcgaccagatcatgcttttatgggaagttctgtggtcccattatttgtcagaacatttccacttgtacttgtgcgtagcaatcttgaaaaaatatcgtcagcggataattggggagcagatggacttcgataccctccttaagttcatcaatgagctcagtggtcagatcaatcttgaccgggctatccaggacgcggaggcattgtgtactattgcaggagaaaatggggcttcctgcattccacctggaaccccaccttcaatgcccgtcgagaccgatggtggcatgtacgtgcaagaagacgaggtcttgtgagatatcggtcaccctagaaaataattgcatagaagcatcgcaagtttttatccagtagtgctttcgtcgtcgtcataaatgtgatccgttgtaagtttggaagaatcatgaaaacctagagttgtgtgtatatactaccttgataaacctgtaattgatactttcactattctgtatggaaccccaggttttacctcagctctccatcagatcttctatctcctagagcatctccatcagcctatctcatcaactgtacctaaaattagtgtttaaaaatagtgttttaggagatagagaagttgcaggtgatcttctatgtcatctatat

SEQ ID NO: 212209 - DNA, 3583 bp, Zea Mays
agataatgcatctcatctcatctcagtcacttccccacccggcgaccagaaactcccgcaccggctgctgatggagtcttgacaagtgattcttgtcgatcggccagctacggcggcggtggccacgaaacgatggaattaggtgcttctgtttccatgtctatcctggaaaagctcgtccagagctgttcctttccagattcatggcgggggccgccagacgctgaggtccaggctctcataggatatctcgaagagctacggtcctccgtcctggatctttccaaggaggatgaggacgaggatgactctgctacgtcgtcgtccacgctgaagatgagcctgacgagccagttgcaggaactttgttatgatgctgaggactatctggagatggcgcagcactcccgtggtggctgctcctggcagatcagttgggtccggagcaaggcgacgaggcagcgccccgctctaatcagcgcaaaagatctctccggcctcatctcccgtgtgaatccggcgaaagaaatagcccaagcgtacatcaagtctgctagttcaagaaccaccaccaaagagaatggccctaggccacaagaagagcctgcaaaaagcagtagtcgccgtgccgtctattctgatgatactctacagcctgacagccatgacgagcagctagtcaggttgctggctttggaaagtgatcagcagctcaagacggtggcaatccttggcctgcctggcgttgggaagacaacacttgccagaagactgtaccactgctatgaagggaggttccattgcggggctttccttcgggcgtcccgtaacctgcaggataccaccaggcttctcgccaccatgctatccaagattaagggccaacaagggtgccgctactgggggggctccggtgatgagcaagatctaatcgacagcatcaggcaacatctacaaggaaaatcatatttcattgtgatcgatgatttatgggctacatcagtgtgggatttcttgagccgtgcttttcccaaggataactgtggcagccgaatagtaataactactcaagttacagaagttgcatttgcttgctgtaacaaccacacagttgatatattcaatatgaaacctctggacgacgatcagtcactgcaattgttttacagtcgagtaaagcatataaatggttataatgctgaagaatgcaaggccatatcacatggaatcgtcagcaattgtggtaatctttcaccgctagctatcataaatatagctggcatgttagcaggctgggcggatttcaatatgaatgactgggagtacgtaagcaagtgttgtacatcaacagcaaatcttactaccgaggaggcgacggagagatttctgaaccttatgtacaacaagcttccagccaaattgaagacgtgcctgctctatctcagtatgtatccagagggctgtgtcatcggaaaggatgatttggtgagacaatgggcagctgaaggtattttcagtcaagtggtggaaccaaaaggtagagaacatgaagtgggttttatttattttgatgagctcctgaaaagaggattgatccagcctgtagatacagactacaatgatcaagtgttgtcatgtatagttcatcaagtggtactggaatttattacaaagaaatcaatgcaggaaaacttcatcactgtcgtggattatcgtgaaacagggacagtgcttgatgataataaggttcatcgactgtctgccaggtttgaaggtgccaaaagtgcacagataccgcggagcttcagagtacgccaagttcggtcctttatgttttctggattcattaaatctttaccttcccttctcaagtattgccttgtccgagttctgattcttcatgtttggagtgatgatcaaggcaagactgtggttctagacctttctccagttggtaatatgcttcatgtaaggtacctgaaggtggtaagcaacatgatagtcaaactcccactcattattcgaggcctgcgacacttagagacactcgaggtggatgcagaagaagtcgctgttccactggatgttttcatcttgaagagcctgttgcatctccgacttccgagcaaggcttatcagcctgattcagatattcaaaggattgatttaacaaatacatttcctttaagatttctgcccttcgtcagagcgttgtcaatgctagggcggtttctcctctcccatggccatcggattcgccatttgacatcacttcaaagtcttggctactttgacctaagcacttgctccagatatactgtgtggcaacttggcaagctgaccaatttgagggatcttcatctaacctgctctgcagttcgttccaggcatcgaattagcaacatccaatgccttgcctctgttctggggaaatgcaccagcctcgaatctctaactatccgtggcgaagcatcttcaaaccagagcatttcttttgatggcttaagcagcttgtcttctccaccgtacaacctcgtgagctttgtgctgtccccgaggattttcaaaatggcgaagctcccaaagtggattgggcaactcagcaggctcagtacgctaaagattgctgttggcgagctgtcaagtgaagatgttgacatcctcaaaggactctctgccctcactgctctttctctctacgttcggagaaaccctaagaaaggaagctggatcctattcagtaagggcttcgcagtgctcaagtattttaagttcacttgcactgcactgtgcgtgaaatttagtgaacaagctatgcctgctgtccaaaggctgattgtgtgcttcaatgctaacacaatgcagcagtacaggccggaagatgcaggaatttggtacctgtcaggccttcaagttatctctgccagaataggagctgccggtattgatcaagccagcagagaagccgcgaaatctaggttgctggacgccattcttagcaaccatccaaagcctcctcctatcagaaacgtgcaaatggtggactgggttattcatggcgacacagaggagtgttcaaccggtgtgatgatacgtaaagatgaaagcagccgtgagcatactaggtcatttttaagtcagttcccgttcagaagacgacccctgcttccctccatattcacaaggcgtggccaggatgatgagcaacataaaatcgaagaaaatgatgtgctacaagatagtattatcttaaggaaatcctcttcgctaatgcaaaaaccaggactcccctaccgctacaacggtgctccctaccgctgctacagtggtagcggccgatggtggggtataggggaaggatttagggggaaccgttgtacagggtggagatataggggggaagagaacactgacgtgacacgtgaatgagatatagagggagaaatttaggggtaaccgctgaacacagtcttacacgagctaaaatcttacaagtcatcagcattaattagttactattaatatgtctatctaataaaaaaattgcatttaacaacgcttttcacttttaccattttatttc

SEQ ID NO: 212210 - DNA, 1380 bp, Zea Mays
cggcccccaattcgcggaatgctcactgggctgctgggcaacctctcgctcctctcctatttcgccaagaagaaggaaacggaggctgtcatcgtgcagactcttggcgtcatctccacctatgcggtcctcgtgcagctcgcaatggcggagtccatgccggtgccgcagttcgtggccacttcggttgttgtggccgcagggctcatcctaaacttcctcaactactttggctggatccctggaaccctcttgctgctgtgggaggatttcattacagtcggcggccttgccgtgctccctcaggtcatgtggtcaacttttgttcccttcatccccaatagcgtactgcctggcataatctctggttctttagctgttgcagctgttgcgatggcaaggatgggcaagctttccaatgcaggggttaaatttgttgggtcattgtctggttggacagccacacttctcttcatgtggatgccagtggcacagatgtggacaaattaccttaacccaagtaacatcaaagggctgtcagctttcagcatgttgcttgcaatgcttggaaacggacttatgattcctcgcgctgtattcatccgtgatttgatgtggttcactggttctgcatgggcatctgtcctacagggttggggtaacctggcgtgcatgtactgctttaatagcatcagcggagaagttttctttgcaacatcagctggtctgcttctatggctaggatttactctatggagagatgccattgcctatggcaacagctcgcccttctcttccttgaaggagctgttttttgggaagtgatgaaccgtcggcaaccttgtttctcttgcactttaagcagctaactgttcccgggtaggacgctctcctgcaataaatcatggtagctgttaagaacggtggttcagttgctcccatatggtctgaagaaacggtgcttcagtctttagcattttgaggaggaaacgtgaaacttactggtcagctgaaggctataaacattgccatggccctggactggaagccccaactttcccaagcctgtagaaagcgccgtgtgcctctacagaagccaccgcgtgatgaccagcttcatccggcagggtgggtacagtagcaagctatagccctagtctgatgtaagaacaaatttatattatccatcccatattgtctttaattagattcatttttgaaaccaatgcaatttcagctcttgctgtcgtgcaaatctgtacccattgtccatggatgagtagatgacctgggagaatcacacaatacatattgtaatatcagttcacgttttaaagaagtgaatatgagtagatgacctagggtctcattgagctagac

SEQ ID NO: 212211 - DNA, 2032 bp, Zea Mays
cacacctccctttccctctacagtctacactgtcttcactcgtcccctccacactctccagatgccaaccaagcattactatggtagaatctcatctgacgggtacgaggagatgctaggctcacggctagccacagttgtgcattgctcgagtgcatgaccactgaattgctcgagtgcatatatgatcggatcctccagtgatctgattgatgctcaaagaatccatgcactatgcaggtaggtggatcgatagctgggaggcattaaagcggacgatgacgccttggcctcgctgcaatcttgcagattgctgctgcagcgcttctttaagagccaaccatccacatataccttgcttgacgccaagccaccggcattccactcccagcagcggtgggaacaaagagtgccagcgtctcacccctgaggccgcgcagagccactgcttgcgtctctgtctctctgtctgctcgtttttctccaatggcggcgtccggggcatggctggcccgtgcgacggcgacggcggtgctgggtttcgtcctggcggtggcgtcagctgaggcggcatcgggggacgtggagatggtgttcctcaaggccgcggtggccaaaggcgcagtgtgcttggacggcagcccaccggtgtaccatttctctcccggctccggttctggcgccaataactgggtcgtccacatggagggcaacttcaggggctcctccaaatttatgaagccactctcgttttcagggatattaggcggcaaccaaaaatccaatcctgatttctacaactggaatagagtaaagatcagatactgtgatggttcatcatttactggtgacgttgaggctgtggacactgcgaaagatctccgttacagagggttcagagtctggcgtgccgtcatcgatgatctacttactgtgaggggaatgagcaaggcgcaaaatgctcttctttctggatgctcagccggaggtctagcagcaatactacactgtgacagattccatgatctgtttccagcgaaaacaaaggtcaagtgtttttctgatgctggatattttttcgatgggaaggatatctccgggaacttttacgctaggtcaatctataagagcgttgtgaatctacatggatcagccaaaaatttaccagcttcatgtacctcaaagccaaagcaatcacctgagctgtgtatgttcccacagtatgttgtcccgacaatgcgcacaccattgttcatacttaatgcagcctacgattcgtggcaggtcaagaacgtcctagcacctagtccagctgatccgaagaagacttgggcccaatgcaagcttgacatcaagagctgctccgccagccaactcacaaccttgcaaaatttcaggacagattttctggcagcactccctaaaacgcagtctgtaggcatgttcatcgactcatgcaatgctcactgccaatcaggatctcaagacacgtggctagccgatggttctcccacggttaacaagacgcaaattggcaaggcggtgggggactggtactacgatagggaggtccctcggcagattgattgcccgtatccctgcaacccaacttgcaagaaccgtgatgatgattgagcaattgtataagtagttcatgttatcgaaatgaaaacaataaaggatcacaacgcgcgcccgtagttgtagatgatgaattataaacacatatgactgagctcaaagttgtttaatcatcatctgttgcgaaatgaggaagacaattggtgtcttgaagctgtgttttcgactgtgtctaaagcgtaaatgtaacgtatattgtgtcttcgcctatgcttaagacattggactagttgattggtcaatttaatttattaaatgttttgattggtgtaatgaatataataagtcgtgcatgccgcatgactaggcttccagtcttccacttacaccggctaagcactgtctatatatatgtagtcactttggatcaatgaatcagctgtttttatca

SEQ ID NO: 212212 - DNA, 1082 bp, Zea Mays
gaaagacaaaggagttgagattcacgtctttggccacgctgtcgcggccattcccggcctccgttgtcggtgcccgaaccctccactccatccctccacggctgaggtaccattcccgtcgcagcgaattgcgccaatgagggtggctcttgtcgaggcctgatccggagacctaaccaccggggctttttgtcggcgccgtcgggttcgagcggcggcggcgatgttttggaaggatagcggcagccggagcagcagtggcagcggtcgggatcagaacggcgtcggccccttcggccaagtgcgcgtcctcattgtcggtgattcaggtgttgggaaatcttcattggtgcatctcattttgaaaagttctgccattgctcgaccatctcaaacagtaggatgcactgtgggcattaaacatgttacttacggaagtgcaggcggttcatctaataacatcagtgacgctgaaaggaacttctttgttgagctttgggatgtctcaggacacgaacggtacaaggcatgccggtcgattttctatacacaaataaatggcgtcatatttgtttacgatctctctcagaggaagaccaagacgaatttgaataaatgggcagttgaagttgctgaaactggcaccttttcagctccattgggatctggtggaccaggaggacttccagtgccctatctggtaattgctaataaagtggatatcgttccaagggatggggcaagagcaagcagggggaatcttgttgatcttgctcgccaatgggctgagaagcagggccttcttcggtgcagcgaagaacttccactcacagagagctttcctgggaactccggtcttgtgtcggctgctaaacaagcaagatatgacaaagaagccgtgatcaagtttttccgcttgcttattagaagaagatacttctcaaacgaacctcctgccccaagtccctggtcccttgctccaagagaagataccatccttcctatggagactcttggagatggcgcagatagcttccaaaggaaaagccggttttcaggggaaatattggtcgagatattgg

SEQ ID NO: 212213 - DNA, 1494 bp, Zea Mays
tcttttctccccttcccaccccatccctcactgcgagtggcctggtgcgcgagccgcgcgagaggaaaagaggcagagcgagccttccgcctcctcccccccttcgcgagagagaaaggagtgggggaggaaaaaaaatcttagggctttctcgtcgatcctctccgcgattaccccaccgattcgtccaatccaatgcagcgcggccccgcggtatcaaatcccccggcggcggccgccaccggcgcctccgagaacgacaaaaagtacagaaatgaagataatgtgagcctgggcgatcagtcagatggggccgtcatgccatctcccacaaagaagctgcaaatatgcaaaggcccttcagatgcaccttcaattaggaaatcaactatcagaatcctgggtgttaagggagctgctctaccacccacagggaaatctcaagttgaaactcggaaatgctttgctaatgctacagcagaagtgatttctgctagtacaaacgagatcagtgagccagataatgcagctgccccattgcttgcacagcagttgccaccagacactgcaaagaactccactgtcatcatgcatacccatgaaacaagtaaagtcaatcagttggctgctacatggccaagggcgaactttcaaactgattacaacaagaagccttccaatgtacccataatggctaaccagcccagtgggttcgctggtgcgactgctcccttggtgacaccaaagatggaaatcggaaacatgaaggacagttccaatcctctctcaaatcctgcttacgcaagggcgcttgtaataaagcagcaagagcagctccttcagcaatataaattgggcagttcaccgcagcgacagcatcatggacagcatctctacatcaaagggccagctctgtttgagaatgatgacccgccaccggtcaagccgctgggaacaaggtgccagctctgcaagcttgatgttgctttccggacacaaggggatgctggccgtgatgccaatgctccaccagtcattgcagttttggcatgccaccatgtgttccacagcaggtgcattgaatctgtttacgggctcgctgagcctgctgagtgccttgcctgcctggagtccggtgcagcgcactgattgctaaccagatacaccaggtgtgagccccgccacacaagtcgtccaggaagacaagcaacaaaggatgatcggtcgacaacacaacgtccagggatccggacgacagtgatcaccagaaggatgatcggtcggcaacgtccagggatccggacgacagtgagcaccggctggaaggcgacgacaacgtaccacgacatcggcggccaagacgtggcaacgttcgcgtaaccggacccgagtgggccgtgtaattccctatgttgggctggaccgtcggttagtatatatcccacgacattggcggccaagacgtggcaacgttcgcgtaaccggacccgagtg

SEQ ID NO: 212214 - DNA, 1439 bp, Zea Mays
attttcttaaaaaaaatctcaatcgcaacaacacaaaaaagacccgcaatatcgattagcgagagtcgttcctccaccaaaccaaccaattcgcttctccgtcaacttcacttcctcgtcgacgcctccgtcccaccaaccatgccggcggccatggcggctgcggcggcgcagaggctcctcgcggcgagcacgaaaatcatcggcgttgggcgcaactacatagcccacgccaaggagctcggcaatccggtccccaaggagcccgtcctgttcctgaagccgacctcgtcgtttctccacgctggtgtggccaccgccgccgtcgagatcccggagccgctcgagtcgctacaccacgaggtcgagctcgccgtcgtcatctcccggcgtgggcgcgacgttcccgaggcgtccgccatggactttgttggaggttatgcacttgctttggacatgacagcaagggaccttcagtctgttgctaagtctgcaggccttccatggactttggctaaaggacaagacaccttcaccccaattagtgcagtagttccaaaatcagctgtcactaatcccgatgatctcgagctctggctgaaggtagatgatgaactaaggcagaaaggaccgacaagcgacatgctattcaagattccttttctgataagctatatcagttccatcatgacattaatggagggtgatgtgatactaacaggtactcctgagggtgtgggtcctgtccgagtaggtcagaagattacagctggtataactgacctaattgatgttgagttcgatgttcagaggcgcaatcggtcattttccacatgatgcaataagcaagaaagtaatggtaagcaacataagatagtaaaggtgaatacaaagtgcagtactcgtcctcgaccttgaatcgcattactggacctggagccattgcagatagctcttgagccttaccttgatttaatttacctgggttttgagagactatctatgaatatgctaactccagcgacttgaaacagcttccgagtggggtgcacggccgatctatgtaacgtacgcgcataagaaatggtgtcctacaaaatgccttccacttgcttgaaacgatatgtagatggacagcgacgacgaacaccttaactccctctcgctagatatcgagccagcttagttcggttcgactgagcttgagctgactcgttaaggtaaagagatgacttggttcgttaaacaattgagtcagagaattagcttggctcgtttgcaagtttgggctggctcgtttacctcgcgagtaaaaaaatacatgtatatataaaatagtatagtcaattgctagttaattttatacaaatttaacattagaaaagagtaattatactcataatttcatatatattacatcttttaaaccctatattaac

SEQ ID NO: 212215 - DNA, 1989 bp, Zea Mays
attttgttttttattaaaaaagggttccccacagcaccaagcgcgacgtgagcgaggaggcaggcgcgcacggcgtctcggcgtcgcaccgaacccgacacggctcggcctacggcccccacacatccggctgggccgttccgttccgtttcgttcccttcccattcttctcgtacgcggccgattgcgaccctcgctcgccctcgcttccccaccacagcaccgaaactgccccgcctccgcagccgccgcccgcgcccgctcgtcctccccgcgccgcctcggggacgccccggtcggcgatgtggcgggagcatgctaggcccgctcctcaggctcctctcggcgtgcggcggggtctggcccacctcgccggcccccggcgccgcggcctcctcttccgcctcctccggggacgactctgagggccgcgacggccttctctggtggcgcgacctcgcgcgctgccacgccggcgacgtctccgtcgccgtcgcccaggccaaccaggtgctcgaggaccagtgccgcctcgactccgccccgtccatcggcaccgtcgtcggcgtcttcgacggccacggcggccccgacgccgcccgcttcgcctgcgaccaccttgtccccaacctccgagacgccatcagggaggccttcctggccacggaggaaggattcctcgcgctcgtgtcaagcctctgggaggcccagccggacatcgccacggccgggacatgctgccttgtcggcgtcgtgcacaacaggacccttttcgtcgccaacctcggcgactcccgggccgtcctcgggaagaaggcgggccgcgctggccagatcgccgcggagcagttgtccagcgagcacaatgccaaccaggaggctgtcaggcaggagctcatggcgcaacacccagatgatgctcagattgttgcgctcaagcatggggtctggagagtgaggggcctcatacaggtgtctagatcaatcggtgatgtatacctgaaacatgcaaagtataacacagaccagatcaaacccaagttcaggcttcccgaatcattcagcaagccactattgagtgccgatccatctatcatctcccgcgatcttgaaccaaatgactgtttcatcatattcgcatcagatggattgtgggagcacctcagcaatcaagaagccgttgagattgttcacagccatcaacgtgctggaagcgcaagaagactcattaaagccgctctacaagaagcagcgcggaagcgtgagatgcgttactcggatcttacaaagatcgataagaaagttcgcaggcatttccatgatgacattactgtcatcgtcttatttataaactatgacctattattgaaaggtgctccgcagggacaacccctctccatcagatgtgccctagattattgacagtgagctagttcacccactggtattcaagctcctgcgggcagccatatccagagtcagctgacatggtcaaccggttgtgaaaagcgcacaacctccggcaccagtttccttttcgtttccccttttttgcacataaaattgacaagtcgctgaaattgccagttttcccctcttggattatgtcggataaaatgcgtatactcttcggttttggagatatatgtctagactctagagcgtgagggaaggttataaagtcttcgacctggtcacggtactccacaccgtcatgagcataaattctttacgacttcaaggcttgaaagcaaacagctggtgggcttgtgccagtgaggatctgcagaattctctcctttttttcataaaatgtccaattgttctaccagaattctcaaactagacagttaccgaatgtttcttttgtttaattcactgccttttgcattcattcacacacatcacagtcctccaaccagccatggttttcaacgtgcccatgaaatgaaaagaaacggaaccggaaaagccacagtttccagctct

SEQ ID NO: 212216 - DNA, 2563 bp, Zea Mays
gtgccacacacacagccacgcccgtcggcccgctaggccgctactacccagaaggatggcggcggcggtggtggtgaggcgtgccgctggccttatccctctcctctcctcgcggttcggtgctcgcatgcccctccaccgggcgctatcccagatccctccgcctcgcttctgtcgcctactatcgcagcaaaccaagcccttctccgcctccgcgtcgaatggcgcggctacggacagaacccgcgagctgcgtctgtacaacaccaagtcgcggaagaaggagcagtttcggccgcgcattccaggcagggaggtcggcatgtacgtctgcggtgtcaccccctacgatgacagtcacatcggccatgcccgcgcatacgtagcctttgacgtcctctacaggtacttgcgctatttggactatgaagttcgctatgttcggaacttcaccgacattgatgacaagataattgcaagagcaaatcagctgggggaagatccttttagcttaagcaaaaggttctctgatgacttcttgtcagacatggccaatcttcaatgtctaccaccatccgtggagccccgtgtttcagatcatgttgatgagattataaatatgattaaacagatccttgataaccgttgcgcatatgtagtgggtggggatgtttatttctctgtagacaattttcctgagtacggagaattatctggtagaaagttagatgataatagagctggtgagagggttgctgttgatgagaggaagagaaatccagctgattttgctctatggaaggctgcaaaagatggggagccatggtgggatagcccatggggcccaggaaggccaggatggcacatagaatgcagtgccatgagtgcacattatttgggtcattcttttgacatacatggtggtggggaggatctcatctttccacaccatgagaatgagattgctcagagtcgtgcggcatgttgtgacagtaccataaattactggatacacaacggttttgtgaatgtaaacagccaaaaaatgtctaaatcacttggtaattttgttaccatacgtaaggttatagagatgtaccacccgctggctttgagaatgttcttacttggcacacactataggtccccaattaactacaccatagaacaactcaatgttgcatcagatagattgtactacacgtatcagaccttgcgtgattgtgaagagatctgtcagcatcaacaaagcaacactggaaatccattgcctgctaataccttaaattacatccagaaacttcatgatgaatttgagacctcaatgtcagatgatcttcacacttcagtggcattggctgctatgtctgagccattgaaagttatgaatgatctgctgcacactcgcaagggaaagaaacaggacaagaggttggaatcgctttccgccttagaagagaaaataagagtagttctctctgttctaggattgctaccttcaagttatcatgaggctttgcaacagctgcgggataaagcactgagacgagcttccatcactgaggagcttgtggtacagaagattgaagagaggactgcagcaaggaaggcgaagcagtatgaaaaatccgacgagatccggaaggaattggctgctgttggaatcgccctcatggatggccccgacggaacaacttggaggccatctttaccacttccagaggaggaagcggtgcttgctaaaacatgatgtgcgccgactttaggatcgagtcgagtatataggggtgattaatcttgttttaaaaagttaaatgcgtctgctagcagaaataaatgtgaatttagttagttgctctagtcaagactacggctctttatctatactagatctatgcccgtgcgttgccacggaaaacacatgaaatcgttatgtgtggtactacaaatcaaacaaagtgaaaaacattaaatatttattcacacgatattgtaaataaaacaacatatcatagcaacagtgagagatccatccatgccacaaacgagcataggagagagctggagtgtgccttttcatcaccttcttgacactggcagcatctactaacaaacgactactaattaactactactactattattatttatgcctactactcactcactatcatatacttatcataggcctaagagctaaaaaaacaacctggacttgtttcttctctgttgctgtcttcactgtcccctccttaagattacacctctccaaaggtatttcttttttctttgtcaaagcttctctacgctcggttgatagggccggccatcatgtagccatattagtagtccctcccagattagaggaatggagggccccccttcccctttttttgctctatgcacctcacacatcatagcccaatggcttcatgcccaggagaaaacctggagaaattccgaacagatgtaacagcaaaaaaacaataatctttgatttcttttgctcaccccacatgaattgcttgcaataagagaaactgcatttaggaaagatttaagc

SEQ ID NO: 212217 - DNA, 2461 bp, Zea Mays
gtgccacacacacagccacgcccgtcggcccgctaggccgctactacccagaaggatggcggcggcggtggtggtgaggcgtgccgctggccttatccctctcctctcctcgcggttcggtgctcgcatgcccctccaccgggcgctatcccagatccctccgcctcgcttctgtcgcctactatcgcagcaaaccaagcccttctccgcctccgcgtcgaatggcgcggctacggacagaacccgcgagctgcgtctgtacaacaccaagtcgcggaagaaggagcagtttcggccgcgcattccaggcagggaggtcggcatgtacgtctgcggtgtcaccccctacgatgacagtcacatcggccatgcccgcgcatacgtagcctttgacgtcctctacaggtacttgcgctatttggactatgaagttcgctatgttcggaacttcaccgacattgatgacaagataattgcaagagcaaatcagctgggggaagatccttttagcttaagcaaaaggttctctgatgacttcttgtcagacatggccaatcttcaatgtctaccaccatccgtggagccccgtgtttcagatcatgttgatgagattataaatatgattaaacagatccttgataaccgttgcgcatatgtagtgggtggggatgtttatttctctgtagacaattttcctgagtacggagaattatctggtagaaagttagatgataatagagctggtgagagggttgctgttgatgagaggaagagaaatccagctgattttgctctatggaaggctgcaaaagatggggagccatggtgggatagcccatggggcccaggaaggccaggatggcacatagaatgcagtgccatgagtgcacattatttgggtcattcttttgacatacatggtggtggggaggatctcatctttccacaccatgagaatgagattgctcagagtcgtgcggcatgttgtgacagtaccataaattactggatacacaacggttttgtgaatgtaaacagccaaaaaatgtctaaatcacttggtaattttgttaccatacgtaaggttatagagatgtaccacccgctggctttgagaatgttcttacttggcacacactataggtccccaattaactacaccatagaacaactcaatgttgcatcagatagattgtactacacgtatcagaccttgcgtgattgtgaagagatctgtcagcatcaacaaagcaacactggaaatccattgcctgctaataccttaaattacatccagaaacttcatgatgaatttgagacctcaatgtcagatgatcttcacacttcagtggcattggctgctatgtctgagccattgaaagttatgaatgatctgctgcacactcgcaaggctttgcaacagctgcgggataaagcactgagacgagcttccatcactgaggagcttgtggtacagaagattgaagagaggactgcagcaaggaaggcgaagcagtatgaaaaatccgacgagatccggaaggaattggctgctgttggaatcgccctcatggatggccccgacggaacaacttggaggccatctttaccacttccagaggaggaagcggtgcttgctaaaacatgatgtgcgccgactttaggatcgagtcgagtatataggggtgattaatcttgttttaaaaagttaaatgcgtctgctagcagaaataaatgtgaatttagttagttgctctagtcaagactacggctctttatctatactagatctatgcccgtgcgttgccacggaaaacacatgaaatcgttatgtgtggtactacaaatcaaacaaagtgaaaaacattaaatatttattcacacgatattgtaaataaaacaacatatcatagcaacagtgagagatccatccatgccacaaacgagcataggagagagctggagtgtgccttttcatcaccttcttgacactggcagcatctactaacaaacgactactaattaactactactactattattatttatgcctactactcactcactatcatatacttatcataggcctaagagctaaaaaaacaacctggacttgtttcttctctgttgctgtcttcactgtcccctccttaagattacacctctccaaaggtatttcttttttctttgtcaaagcttctctacgctcggttgatagggccggccatcatgtagccatattagtagtccctcccagattagaggaatggagggccccccttcccctttttttgctctatgcacctcacacatcatagcccaatggcttcatgcccaggagaaaacctggagaaattccgaacagatgtaacagcaaaaaaacaataatctttgatttcttttgctcaccccacatgaattgcttgcaataagagaaactgcatttaggaaagatttaagc

SEQ ID NO: 212218 - DNA, 2595 bp, Zea Mays
gtgccacacacacagccacgcccgtcggcccgctaggccgctactacccagaaggatggcggcggcggtggtggtgaggcgtgccgctggccttatccctctcctctcctcgcggttcggtgctcgcatgcccctccaccgggcgctatcccagatccctccgcctcgcttctgtcgcctactatcgcagcaaaccaagcccttctccgcctccgcgtcgaatggcgcggctacggacagaacccgcgagctgcgtctgtacaacaccaagtcgcggaagaaggagcagtttcggccgcgcattccaggcagggaggtcggcatgtacgtctgcggtgtcaccccctacgatgacagtcacatcggccatgcccgcgcatacgtagcctttgacgtcctctacaggtacttgcgctatttggactatgaagttcgctatgttcggaacttcaccgacattgatgacaaggaaacctgagttgcacttctggaattatgtagataattgcaagagcaaatcagctgggggaagatccttttagcttaagcaaaaggttctctgatgacttcttgtcagacatggccaatcttcaatgtctaccaccatccgtggagccccgtgtttcagatcatgttgatgagattataaatatgattaaacagatccttgataaccgttgcgcatatgtagtgggtggggatgtttatttctctgtagacaattttcctgagtacggagaattatctggtagaaagttagatgataatagagctggtgagagggttgctgttgatgagaggaagagaaatccagctgattttgctctatggaaggctgcaaaagatggggagccatggtgggatagcccatggggcccaggaaggccaggatggcacatagaatgcagtgccatgagtgcacattatttgggtcattcttttgacatacatggtggtggggaggatctcatctttccacaccatgagaatgagattgctcagagtcgtgcggcatgttgtgacagtaccataaattactggatacacaacggttttgtgaatgtaaacagccaaaaaatgtctaaatcacttggtaattttgttaccatacgtaaggttatagagatgtaccacccgctggctttgagaatgttcttacttggcacacactataggtccccaattaactacaccatagaacaactcaatgttgcatcagatagattgtactacacgtatcagaccttgcgtgattgtgaagagatctgtcagcatcaacaaagcaacactggaaatccattgcctgctaataccttaaattacatccagaaacttcatgatgaatttgagacctcaatgtcagatgatcttcacacttcagtggcattggctgctatgtctgagccattgaaagttatgaatgatctgctgcacactcgcaagggaaagaaacaggacaagaggttggaatcgctttccgccttagaagagaaaataagagtagttctctctgttctaggattgctaccttcaagttatcatgaggctttgcaacagctgcgggataaagcactgagacgagcttccatcactgaggagcttgtggtacagaagattgaagagaggactgcagcaaggaaggcgaagcagtatgaaaaatccgacgagatccggaaggaattggctgctgttggaatcgccctcatggatggccccgacggaacaacttggaggccatctttaccacttccagaggaggaagcggtgcttgctaaaacatgatgtgcgccgactttaggatcgagtcgagtatataggggtgattaatcttgttttaaaaagttaaatgcgtctgctagcagaaataaatgtgaatttagttagttgctctagtcaagactacggctctttatctatactagatctatgcccgtgcgttgccacggaaaacacatgaaatcgttatgtgtggtactacaaatcaaacaaagtgaaaaacattaaatatttattcacacgatattgtaaataaaacaacatatcatagcaacagtgagagatccatccatgccacaaacgagcataggagagagctggagtgtgccttttcatcaccttcttgacactggcagcatctactaacaaacgactactaattaactactactactattattatttatgcctactactcactcactatcatatacttatcataggcctaagagctaaaaaaacaacctggacttgtttcttctctgttgctgtcttcactgtcccctccttaagattacacctctccaaaggtatttcttttttctttgtcaaagcttctctacgctcggttgatagggccggccatcatgtagccatattagtagtccctcccagattagaggaatggagggccccccttcccctttttttgctctatgcacctcacacatcatagcccaatggcttcatgcccaggagaaaacctggagaaattccgaacagatgtaacagcaaaaaaacaataatctttgatttcttttgctcaccccacatgaattgcttgcaataagagaaactgcatttaggaaagatttaagc

SEQ ID NO: 212219 - DNA, 1831 bp, Zea Mays
tttcactggactgcaaggctgcttgctgccactcctcgaacccgtcgcccctgtctgcgccgtgttcctcttcccaatggcctcctcctcctccgtcccaccggaaccctagcgccgcggcccaccactaccagctcgctcggctcgtgtccagatcccacgccgcgccacaccacatggcggcggacgcggcgcagcagggcccgggcgtccaccggaggcgcggcggggccgccccgcgcgcctggtgctgctccttcgccggcgtgcccgacagccccgacctccgcccgatcccctcctcggcagcgtcccctgcggcggcgtcgaggaagctgccgcccaagtccccgtcggcggcgtccttctacggctcgcccacctcgtccaggctcgcgggcctcggcggcctcatcgacccgcgccgcatcctctcgcccggccgcgtctcccccatcgaccccgacggcgccgtcccgctccctcctcctacgccgccgccgccgccgcccgctgagtttccggcagctgtgggcaccgcggagcagccggcgccggtgctggcgtcggcattgccctcggcagcggcggcgccgcaggtggtgtccgtgcgggaggaagcggacgcgcacgcggctggcgtgctggatctgaagctcttcctgcgggggagggacgggaggtgcgtcctcatggagctcgactccagggtgttgtgcggctgcagcgacttcttcgccgccatggccccgcacgaggacgctgctgccactgctgctggtgccggcgctgccgggaagacgatcgaggtggacggggtcgataatttggatgctttcagggctgcagtggaactcatgtacgaccctgatccaatgcggggtcttgcagctgccggtgtgtcaagggctatagatgtgcttgaggtatgctcctctatcatgttcagcaagggaatcaaaacatgtttgacatacatagaagctgttccctggaatgagaacgaggaggagaagctgaagaatctctttgcaagattcacttttgacgaagcaatatcccaggatatactggcaagactgcgaccacacaactggaaaagctcagatgacctcgctgtacagcttattcaatctgtcactaacagcaccagcactatggcaagaaaagacatgcaatctttggtgaatggtcttctaagcaaaagttcagtctatcaaaaggactcgtcaggattaaacaaggagagcctgtatcagatctgttattcatgtctagagtcactggtggacctctttgaagaggccatagaaccaacatattacacaggtcaggctgtggtagttagagggagcaaaccactgatcgagcgaatctctacgcaaacagagaacctcaattggctattggatattctagtaaacattgacattgcagaagaatttgtagaactgtgggcgaagcaaggcaggctcattaggatgcacgagcaagcatcagcgatcgtcaggtatgagctaagtcgaatatcagctggtgtgttcattgcacttggtaaaggaaaagtgcagtgtcgtggtgacgtacgaagcctcctctttcatggatggttcagcacaatgttgttggattttggctggcttcagcgctgccccaaaggtctcgacctaagatcgttggaggagaatttagggcgaggccttttaaccctccctctcaggcagcagcaatgtttgttcgaggaatggttccagttctatgcgaccaaaggacccgagtgtccgaaccttattagagctttccaggactattgatgtgctacttgcctcat

SEQ ID NO: 212220 - DNA, 1149 bp, Zea Mays
tgcccacctcaggcgggtcaagaactgtctgggtgctgaagctgccaccacctgaccaggtcactcctccaacagtcgagctccaagggattatggagataagctcctcatcaaatttcacaagaatctgctgttctggtatgctcctctatcatgttcagcaagggaatcaaaacatgtttgacatacatagaagctgttccctggaatgagaacgaggaggagaagctgaagaatctctttgcaagattcacttttgacgaagcaatatcccaggatatactggcaagactgcgaccacacaactggaaaagctcagatgacctcgctgtacagcttattcaatctgtcactaacagcaccagcactatggcaagaaaagacatgcaatctttggtgaatggtcttctaagcaaaagttcagtctatcaaaaggactcgtcaggattaaacaaggagagcctgtatcagatctgttattcatgtctagagtcactggtggacctctttgaagaggccatagaaccaacatattacacaggtcaggctgtggtagttagagggagcaaaccactgatcgagcgaatctctacgcaaacagagaacctcaattggctattggatattctagtaaacattgacattgcagaagaatttgtagaactgtgggcgaagcaaggcaggctcattaggatgcacgagcaagcatcagcgatcgtcaggtatgagctaagtcgaatatcagctggtgtgttcattgcacttggtaaaggaaaagtgcagtgtcgtggtgacgtacgaagcctcctctttcatggatggttcagcacaatgttgttggattttggctggcttcagcgctgccccaaaggtctcgacctaagatcgttggaggagaatttagggcgaggccttttaaccctccctctcaggcagcagcaatgtttgttcgaggaatggttccagttctatgcgaccaaaggacccgagtgtccgaaccttattagagctttccagttcttcccattgtatgtgaatagctggatgaatttgcttgaggataacatctgcggcgtggagtatgtaataacccaacccagtcatatgtcgaacttttgtactttttgtagcatgacagtcaatagtgtc

SEQ ID NO: 212221 - DNA, 2169 bp, Zea Mays
gtcgccgctggtacctctgcgtcccctccggaccgtcctcttccacatcggtgtcagcggcgtctctgtcaaggacctccacctccgccgcgttgtccctcccgctgccggctccctcgacacctctccccgcccccatatcctgcgccagcgctgctcatcccgctagcacacgccactgtggatctagatccgacactggctgtgcgggattagtcggcgtgcgtgcttagcagcgtctgccgatggatggagaatggtggaatcgagaaggccggtgtcacccacaagatcgacatcagcgatggccccgtgctcccagtcccgtccgcctcgaatccattcgtttgcctgcacaggagaagaaccacgcgtcgttcgacttcatcttcatggacgccgacaaggacaactaccccgagcgactgctcaagctggtgaggccgggtggcctcatcggctacgacaacatgctgtggaacggctccatcgtgctcctggacgacgcgcccatgcgcaagtacatccgcttctaccgcgacttcgtgctcgccctcaacatggcgctcgccgccgacgagcgcgccgagatctgccagctccctcgttcatgtggtgctgtgtatcggaagaaaatgcgacatcaaacttcgccgccatcgacgcaagcttgggagatgcgacgggggaaggtgtggcggcgcgggggcttgcgacgagaggcgcgcgcgcggcgagctcggccgtggcactgggcttcagcggggaggcggagaagccccgcgaggagggcaagctgatgttgagttcggcggacgaggggcccggcgacgacgacgcagttgaagagccgactccacggacggtgcaattgcggatatattagtgcagccgatgggtgaggagcggctgtagccctacaggaacccggcaaggacaggccaccgtcccaactcgccttgtcttacctcatcagtcatccctgccctcaccttctcaggcatctccagatacttggaggtatttgggctgataggattggtggtgctcttgcatggagttctttgctttcttctagaagccgtgataggagcatcctccaccatgatatccgtgctcaagaagattatgttagcaagcttaccgggcacaaatctgaggactatggcgcatcacagtgtatgtctgcaattgctggctcctatggctatattgctccaggaatgcatatacccctaaggtcaatgagaagagcatgtctacacctttggtgtcgtgcttcttgagctggtcaccggaaagaagccagtaggtgagttttgggacggcgtcaacattgtccatcgggtcaagtcgatgacaaacacaaacaaggagcaggtgatcaagatcattggccctaggctgtcgaccgtgcacacaaggtcatgcatgtattctgtgttgcacttctctgcgtcaaggagcagagcgtgcaacagcctatgatgcggaagatggtgcagatgctcaacgaacttcccaatccagctgcaggcaaggagatgaggttcccgacggcgacgatttttccactacacaatcggattcttcagcagcagatggatctattgaagcgtcgtgtgacgaagtcaccaaagagcagcagcaaacgagatctttgctatgtttccttctccttgctaaccactgatctcatcaagcttggtttttctcattgctatgtttccctctcctggtgatgttaagatatttggacatttctagcttattagggccttgtgtggaacatgtttgaacaattatctcatttaaacaatgtcaacatgtgtgatatatagaaaccgtagcaacgcacgggcacctaattagtagagttttaaattccaaaacttgtaaaatccataacttttgcatagagactccaacttgggtgattcaaattgcataattctcatggcatttttgtctacatgttagcagcaagtttatctgctgttttgatattttaataaatggttaatccctagttagactaaagtaagttgagtccgaattaaaataatttaagaatagggaatcatagcaaatgttctaggctttggaaccatagcacaccctaatgattcatgccatcaacaaactaacttcatttatataatgttgttg

SEQ ID NO: 212222 - DNA, 2403 bp, Zea Mays
ttaagggtttggactaatgattggatcaagcgaccgagacccgccatggaccttgcacggagcggcggtgccgctgccgcggacgacgggggggagatcgagaggcacgagccggcgcccgaggacatggagtccgaccccgcggcggcgcgcgagaaggagctggagctggagcgggtgcagccgtggcgggagcaggtgaccctgcgcggcgtggtggcggcgctgctgatcggcttcatgtacagcgtgatcgtgatgaagatcgcgctgaccacggggctggtgcccacgctgaacgtctccgcggcgctgatggcgttcctggcgctccgcgggtggacgcgcgtgctggagcgcctcggcgtggcgcaccgccccttcacgcgccaggagaactgcgtcatcgagacctgcgccgtcgcgtgctacaccatcgcgttcggtggtgggttcggctccacgctgctgggcctggacaagaagacgtacgagctggccggggcctcgccggccaacgtcccgggcagctacaaggaccctgggttcggctggatggccgggttcgtcgcggcgatcagcttcgccggcctcctaagcctgatccccctcagaaaggttctggtcattgactacaagctaacttacccaagcgggactgcgaccgctgttcttataaacgggttccacaccaagcaaggagacaagaacgcaaggatgcaagtccgagggttcctcaagtactttgggctcagcttcgtgtggagctttttccagtggttctacacaggcggtgaagtttgcggctttgttcagtttcctacgttcggtctgaaggcctggaagcagacgttcttctttgattttagcctcacgtacgttggtgcggggatgatctgttcgcacctcgtgaacatctccaccctccttggtgccatcctgtcgtgggggatactgtggccactcatcagcaagcagaaaggggagtggtaccctgcgaacatacctgagagtagcatgaaaagcttatacggttacaaggcattcctctgcatagctctgatcatgggagacggtacataccacttctttaaagtcttcggtgtcactgttaagagtctgcatcaacggctgagccgcaaacgtgctaccaacagagtggcaaacggtggagacgaaatggccgcgcttgacgacctacagcgtgacgagatcttcagcgacgggtctttccccgcctgggcagcttacgccgggtacgccgcgctgaccgtcgtctcagcggtcatcatcccgcacatgttccggcaggtcaagtggtactacgtgatcgtggcctacgtcctcgcccctctcctcggcttcgccaactcctacggcacggggctcaccgacatcaacatggcctacaactacggcaagatcgcgctcttcatcttcgcggcctgggccggcagggacaacggcgtcatcgcgggcctcgccggcggcaccctggtgaagcagctggtgatggcgtccgcggacctgatgcacgacttcaagacgggccacctgaccatgacgtcgcccaggtccctgctcgtggcgcagttcatcgggacggccatgggctgcgtcgtcgcgcccctcacgttcctgctcttctacaacgcgttcgacatcgggaaccccaccgggtactggaaggcgccgtacggcctcatctaccgcaacatggcgatcctcggcgtggagggcttctccgtgctgcccaggcactgcctcgcgctctccgctgggttcttcgcgttcgccttcgtcttcagcgtcgcccgggacgtcctgccgcggaagtacgccaggttcgtgcccctgcccatggccatggccgtgccgttcctcgtgggcgggagcttcgcgatcgatatgtgcgtcgggagcctggccgtctttgtctgggagaaggtgaacaggaaggaggccgtgttcatggtgcctgcggttgcgtccggtttgatctgtggagacggcatatggaccttcccgtcttccattctcgctctggccaagatcaagccaccgatttgcatgaagttcactcctggaagctagaaacagtattgacagttcacagaaatggagaatgcgagatacactgaaggcatcaactgtggttggttgaagtgttgaagagcaagtcctctggtcgtcgacatgaagcggagccatatgtcccctgtattatccttgttgtgcatgtgtgggttctccaagggctacagcactcgagattttctatagagttgatcatatgttttgttgtcatgttgggttcaacctatgtttatgttttgggtggaaaaaagatacaactgtacatttttaacagaaattaatgctcattttggttgtgtatttaca

SEQ ID NO: 212223 - DNA, 2471 bp, Zea Mays
gtggaaatgataaagcctcggcccttcaggctggctctgctcctcctcctcctcgccattgctgtgcgttctccgcctcaccagatttcgcaacagaaccttcgttccctgccgtctcttgtcggtctggccggccgaggtgggtgatctgtagagcgaaacgccgagccgggagaggagggaggccgcaccggcgattgtagaagcagaaccggtggaggagtagaggagggcgccgaatcgatgcgcggctccgcggacgccgtcgtggttgctcgggacgtggtggcctcgtcgagcccgtccaaggccgcgtcggcgttggacatgacgagtcagtggttgttgccggctcctgcggggctgattcgaacaagtttctccctttcgtgccgtgttcgcggcccttctctgctgttctcttcgcaagctcttcgaggcgccgtttgatctgcgggcaggccagttgttctcgcgtctcgcagcctgtgtctcacccgcccacctgtgctgatctctgaaccgttcgtttaacgtggagtcctgctgcggtttgcgagcgttctggttttctgcggttgcaaattcacgcaggaagacgagattttgcacatcttttcatccatgactccagatacccgaggctcagcccagatggcctcccgctgcccaatggcagcggcagcggcgcgagcaagaagcctgcagcgccggtgtcgccggcccccagatcgagcaaggatgacgtggcaccggccgtcgccaccgacagctcccgcatcgcggcgttcctagcctcgacgtcgctcgagcccaagccgcgcgctcgcgcaccgcagccacagccgacggctcctaactcggcgcccaccgcagccgtcgccgcgaacaggagccccgcgcgcgaccacggccacggccactgctccgaccactccgatcccgcctccccgagctccaccggggcccgcgaattgctgctccggtggggacagaacaagcgcatgcgctgccgccgcgactgcgcgtccgcgtcgccgcagcggcggcaggcgggcggcaagataccgcgccgctcatcgtcgccggcggcggacaatctgatgccgccgccgagcgcagcgccctacgcccgcgggtccaacctccgctacgccacgcctcgcccgccgcgctccggcgccagcgacgcgcaccacggccgcggggccctccccaacccgctcagatcggcggaggactgtgccggtgcctgtgccggtgccggggagaagttcttggcggttgctgaggcagcggcgagggcccagaagcagcgggcggtgtcgccgcataaggtgggcctgggcgtcccggacccgaagcagcagcagaaccagtggggcagcagcggcagtggccatcagcagcaggccggcgcggcggcgggggcgtcgtcgaagccggcggcgaagctggaggtgccgcggatctacaccacgctgtcccgaaaggagaaggaggaggacttcatggccatgaaaggcaccaagctgccgcagcgccccaagcggcggccaaagatcatcgagaagaccgtcagtgcgatctgtcccggggtgtggctgacggatgcgaccaggagcaggtacgaggtgcgcgagaagaagtgccccaagaagcaacagaagcaccggggcctcaagggcatggagagcatcgacagcgactccgactgaccaccgaccgacggcagcaggccgaagggcgtgcggtggcagcaacgcggcgagacgaagaagaaggaggaggttcggcgacagcgaagggtgcgtgtcaacagccacgcgctctcggagactcacattgtcgcgctgggttaagggatgccaaaaagaacaagaggagggtggattcagtaggaaaaagacaattctttttcgtgttaaccatagcggcgccgtgctatatagccggcgttttgtatatctgggtagcgacgagacgatgtcgtagccggcgtctttttctttttcgtttcgttcgcgacactgggtgggttgcccgccgcgtttatttgtggttgggtttgtgcatactactagactgtctcagcaagaggaagcaactagacttttagaccctacttggcatagttcattcattacaacaacaagcactgcctaataaactaaaaggaagagcagcttctgtgcaggacaaggcgttcaagcatttaaaaacgagaggagaaaccgcttcacgatgatggtggcagaagaggcaatgagatggctccctaatagcgtgatgagagagacgtggtgcgagcagccaagccaagcacacttcccttgggtgccagaaaagggtgtgttttgttataaaatattttgtatagtgatcagccccctccctttacagttacttcccaagggacatatctcctggggaacattattttggcttgtatataagggagtctccctggt

SEQ ID NO: 212224 - DNA, 3693 bp, Zea Mays
ctgagagtgagacagaacggcgcagtcagcagtaggaataatgaataaataaaaatataaaatatgacagtttctaggtatataggcgcaggctcgtattatcgtctcgttaattatttaataatgggattcacagctaattaaatctggaagtatatcttgcccgcaaggaaagaatagaagaaaatacaggcggagagaggcgaggaaggaagaaatcgacgaggggattggattggactgcgactgttgttgattctctcttgcacgcggcggtcctcctccagagtccagacccaatcccaaatccctaatcctacagagggatcccaaatccggcgtccagtccagtccaacctgtagtagatatccccgccggcttggccgtccgtccttgccccaattccgattgaccggagaggagttggatcagggagcattggaatggccgccgccgcataggatggagctggattcctccggccgctgctcggttgctcccgtgaatgctgtgatcgtcgcgattggaggtggaggcgaaggttctcttcagtaagagcttcaagagctgtgatctagctgattgggtatggaggagagtggcggcagctgcggaaagcgggaggacgcggcgccgccgtggaggccgagcgactccacggcgttcggccgttttgcggcggccgcttctccgccggaggcgtccccgtcggcctccgccaatggggctgctgcccgcgtcagcagccttcatggggtcaggcggaaaccgtctgttgcgagattaacagcaggcatcattcagacatatctacaatgtgatcccgagtttaagtactcagaggttctaaatccaaaacgtttcctcacgaatccctctaccccagcccacaacgatgggcttgacaatgcaaattgggatctcatattgtatgtcaacttggagttggttaataagatgtcgaacagaaggtttattgtcaaggaaatgcttgggcagggaacttttggtcaagtagttaaatgctgggacacagaaactaacgactatgttgctgtgaaggtgataaaaaaccagcctgcattttaccatcaagctatcatggaggtttcactattaagaacggtatgatagttcattagaaacttaacttcgttttgctcaataggtacactaagtcactaactattaagattgcggatgtacttgcagttaaatcagaaatttgatcctgatgatcagcataacattgtccgtatgcttgattatctgtcatttcaaaaccatttgtgtatagcttttgagatgcttggccaaaacctatatgaactgctcaaaaggaatcacttaagaggtctgaaattgaaatatgttcaagccttctcaaaacagatattggatgccatggttgtgatgagagaagctggaatcatccattgtgatttgaagccagaaaatatcctgttagctcccagtgtcacaacagctgcagaagtgaaagttattgattttggatcagcctgcctggagggtaaaacggtttactcgtacatccagagccgctattacaggtctccagaggttctccttggctatccatatactaccgcgatcgacatgtggtcgtttggctgcatagttgctgaactgtttctaggtttgccattgtttcctggagcgtcagaatatgatgtgcttcagcgaatgatgaaaattcttgggggccaaccaccagatgaactgctaagggaagctaaaaacactgcaaggttttttaaacatgttggaagtatctatcctggcaatgaggcacctactggtctttgtagtgcgtacaaaagtttaagtgaagaagatgttgaagtgagagactccaagaagccacagatgggaaagtggtacttcccacacctaaagcttgacaaactcatatgtacctatccttggaacaattccgaactgacagagacagaaaaaatggatcgtttgggattagttgatttcttgaagggtctccttgaatttgatccaaataagagatggtcaccattgcaggctctataccatccattcataacaggcaaatcgttcaccggtccatatgaacctgtacctgagaccacaagaattcctgttgttcgtgctgcagcaattgatcacaatcctggagggggccactggctacattcaggtctttccccgcaggttggaagtgtcaacagatacctaccttcgaataatgcctaccctccaaaggttcctttttcttatgggagtagttatggaagctttggtagccatggtagctataccgccaatgctggttttggtaacagctacggaagcattggtgatgttaatgctatcaatatgtattattcacccttaagttcttctggattaacgcaaattggctctagtccagatgttagactaaggatgcttctcccacatgatagaggaattcgattgagccctggtagtcttgggcctatgtctcttggagccagtccatcacagtttaccccaccaaactaccagatgcaaatcccagctaattcggttgggaagcatggttctggttctcctgcaagtggaggcattcatggttctccgttaggaaaatctgcaggagtgggcccatacaacatgaggaggaacttgccaatgccgccacatgattatgtatctcagcatggacacgggcgttgtggagatggtgtcagtttcagtcattttgatgcctgtgctcgaggacatacaggtcactctcatagtgcagcgggacctagttcttatcattctggttggagaccacaaataggttcaaggagtggtatttccttggaggcctcgtctagtcatgtgctttcacaggctccatcacaatcgtttgacttttcaccttcatcagcacttgatcctgctaattgggaccctaattatagtgatgagtcactactgcaggacaattcactgtcagctgaactaagtagcaacctccactttggagatgcaactggccaagggagtggatctatcagagcagatcaattatttcatgtgtcttctcaaggattgagtgcccattccagtgttcccgtcaactacggtggttacaaccctccaaattatcctccgcaaaatctccgtcctcgtcgtggacaaccaattcttcatcagcgatataaccaggcaacttccagtccgatgcggccaatgggaagccatcacagtgggcagcctgcgtggcctagttttggcatgggcgatggagtgccctggggaggaacaggagggcactcatttacgacaagtgggctatcttcatctcttgcaagaaaggattatgggagcatcttttagtgtgttgtggacaggaggaatggcgttgattcattgcagtcgtaaattatttgtattagcaaaattggagtgcgatgattctggtttattgtttcgatgttgttaccccatccctccaattggtcctttgtgaacaagacagttgatatacaatatatgatcgatgacaatagcattcctttgcagccctttttttatcagtcagaagtttgggtgttcgcctgattgctgactatgttgtagttgccttgtcagctatgtaatatgaaggcgtgatgtgcttaggttcaggtgtgtttggttcagctttctcaactagattggtc

SEQ ID NO: 212225 - DNA, 3772 bp, Zea Mays
ctgagagtgagacagaacggcgcagtcagcagtaggaataatgaataaataaaaatataaaatatgacagtttctaggtatataggcgcaggctcgtattatcgtctcgttaattatttaataatgggattcacagctaattaaatctggaagtatatcttgcccgcaaggaaagaatagaagaaaatacaggcggagagaggcgaggaaggaagaaatcgacgaggggattggattggactgcgactgttgttgattctctcttgcacgcggcggtcctcctccagagtccagacccaatcccaaatccctaatcctacagagggatcccaaatccggcgtccagtccagtccaacctgtagtagatatccccgccggcttggccgtccgtccttgccccaattccgattgaccggagaggagttggatcagggagcattggaatggccgccgccgcataggatggagctggattcctccggccgctgctcggttgctcccgtgaatgctgtgatcgtcgcgattggaggtggaggcgaaggttctcttcagtaagagcttcaagagctgtgatctagctgattgggtatggaggagagtggcggcagctgcggaaagcgggaggacgcggcgccgccgtggaggccgagcgactccacggcgttcggccgttttgcggcggccgcttctccgccggaggcgtccccgtcggcctccgccaatggggctgctgcccgcgtcagcagccttcatggggtcaggcggaaaccgtctgttgcgagattaacagcaggcatcattcagacatatctacaatgtgatcccgagtttaagtactcagaggttctaaatccaaaacgtttcctcacgaatccctctaccccagcccacaacgatgggcttgacaatgcaaattgggatctcatattgtatgtcaacttggagttggttaataagatgtcgaacagaaggtttattgtcaaggaaatgcttgggcagggaacttttggtcaagtagttaaatgctgggacacagaaactaacgactatgttgctgtgaaggtgataaaaaaccagcctgcattttaccatcaagctatcatggaggtttcactattaagaacggtatgatagttcattagaaacttaacttcgttttgctcaataggtacactaagtcactaactattaagattgcggatgtacttgcagttaaatcagaaatttgatcctgatgatcagcataacattgtccgtatgcttgattatctgtcatttcaaaaccatttgtgtatagcttttgagatgcttggccaaaacctatatgaactgctcaaaaggaatcacttaagaggtctgaaattgaaatatgttcaagccttctcaaaacagatattggatgccatggttgtgatgagagaagctggaatcatccattgtgatttgaagccagaaaatatcctgttagctcccagtgtcacaacagctgcagaagtgaaagttattgattttggatcagcctgcctggagggtaaaacggtttactcgtacatccagagccgctattacaggtctccagaggttctccttggctatccatatactaccgcgatcgacatgtggtcgtttggctgcatagttgctgaactgtttctaggtttgccattgtttcctggagcgtcagaatatgatgtgcttcagcgaatgatgaaaattcttgggggccaaccaccagatgaactgctaagggaagctaaaaacactgcaaggttttttaaacatgttggaagtatctatcctggcaatgaggcacctactggtctttgtagtgcgtacaaaagtttaagtgaagaagatgttgaagtgagagactccaagaagccacagatgggaaagtggtacttcccacacctaaagcttgacaaactcatatgtacctatccttggaacaattccgaactgacaggtcttacattttgattcagagacagaaaaaatggatcgtttgggattagttgatttcttgaagggtctccttgaatttgatccaaataagagatggtcaccattgcaggctctataccatccattcataacaggcaaatcgttcaccggtccatatgaacctgtacctgagaccacaagaattcctgttgttcgtgctgcagcaattgatcacaatcctggagggggccactggctacattcaggtctttccccgcaggttggaagtgtcaacagatacctaccttcgaataatgcctaccctccaaaggttcctttttcttatgggagtagttatggaagctttggtagccatggtagctataccgccaatgctggttttggtaacagctacggaagcattggtgatgttaatgctatcaatatgtattattcacccttaagttcttctggattaacgcaaattggctctagtccagatgttagactaaggatgcttctcccacatgatagaggaattcgattgagccctggtagtcttgggcctatgtctcttggagccagtccatcacagtttaccccaccaaactaccagatgcaaatcccagctaattcggttgggaagcatggttctggttctcctgcaagtggaggcattcatggttctccgttaggaaaatctgcaggagtgggcccatacaacatgaggaggaacttgccaatgccgccacatgattatgtatctcagcatggacacgggcgttgtggagatggtgtcagtttcagtcattttgatgcctgtgctcgaggacatacaggtcactctcatagtgcagcgggacctagttcttatcattctggttggagaccacaaataggttcaaggagtggtatttccttggaggcctcgtctagtcatgtgctttcacaggctccatcacaatcgtttgacttttcaccttcatcagcacttgatcctgctaattgggaccctaattatagtgatgagtcactactgcaggacaattcactgtcagctgaactaagtagcaacctccactttggagatgcaactggccaagggagtggatctatcaggtcagcaaatttccaaggccacgtcttcgctacatctaaccctgtaccaacaaaccaaagagcagatcaattatttcatgtgtcttctcaaggattgagtgcccattccagtgttcccgtcaactacggtggttacaaccctccaaattatcctccgcaaaatctccgtcctcgtcgtggacaaccaattcttcatcagcgatataaccaggcaacttccagtccgatgcggccaatgggaagccatcacagtgggcagcctgcgtggcctagttttggcatgggcgatggagtgccctggggaggaacaggagggcactcatttacgacaagtgggctatcttcatctcttgcaagaaaggattatgggagcatcttttagtgtgttgtggacaggaggaatggcgttgattcattgcagtcgtaaattatttgtattagcaaaattggagtgcgatgattctggtttattgtttcgatgttgttaccccatccctccaattggtcctttgtgaacaagacagttgatatacaatatatgatcgatgacaatagcattcctttgcagccctttttttatcagtcagaagtttgggtgttcgcctgattgctgactatgttgtagttgccttgtcagctatgtaatatgaaggcgtgatgtgcttaggttcaggtgtgtttggttcagctttctcaactagattggtc

SEQ ID NO: 212226 - DNA, 3666 bp, Zea Mays
ctgagagtgagacagaacggcgcagtcagcagtaggaataatgaataaataaaaatataaaatatgacagtttctaggtatataggcgcaggctcgtattatcgtctcgttaattatttaataatgggattcacagctaattaaatctggaagtatatcttgcccgcaaggaaagaatagaagaaaatacaggcggagagaggcgaggaaggaagaaatcgacgaggggattggattggactgcgactgttgttgattctctcttgcacgcggcggtcctcctccagagtccagacccaatcccaaatccctaatcctacagagggatcccaaatccggcgtccagtccagtccaacctgtagtagatatccccgccggcttggccgtccgtccttgccccaattccgattgaccggagaggagttggatcagggagcattggaatggccgccgccgcataggatggagctggattcctccggccgctgctcggttgctcccgtgaatgctgtgatcgtcgcgattggaggtggaggcgaaggttctcttcagtaagagcttcaagagctgtgatctagctgattgggtatggaggagagtggcggcagctgcggaaagcgggaggacgcggcgccgccgtggaggccgagcgactccacggcgttcggccgttttgcggcggccgcttctccgccggaggcgtccccgtcggcctccgccaatggggctgctgcccgcgtcagcagccttcatggggtcaggcggaaaccgtctgttgcgagattaacagcaggcatcattcagacatatctacaatgtgatcccgagtttaagtactcagaggttctaaatccaaaacgtttcctcacgaatccctctaccccagcccacaacgatgggcttgacaatgcaaattgggatctcatattgtatgtcaacttggagttggttaataagatgtcgaacagaaggtttattgtcaaggaaatgcttgggcagggaacttttggtcaagtagttaaatgctgggacacagaaactaacgactatgttgctgtgaaggtgataaaaaaccagcctgcattttaccatcaagctatcatggaggtttcactattaagaacgttaaatcagaaatttgatcctgatgatcagcataacattgtccgtatgcttgattatctgtcatttcaaaaccatttgtgtatagcttttgagatgcttggccaaaacctatatgaactgctcaaaaggaatcacttaagaggtctgaaattgaaatatgttcaagccttctcaaaacagatattggatgccatggttgtgatgagagaagctggaatcatccattgtgatttgaagccagaaaatatcctgttagctcccagtgtcacaacagctgcagaagtgaaagttattgattttggatcagcctgcctggagggtaaaacggtttactcgtacatccagagccgctattacaggtctccagaggttctccttggctatccatatactaccgcgatcgacatgtggtcgtttggctgcatagttgctgaactgtttctaggtttgccattgtttcctggagcgtcagaatatgatgtgcttcagcgaatgatgaaaattcttgggggccaaccaccagatgaactgctaagggaagctaaaaacactgcaaggttttttaaacatgttggaagtatctatcctggcaatgaggcacctactggtctttgtagtgcgtacaaaagtttaagtgaagaagatgttgaagtgagagactccaagaagccacagatgggaaagtggtacttcccacacctaaagcttgacaaactcatatgtacctatccttggaacaattccgaactgacagagacagaaaaaatggatcgtttgggattagttgatttcttgaagggtctccttgaatttgatccaaataagagatggtcaccattgcaggctctataccatccattcataacaggcaaatcgttcaccggtccatatgaacctgtacctgagaccacaagaattcctgttgttcgtgctgcagcaattgatcacaatcctggagggggccactggctacattcaggtctttccccgcaggttggaagtgtcaacagatacctaccttcgaataatgcctaccctccaaaggttcctttttcttatgggagtagttatggaagctttggtagccatggtagctataccgccaatgctggttttggtaacagctacggaagcattggtgatgttaatgctatcaatatgtattattcacccttaagttcttctggattaacgcaaattggctctagtccagatgttagactaaggatgcttctcccacatgatagaggaattcgattgagccctggtagtcttgggcctatgtctcttggagccagtccatcacagtttaccccaccaaactaccagatgcaaatcccagctaattcggttgggaagcatggttctggttctcctgcaagtggaggcattcatggttctccgttaggaaaatctgcaggagtgggcccatacaacatgaggaggaacttgccaatgccgccacatgattatgtatctcagcatggacacgggcgttgtggagatggtgtcagtttcagtcattttgatgcctgtgctcgaggacatacaggtcactctcatagtgcagcgggacctagttcttatcattctggttggagaccacaaataggttcaaggagtggtatttccttggaggcctcgtctagtcatgtgctttcacaggctccatcacaatcgtttgacttttcaccttcatcagcacttgatcctgctaattgggaccctaattatagtgatgagtcactactgcaggacaattcactgtcagctgaactaagtagcaacctccactttggagatgcaactggccaagggagtggatctatcaggtcagcaaatttccaaggccacgtcttcgctacatctaaccctgtaccaacaaaccaaagagcagatcaattatttcatgtgtcttctcaaggattgagtgcccattccagtgttcccgtcaactacggtggttacaaccctccaaattatcctccgcaaaatctccgtcctcgtcgtggacaaccaattcttcatcagcgatataaccaggcaacttccagtccgatgcggccaatgggaagccatcacagtgggcagcctgcgtggcctagttttggcatgggcgatggagtgccctggggaggaacaggagggcactcatttacgacaagtgggctatcttcatctcttgcaagaaaggattatgggagcatcttttagtgtgttgtggacaggaggaatggcgttgattcattgcagtcgtaaattatttgtattagcaaaattggagtgcgatgattctggtttattgtttcgatgttgttaccccatccctccaattggtcctttgtgaacaagacagttgatatacaatatatgatcgatgacaatagcattcctttgcagccctttttttatcagtcagaagtttgggtgttcgcctgattgctgactatgttgtagttgccttgtcagctatgtaatatgaaggcgtgatgtgcttaggttcaggtgtgtttggttcagctttctcaactagattggtc

SEQ ID NO: 212227 - DNA, 2536 bp, Zea Mays
gttaaatcagaaatttgatcctgatgatcagcataacattgtccgtatgcttgattatctgtcatttcaaaaccatttgtgtatagcttttgagatgcttggccaaaacctatatgaactgctcaaaaggaatcacttaagaggtctgaaattgaaatatgttcaagccttctcaaaacagatattggatgccatggttgtgatgagagaagctggaatcatccattgtgatttgaagccagaaaatatcctgttagctcccagtgtcacaacagctgcagaagtgaaagttattgattttggatcagcctgcctggagggtaaaacggtttactcgtacatccagagccgctattacaggtctccagaggttctccttggctatccatatactaccgcgatcgacatgtggtcgtttggctgcatagttgctgaactgtttctaggtttgccattgtttcctggagcgtcagaatatgatgtgcttcagcgaatgatgaaaattcttgggggccaaccaccagatgaactgctaagggaagctaaaaacactgcaaggttttttaaacatgttggaagtatctatcctggcaatgaggcacctactggtctttgtagtgcgtacaaaagtttaagtgaagaagatgttgaagtgagagactccaagaagccacagatgggaaagtggtacttcccacacctaaagcttgacaaactcatatgtacctatccttggaacaattccgaactgacagagacagaaaaaatggatcgtttgggattagttgatttcttgaagggtctccttgaatttgatccaaataagagatggtcaccattgcaggctctataccatccattcataacaggcaaatcgttcaccggtccatatgaacctgtacctgagaccacaagaattcctgttgttcgtgctgcagcaattgatcacaatcctggagggggccactggctacattcaggtctttccccgcaggttggaagtgtcaacagatacctaccttcgaataatgcctaccctccaaaggttcctttttcttatgggagtagttatggaagctttggtagccatggtagctataccgccaatgctggttttggtaacagctacggaagcattggtgatgttaatgctatcaatatgtattattcacccttaagttcttctggattaacgcaaattggctctagtccagatgttagactaaggatgcttctcccacatgatagaggaattcgattgagccctggtagtcttgggcctatgtctcttggagccagtccatcacagtttaccccaccaaactaccagatgcaaatcccagctaattcggttgggaagcatggttctggttctcctgcaagtggaggcattcatggttctccgttaggaaaatctgcaggagtgggcccatacaacatgaggaggaacttgccaatgccgccacatgattatgtatctcagcatggacacgggcgttgtggagatggtgtcagtttcagtcattttgatgcctgtgctcgaggacatacaggtcactctcatagtgcagcgggacctagttcttatcattctggttggagaccacaaataggttcaaggagtggtatttccttggaggcctcgtctagtcatgtgctttcacaggctccatcacaatcgtttgacttttcaccttcatcagcacttgatcctgctaattgggaccctaattatagtgatgagtcactactgcaggacaattcactgtcagctgaactaagtagcaacctccactttggagatgcaactggccaagggagtggatctatcaggtcagcaaatttccaaggccacgtcttcgctacatctaaccctgtaccaacaaaccaaagatcaattatttcatgtgtcttctcaaggattgagtgcccattccagtgttcccgtcaactacggtggttacaaccctccaaattatcctccgcaaaatctccgtcctcgtcgtggacaaccaattcttcatcagcgatataaccaggcaacttccagtccgatgcggccaatgggaagccatcacagtgggcagcctgcgtggcctagttttggcatgggcgatggagtgccctggggaggaacaggagggcactcatttacgacaagtgggctatcttcatctcttgcaagaaaggattatgggagcatcttttagtgtgttgtggacaggaggaatggcgttgattcattgcagtcgtaaattatttgtattagcaaaattggagtgcgatgattctggtttattgtttcgatgttgttaccccatccctccaattggtcctttgtgaacaagacagttgatatacaatatatgatcgatgacaatagcattcctttgcagccctttttttatcagtcagaagtttgggtgttcgcctgattgctgactatgttgtagttgccttgtcagctatgtaatatgaaggcgtgatgtgcttaggttcaggtgtgtttggttcagctttctcaactagattggtc

SEQ ID NO: 212228 - DNA, 2516 bp, Zea Mays
agaaatttgatcctgatgatcagcataacattgtccgtatgcttgattatctgtcatttcaaaaccatttgtgtatagcttttgagatgcttggccaaaacctatatgaactgctcaaaaggaatcacttaagaggtctgaaattgaaatatgttcaagccttctcaaaacagatattggatgccatggttgtgatgagagaagctggaatcatccattgtgatttgaagccagaaaatatcctgttagctcccagaagtgaaagttattgattttggatcagcctgcctggagggtaaaacggtttactcgtacatccagagccgctattacaggtctccagaggttctccttggctatccatatactaccgcgatcgacatgtggtcgtttggctgcatagttgctgaactgtttctaggtttgccattgtttcctggagcgtcagaatatgatgtgcttcagcgaatgatgaaaattcttgggggccaaccaccagatgaactgctaagggaagctaaaaacactgcaaggttttttaaacatgttggaagtatctatcctggcaatgaggcacctactggtctttgtagtgcgtacaaaagtttaagtgaagaagatgttgaagtgagagactccaagaagccacagatgggaaagtggtacttcccacacctaaagcttgacaaactcatatgtacctatccttggaacaattccgaactgacagagacagaaaaaatggatcgtttgggattagttgatttcttgaagggtctccttgaatttgatccaaataagagatggtcaccattgcaggctctataccatccattcataacaggcaaatcgttcaccggtccatatgaacctgtacctgagaccacaagaattcctgttgttcgtgctgcagcaattgatcacaatcctggagggggccactggctacattcaggtctttccccgcaggttggaagtgtcaacagatacctaccttcgaataatgcctaccctccaaaggttcctttttcttatgggagtagttatggaagctttggtagccatggtagctataccgccaatgctggttttggtaacagctacggaagcattggtgatgttaatgctatcaatatgtattattcacccttaagttcttctggattaacgcaaattggctctagtccagatgttagactaaggatgcttctcccacatgatagaggaattcgattgagccctggtagtcttgggcctatgtctcttggagccagtccatcacagtttaccccaccaaactaccagatgcaaatcccagctaattcggttgggaagcatggttctggttctcctgcaagtggaggcattcatggttctccgttaggaaaatctgcaggagtgggcccatacaacatgaggaggaacttgccaatgccgccacatgattatgtatctcagcatggacacgggcgttgtggagatggtgtcagtttcagtcattttgatgcctgtgctcgaggacatacaggtcactctcatagtgcagcgggacctagttcttatcattctggttggagaccacaaataggttcaaggagtggtatttccttggaggcctcgtctagtcatgtgctttcacaggctccatcacaatcgtttgacttttcaccttcatcagcacttgatcctgctaattgggaccctaattatagtgatgagtcactactgcaggacaattcactgtcagctgaactaagtagcaacctccactttggagatgcaactggccaagggagtggatctatcaggtcagcaaatttccaaggccacgtcttcgctacatctaaccctgtaccaacaaaccaaagagcagatcaattatttcatgtgtcttctcaaggattgagtgcccattccagtgttcccgtcaactacggtggttacaaccctccaaattatcctccgcaaaatctccgtcctcgtcgtggacaaccaattcttcatcagcgatataaccaggcaacttccagtccgatgcggccaatgggaagccatcacagtgggcagcctgcgtggcctagttttggcatgggcgatggagtgccctggggaggaacaggagggcactcatttacgacaagtgggctatcttcatctcttgcaagaaaggattatgggagcatcttttagtgtgttgtggacaggaggaatggcgttgattcattgcagtcgtaaattatttgtattagcaaaattggagtgcgatgattctggtttattgtttcgatgttgttaccccatccctccaattggtcctttgtgaacaagacagttgatatacaatatatgatcgatgacaatagcattcctttgcagccctttttttatcagtcagaagtttgggtgttcgcctgattgctgactatgttgtagttgccttgtcagctatgtaatatgaaggcgtgatgtgcttaggttcaggtgtgtttggttcagctttctcaactagattggtc

SEQ ID NO: 212229 - DNA, 2501 bp, Zea Mays
agaaatttgatcctgatgatcagcataacattgtccgtatgcttgattatctgtcatttcaaaaccatttgtgtatagcttttgagatgcttggccaaaacctatatgaactgctcaaaaggaatcacttaagaggtctgaaattgaaatatgttcaagccttctcaaaacagatattggatgccatggttgtgatgagagaagctggaatcatccattgtgatttgaagccagaaaatatcctgttagctcccaggcagaagtgaaagttattgattttggatcagcctgcctggagggtaaaacggtttactcgtacatccagagccgctattacaggtctccagaggttctccttggctatccatatactaccgcgatcgacatgtggtcgtttggctgcatagttgctgaactgtttctaggtttgccattgtttcctggagcgtcagaatatgatgtgcttcagcgaatgatgaaaattcttgggggccaaccaccagatgaactgctaagggaagctaaaaacactgcaaggttttttaaacatgttggaagtatctatcctggcaatgaggcacctactggtctttgtagtgcgtacaaaagtttaagtgaagaagatgttgaagtgagagactccaagaagccacagatgggaaagtggtacttcccacacctaaagcttgacaaactcatatgtacctatccttggaacaattccgaactgacaggtcttacattttgattcagagacagaaaaaatggatcgtttgggattagttgatttcttgaagggtctccttgaatttgatccaaataagagatggtcaccattgcaggctctataccatccattcataacaggcaaatcgttcaccggtccatatgaacctgtacctgagaccacaagaattcaattgatcacaatcctggagggggccactggctacattcaggtctttccccgcaggttggaagtgtcaacagatacctaccttcgaataatgcctaccctccaaaggttcctttttcttatgggagtagttatggaagctttggtagccatggtagctataccgccaatgctggttttggtaacagctacggaagcattggtgatgttaatgctatcaatatgtattattcacccttaagttcttctggattaacgcaaattggctctagtccagatgttagactaaggatgcttctcccacatgatagaggaattcgattgagccctggtagtcttgggcctatgtctcttggagccagtccatcacagtttaccccaccaaactaccagatgcaaatcccagctaattcggttgggaagcatggttctggttctcctgcaagtggaggcattcatggttctccgttaggaaaatctgcaggagtgggcccatacaacatgaggaggaacttgccaatgccgccacatgattatgtatctcagcatggacacgggcgttgtggagatggtgtcagtttcagtcattttgatgcctgtgctcgaggacatacaggtcactctcatagtgcagcgggacctagttcttatcattctggttggagaccacaaataggttcaaggagtggtatttccttggaggcctcgtctagtcatgtgctttcacaggctccatcacaatcgtttgacttttcaccttcatcagcacttgatcctgctaattgggaccctaattataggacaattcactgtcagctgaactaagtagcaacctccactttggagatgcaactggccaagggagtggatctatcaggtcagcaaatttccaaggccacgtcttcgctacatctaaccctgtaccaacaaaccaaagagcagatcaattatttcatgtgtcttctcaaggattgagtgcccattccagtgttcccgtcaactacggtggttacaaccctccaaattatcctccgcaaaatctccgtcctcgtcgtggacaaccaattcttcatcagcgatataaccaggcaacttccagtccgatgcggccaatgggaagccatcacagtgggcagcctgcgtggcctagttttggcatgggcgatggagtgccctggggaggaacaggagggcactcatttacgacaagtgggctatcttcatctcttgcaagaaaggattatgggagcatcttttagtgtgttgtggacaggaggaatggcgttgattcattgcagtcgtaaattatttgtattagcaaaattggagtgcgatgattctggtttattgtttcgatgttgttaccccatccctccaattggtcctttgtgaacaagacagttgatatacaatatatgatcgatgacaatagcattcctttgcagccctttttttatcagtcagaagtttgggtgttcgcctgattgctgactatgttgtagttgccttgtcagctatgtaatatgaaggcgtgatgtgcttaggttcaggtgtgtttggttcagctttctcaactagattggtc

SEQ ID NO: 212230 - DNA, 2620 bp, Zea Mays
atttgatcctgatgatcagcataacattgtccgtatgcttgattatctgtcatttcaaaaccatttgtgtatagcttttgagatgcttggccaaaacctatatgaactgctcaaaaggaatcacttaagaggtctgaaattgaaatatgttcaagccttctcaaaacagatattggatgccatggttgtgatgagagaagctggaatcatccattgtgatttgaagccagaaaatatcctgttagctcccagtgtcacaacagctgcagaagtgaaagttattgattttggatcagcctgcctggagggtaaaacggtttactcgtacatccaggtctccagaggttctccttggctatccatatactaccgcgatcgacatgtggtcgtttggctgcatagttgctgaactgtttctaggtttgccattgtttcctggagcgtcagaatatgatgtgcttcagcgaatgatgaaaattcttgggggccaaccaccagatgaactgctaagggaagctaaaaacactgcaaggttttttaaacatgttggaagtatctatcctggcaatgaggcacctactggtctttgtagtgcgtacaaaagtttaagtgaagaagatgttgaagtgagagactccaagaagccacagatgggaaagtggtacttcccacacctaaagcttgacaaactcatatgtacctatccttggaacaattccgaactgacaggtcttacattttgattcagagacagaaaaaatggatcgtttgggattagttgatttcttgaagggtctccttgaatttgatccaaataagagatggtcaccattgcaggctctataccatccattcataacaggcaaatcgttcaccggtccatatgaacctgtacctgagaccacaagaattcctgttgttcgtgctgcagcaattgatcacaatcctggagggggccactggctacattcaggtctttccccgcaggtgatagatgtcctctcattttatgtttctcagttgagttttagaaacagtaactataccgaatctttcttaaaccattatgccgtatacttgaaacttgtataggttggaagtgtcaacagatacctaccttcgaataatgcctaccctccaaaggttcctttttcttatgggagtagttatggaagctttggtagccatggtagctataccgccaatgctggttttggtaacagctacggaagcattggtgatgttaatgctatcaatatgtattattcacccttaagttcttctggattaacgcaaattggctctagtccagatgttagactaaggatgcttctcccacatgatagaggaattcgattgagccctggtagtcttgggcctatgtctcttggagccagtccatcacagtttaccccaccaaactaccagatgcaaatcccagctaattcggttgggaagcatggttctggttctcctgcaagtggaggcattcatggttctccgttaggaaaatctgcaggagtgggcccatacaacatgaggaggaacttgccaatgccgccacatgattatgtatctcagcatggacacgggcgttgtggagatggtgtcagtttcagtcattttgatgcctgtgctcgaggacatacaggtcactctcatagtgcagcgggacctagttcttatcattctggttggagaccacaaataggttcaaggagtggtatttccttggaggcctcgtctagtcatgtgctttcacaggctccatcacaatcgtttgacttttcaccttcatcagcacttgatcctgctaattgggaccctaattataggacaattcactgtcagctgaactaagtagcaacctccactttggagatgcaactggccaagggagtggatctatcaggtcagcaaatttccaaggccacgtcttcgctacatctaaccctgtaccaacaaaccaaagagcagatcaattatttcatgtgtcttctcaaggattgagtgcccattccagtgttcccgtcaactacggtggttacaaccctccaaattatcctccgcaaaatctccgtcctcgtcgtggacaaccaattcttcatcagcgatataaccaggcaacttccagtccgatgcggccaatgggaagccatcacagtgggcagcctgcgtggcctagttttggcatgggcgatggagtgccctggggaggaacaggagggcactcatttacgacaagtgggctatcttcatctcttgcaagaaaggattatgggagcatcttttagtgtgttgtggacaggaggaatggcgttgattcattgcagtcgtaaattatttgtattagcaaaattggagtgcgatgattctggtttattgtttcgatgttgttaccccatccctccaattggtcctttgtgaacaagacagttgatatacaatatatgatcgatgacaatagcattcctttgcagccctttttttatcagtcagaagtttgggtgttcgcctgattgctgactatgttgtagttgccttgtcagctatgtaatatgaaggcgtgatgtgcttaggttcaggtgtgtttggttcagctttctcaactagattggtc

SEQ ID NO: 212231 - DNA, 1624 bp, Zea Mays
tcctgatgatcagcataacattgtccgtatgcttgattatctgtcatttcaaaaccatttgtgtatagcttttgagatgcttggccaaaacctatatgaactgctcaaaaggaatcacttaagaggtctgaaattgaaatatgttcaagccttctcaaaacagatattggatgccatggttgtgatgagagaagctggaatcatccattgtgatttgaagccagaaaatatcctgttagctcccagtgtcacaacagctgcagaagtgaaagttattgattttggatcagcctgcctggagggtaaaacggtttactcgtacatccagagccgctattacaggtctccagaggttctccttggctatccatatactaccgcgatcgacatgtggtcgtttggctgcatagttgctgaactgtttctaggtttgccattgtttcctggagcgtcagaatatgatgtgcttcagcgaatgatgaaaattcttgggggccaaccaccagatgaactgctaagggaagctaaaaacactgcaaggttttttaaacatgttggaagtatctatcctggcaatgaggcacctactggtctttgtagtgcgtacaaaagtttaagtgaagaagatgttgaagtgagagactccaagaagccacagatgggaaagtggtacttcccacacctaaagcttgacaaactcatatgtacctatccttggaacaattccgaactgacagagacagaaaaaatggatcgtttgggattagttgatttcttgaagggtctccttgaatttgatccaaataagagatggtcaccattgcaggctctataccatccattcataacaggcaaatcgttcaccggtccatatgaacctgtacctgagaccacaagaattcctgttgttcgtgctgcagcaattgatcacaatcctggagggggccactggctacattcaggtctttccccgcagagcagatcaattatttcatgtgtcttctcaaggattgagtgcccattccagtgttcccgtcaactacggtggttacaaccctccaaattatcctccgcaaaatctccgtcctcgtcgtggacaaccaattcttcatcagcgatataaccaggcaacttccagtccgatgcggccaatgggaagccatcacagtgggcagcctgcgtggcctagttttggcatgggcgatggagtgccctggggaggaacaggagggcactcatttacgacaagtgggctatcttcatctcttgcaagaaaggattatgggagcatcttttagtgtgttgtggacaggaggaatggcgttgattcattgcagtcgtaaattatttgtattagcaaaattggagtgcgatgattctggtttattgtttcgatgttgttaccccatccctccaattggtcctttgtgaacaagacagttgatatacaatatatgatcgatgacaatagcattcctttgcagccctttttttatcagtcagaagtttgggtgttcgcctgattgctgactatgttgtagttgccttgtcagctatgtaatatgaaggcgtgatgtgcttaggttcaggtgtgtttggttcagctttctcaactagattggtc

SEQ ID NO: 212232 - DNA, 2526 bp, Zea Mays
tcctgatgatcagcataacattgtccgtatgcttgattatctgtcatttcaaaaccatttgtgtatagcttttgagatgcttggccaaaacctatatgaactgctcaaaaggaatcacttaagaggtctgaaattgaaatatgttcaagccttctcaaaacagatattggatgccatggttgtgatgagagaagctggaatcatccattgtgatttgaagccagaaaatatcctgttagctcccagtgtcacaacagctgcagaagtgaaagttattgattttggatcagcctgcctggagggtaaaacggtttactcgtacatccagagccgctattacaggtctccagaggttctccttggctatccatatactaccgcgatcgacatgtggtcgtttggctgcatagttgctgaactgtttctaggtttgccattgtttcctggagcgtcagaatatgatgtgcttcagcgaatgatgaaaattcttgggggccaaccaccagatgaactgctaagggaagctaaaaacactgcaaggttttttaaacatgttggaagtatctatcctggcaatgaggcacctactggtctttgtagtgcgtacaaaagtttaagtgaagaagatgttgaagtgcagagagactccaagaagccacagatgggaaagtggtacttcccacacctaaagcttgacaaactcatatgtacctatccttggaacaattccgaactgacagagacagaaaaaatggatcgtttgggattagttgatttcttgaagggtctccttgaatttgatccaaataagagatggtcaccattgcaggctctataccatccattcataacaggcaaatcgttcaccggtccatatgaacctgtacctgagaccacaagaattcctgttgttcgtgctgcagcaattgatcacaatcctggagggggccactggctacattcaggtctttccccgcaggttggaagtgtcaacagatacctaccttcgaataatgcctaccctccaaaggttcctttttcttatgggagtagttatggaagctttggtagccatggtagctataccgccaatgctggttttggtaacagctacggaagcattggtgatgttaatgctatcaatatgtattattcacccttaagttcttctggattaacgcaaattggctctagtccagatgttagactaaggatgcttctcccacatgatagaggaattcgattgagccctggtagtcttgggcctatgtctcttggagccagtccatcacagtttaccccaccaaactaccagatgcaaatcccagctaattcggttgggaagcatggttctggttctcctgcaagtggaggcattcatggttctccgttaggaaaatctgcaggagtgggcccatacaacatgaggaggaacttgccaatgccgccacatgattatgtatctcagcatggacacgggcgttgtggagatggtgtcagtttcagtcattttgatgcctgtgctcgaggacatacaggtcactctcatagtgcagcgggacctagttcttatcattctggttggagaccacaaataggttcaaggagtggtatttccttggaggcctcgtctagtcatgtgctttcacaggctccatcacaatcgtttgacttttcaccttcatcagcacttgatcctgctaattgggaccctaattatagtgatgagtcactactgcaggacaattcactgtcagctgaactaagtagcaacctccactttggagatgcaactggccaagggagtggatctatcaggtcagcaaatttccaaggccacgtcttcgctacatctaaccctgtaccaacaaaccaaagagcagatcaattatttcatgtgtcttctcaaggattgagtgcccattccagtgttcccgtcaactacggtggttacaaccctccaaattatcctccgcaaaatctccgtcctcgtcgtggacaaccaattcttcatcagcgatataaccaggcaacttccagtccgatgcggccaatgggaagccatcacagtgggcagcctgcgtggcctagttttggcatgggcgatggagtgccctggggaggaacaggagggcactcatttacgacaagtgggctatcttcatctcttgcaagaaaggattatgggagcatcttttagtgtgttgtggacaggaggaatggcgttgattcattgcagtcgtaaattatttgtattagcaaaattggagtgcgatgattctggtttattgtttcgatgttgttaccccatccctccaattggtcctttgtgaacaagacagttgatatacaatatatgatcgatgacaatagcattcctttgcagccctttttttatcagtcagaagtttgggtgttcgcctgattgctgactatgttgtagttgccttgtcagctatgtaatatgaaggcgtgatgtgcttaggttcaggtgtgtttggttcagctttctcaactagattggtc

SEQ ID NO: 212233 - DNA, 2437 bp, Zea Mays
gatcagcataacattgtccgtatgcttgattatctgtcatttcaaaaccatttgtgtatagcttttgagatgcttggccaaaacctatatgaactgctcaaaaggaatcacttaagaggtctgaaattgaaatatgttcaagccttctcaaaacagatattggatgccatggttgtgatgagagaagctggaatcatccattgtgatttgaagccagaaaatatcctgttagctcccagtgtcacaacagctgcagaagtgaaagttattgattttggatcagcctgcctggagggtaaaacggtttactcgtacatccagagccgctattacaggtctccagaggttctccttggctatccatatactaccgcgatcgacatgtggtcgtttggctgcatagttgctgaactgtttctaggtttgccattgtttcctggagcgtcagaatatgatgtgcttcagcgaatgatgaaaattcttgggggccaaccaccagatgaactgctaagggaagctaaaaacactgcaaggttttttaaacatgttggaagtatctatcctggcaatgaggcacctactggtctttgtagtgcgtacaaaagtttaagtgaagaagatgttgaagtgagagactccaagaagccacagatgggaaagtggtacttcccacacctaaagcttgacaaactcatatgtacctatccttggaacaattccgaactgacagagacagaaaaaatggatcgtttgggattagttgatttcttgaagggtctccttgaatttgatccaaataagagatggtcaccattgcaggctctataccatccattcataacaggcaaatcgttcaccggtccatatgaacctgtacctgagaccacaagaattcctgttgttcgtgctgcagcaattgatcacaatcctggagggggccactggctacattcaggtctttccccgcaggttggaagtgtcaacagatacctaccttcgaataatgcctaccctccaaaggttcctttttcttatgggagtagttatggaagctttggtagccatggtagctataccgccaatgctggttttggtaacagctacggaagcattggtgatgttaatgctatcaatatgtattattcacccttaagttcttctggattaacgcaaattggctctagtccagatgttagactaaggatgcttctcccacatgatagaggaattcgattgagccctggtagtcttgggcctatgtctcttggagccagtccatcacagtttaccccaccaaactaccagatgcaaatcccagctaattcggttgggaagcatggttctggttctcctgcaagtggaggcattcatggttctccgttaggaaaatctgcaggagtgggcccatacaacatgaggaggaacttgccaatgccgccacatgattatgtatctcagcatggacacgggcgttgtggagatggtgtcagtttcagtcattttgatgcctgtgctcgaggacatacaggtcactctcatagtgcagcgggacctagttcttatcattctggttggagaccacaaataggttcaaggagtggtatttccttggaggcctcgtctagtcatgtgctttcacaggctccatcacaatcgtttgacttttcaccttcatcagcacttgatcctgctaattgggaccctaattataggacaattcactgtcagctgaactaagtagcaacctccactttggagatgcaactggccaagggagtggatctatcagagcagatcaattatttcatgtgtcttctcaaggattgagtgcccattccagtgttcccgtcaactacggtggttacaaccctccaaattatcctccgcaaaatctccgtcctcgtcgtggacaaccaattcttcatcagcgatataaccaggcaacttccagtccgatgcggccaatgggaagccatcacagtgggcagcctgcgtggcctagttttggcatgggcgatggagtgccctggggaggaacaggagggcactcatttacgacaagtgggctatcttcatctcttgcaagaaaggattatgggagcatcttttagtgtgttgtggacaggaggaatggcgttgattcattgcagtcgtaaattatttgtattagcaaaattggagtgcgatgattctggtttattgtttcgatgttgttaccccatccctccaattggtcctttgtgaacaagacagttgatatacaatatatgatcgatgacaatagcattcctttgcagccctttttttatcagtcagaagtttgggtgttcgcctgattgctgactatgttgtagttgccttgtcagctatgtaatatgaaggcgtgatgtgcttaggttcaggtgtgtttggttcagctttctcaactagattggtc

SEQ ID NO: 212234 - DNA, 2150 bp, Zea Mays
ataacattgtccgtatgcttgattatctgtcatttcaaaaccatttgtgtatagcttttgagatgcttggccaaaacctatatgaactgctcaaaaggaatcacttaagaggtctgaaattgaaatatgttcaagccttctcaaaacaggtgaaatatctgtatcatatgaatgcccattatctacttttatattaccaaattgtgtttgtttatgcttttagatattggatgccatggttgtgatgagagaagctggaatcatccattgtgatttgaagccagaaaatatcctgttagctcccagtgtcacaacagctgcagaagtgaaagttattgattttggatcagcctgcctggagggtaaaacggtttactcgtacatccagagccgctattacaggtctccagaggttctccttggctatccatatactaccgcgatcgacatgtggtcgtttggctgcatagttgctgaactgtttctaggtttgccattgtttcctggagcgtcagaatatgatgtgcttcagcgaatgatgaaaattcttgggggccaaccaccagatgaactgctaagggaagctaaaaacactgcaaggttttttaaacatgttggaagtatctatcctggcaatgaggcacctactggtctttgtagtgcgtacaaaagtttaagtgaagaagatgttgaagtgagagactccaagaagccacagatgggaaagtggtacttcccacacctaaagcttgacaaactcatatgtacctatccttggaacaattccgaactgacagaaaaaatggatcgtttgggattagttgatttcttgaagggtctccttgaatttgatccaaataagagatggtcaccattgcaggctctataccatccattcataacaggcaaatcgttcaccggtccatatgaacctgtacctgagaccacaagaattcctgttgttcgtgctgcagcaattgatcacaatcctggagggggccactggctacattcaggtctttccccgcaggagtgggcccatacaacatgaggaggaacttgccaatgccgccacatgattatgtatctcagcatggacacgggcgttgtggagatggtgtcagtttcagtcattttgatgcctgtgctcgaggacatacaggtcactctcatagtgcagcgggacctagttcttatcattctggttggagaccacaaataggttcaaggagtggtatttccttggaggcctcgtctagtcatgtgctttcacaggctccatcacaatcgtttgacttttcaccttcatcagcacttgatcctgctaattgggaccctaattatagtgatgagtcactactgcaggacaattcactgtcagctgaactaagtagcaacctccactttggagatgcaactggccaagggagtggatctatcaggtcagcaaatttccaaggccacgtcttcgctacatctaaccctgtaccaacaaaccaaagagcagatcaattatttcatgtgtcttctcaaggattgagtgcccattccagtgttcccgtcaactacggtggttacaaccctccaaattatcctccgcaaaatctccgtcctcgtcgtggacaaccaattcttcatcagcgatataaccaggcaacttccagtccgatgcggccaatgggaagccatcacagtgggcagcctgcgtggcctagttttggcatgggcgatggagtgccctggggaggaacaggagggcactcatttacgacaagtgggctatcttcatctcttgcaagaaaggattatgggagcatcttttagtgtgttgtggacaggaggaatggcgttgattcattgcagtcgtaaattatttgtattagcaaaattggagtgcgatgattctggtttattgtttcgatgttgttaccccatccctccaattggtcctttgtgaacaagacagttgatatacaatatatgatcgatgacaatagcattcctttgcagccctttttttatcagtcagaagtttgggtgttcgcctgattgctgactatgttgtagttgccttgtcagctatgtaatatgaaggcgtgatgtgcttaggttcaggtgtgtttggttcagctttctcaactagattggtc

SEQ ID NO: 212235 - DNA, 753 bp, Zea Mays
gtccgtatgcttgattatctgtcatttcaaaaccatttgtgtatagcttttgagatgcttggccaaaacctatatgaactgctcaaaaggaatcacttaagaggtctgaaattgaaatatgttcaagccttctcaaaacagatattggatgccatggttgtgatgagagaagctggaatcatccattgtgatttgaagccagaaaatatcctgttagctcccagtgtcacaacagctgcagaagtgaaagttattgattttggatcagcctgcctggagggtaaaacggtttactcgtacatccagagccgctattacaggtctccagaggttctccttggctatccatatactaccgcgatcgacatgtggtcgtttggctgcatagttgctgaactgtttctaggtttgccattgtttcctggagcgtcagaatatgatgtgcttcagcgaatgatgaaaattcttgggggccaaccaccagatgaactgctaagggaagctaaaaacactgcaaggttttttaaacatgttggaagtatctatcctggcaatgaggcacctactggtctttgtagtgcgtacaaaagtttaagtgaagaagatgttgaagtgagagactccaagaagccacagatgggaaagtggtacttcccacacctaaagcttgacaaactcatatgtacctatccttggaacaattccgaactgacagcgattcacgtcggtatccagaccccttgttcgacattt

SEQ ID NO: 212236 - DNA, 2040 bp, Zea Mays
atttgtgtatagcttttgagatgcttggccaaaacctatatgaactgctcaaaaggaatcacttaagaggtctgaaattgaaatatgttcaagccttctcaaaacagatattggatgccatggttgtgatgagagaagctggaatcatccattgtgatttgaagccagaaaatatcctgttagctcccagtgtcacaacagctgcagaagtgaaagttattgattttggatcagcctgcctggagggtaaaacggtttactcgtacatccagagccgctattacaggtctccagaggttctccttggctatccatatactaccgcgatcgacatgtggtcgtttggctgcatagttgctgaactgtttctaggtttgccattgtttcctggagcgtcagaatatgatgtgcttcagcgaatgatgaaaattcttgggggccaaccaccagatgaactgctaagggaagctaaaaacactgcaaggttttttaaacatgttggaagtatctatcctggcaatgaggcacctactggtctttgtagtgcgtacaaaagtttaagtgaagaagatgttgaagtgagagactccaagaagccacagatgggaaagtggtacttcccacacctaaagcttgacaaactcatatgtacctatccttggaacaattccgaactgacagagacagaaaaaatggatcgtttgggattagttgatttcttgaagggtctccttgaatttgatccaaataagagatggtcaccattgcaggctctataccatccattcataacaggcaaatcgttcaccggtccatatgaacctgtacctgagaccacaagaattcctgttgttcgtgctgcagcaattgatcacaatcctggagggggccactggctacattcaggtctttccccgcaggagtgggcccatacaacatgaggaggaacttgccaatgccgccacatgattatgtatctcagcatggacacgggcgttgtggagatggtgtcagtttcagtcattttgatgcctgtgctcgaggacatacaggtcactctcatagtgcagcgggacctagttcttatcattctggttggagaccacaaataggttcaaggagtggtatttccttggaggcctcgtctagtcatgtgctttcacaggctccatcacaatcgtttgacttttcaccttcatcagcacttgatcctgctaattgggaccctaattatagtgatgagtcactactgcaggacaattcactgtcagctgaactaagtagcaacctccactttggagatgcaactggccaagggagtggatctatcaggtcagcaaatttccaaggccacgtcttcgctacatctaaccctgtaccaacaaaccaaagagcagatcaattatttcatgtgtcttctcaaggattgagtgcccattccagtgttcccgtcaactacggtggttacaaccctccaaattatcctccgcaaaatctccgtcctcgtcgtggacaaccaattcttcatcagcgatataaccaggcaacttccagtccgatgcggccaatgggaagccatcacagtgggcagcctgcgtggcctagttttggcatgggcgatggagtgccctggggaggaacaggagggcactcatttacgacaagtgggctatcttcatctcttgcaagaaaggattatgggagcatcttttagtgtgttgtggacaggaggaatggcgttgattcattgcagtcgtaaattatttgtattagcaaaattggagtgcgatgattctggtttattgtttcgatgttgttaccccatccctccaattggtcctttgtgaacaagacagttgatatacaatatatgatcgatgacaatagcattcctttgcagccctttttttatcagtcagaagtttgggtgttcgcctgattgctgactatgttgtagttgccttgtcagctatgtaatatgaaggcgtgatgtgcttaggttcaggtgtgtttggttcagctttctcaactagattggtc

SEQ ID NO: 212237 - DNA, 2638 bp, Zea Mays
ctcaaactctgctcaagaaatctggagggctcttctcttctctgcctgtccgccgcaccagctccagcctgcagccagccggcggagaaaagcaggggattcgactggagtcaccctcggagcttgcatctggcagtccagagcacagcaaaagcaaagcacccgattcgattcctaggcaccaggcttttccatccatgtcttccttgctcgacctttcctcatctcctttccatcttcccctggctcctctcgacctttccggtggttggaggaccagaagctgagctagccgcccaccttccggacgctgatgtgattgacccagtcggctggttaggaatttagcatcgcgatacctccagcggtccagcccagcttccagcacggcagtcggttgagtcaccgtccgccactccgttagcagctgccggtcgatcttgccgcgcaagcagcagaaaggccggcccagcggcgctttcttcagccatggcgtgcgcggcggcgcacatgttcgtgtacaacgccactctctgcgcctgcgaccctgggtactacctcttcaccaattccaccggcggcggcaacgcaagcagcgccagtaccagctgcgtgtcattgccccgcagcggcgacgggttcggcgactggcaggtcggatccgtaggcgcgtcccggaaccagagcttctacttcctgaccccggtcctctctctcgacgtcgtccgccgcctcacccagtcccaggccgtcatcctctgggtcgcgctcctcacgctgctctcctggctcgccttctgcgccgccgccaggttcgccggccaggaccccgagcgccacaagaagctcttcggcgcccggttctgggtcagccgcctcgactgcatcttcgacaacaaccactatgcgaatgatcagaaagtactgaggaaaagaaaaacagagctgggcggcacgttctcagtggctaccttgatactattccttggattagtcatagttctgctgtatcaagccatcaacaggcgtaacgcccaagtacatcgagtgaaaccagctaatgctccggatttgctagatttcgtgaatgaccttgagtttcacataaccactgtctcaagcatgtcttgcgcccaagtagtggcaccttctacaatagcaatgggaactcctgggtttatggacttcagggtactgccactgtcaacactcttgacctacagttgccagaacacgagtgagggcccatcaattacactaaagtgcaatggctgccgaatccctccaagagaccactatgtatcctggcagtttgttgacctgccaaggcaaccggctgccgctgttggcttccaatttaacttgactgcgagggaacatggagattataaagatatgagctttgtgagtggtactttaagctctgacaactatgatgatgccaagctgaaaacattcagagggccggattccaatgtgctcaaaattcaattgtttcctcagatatacaaccaccttcatggcttgaagctcttgcagccacttgttcaggacttcactcaaggttctatcttatcagatctgagcagcttgaatgcttccttgcacaaccctagagatggagttataaatactacactcttcataagttatctttctgactatattgtggagatcagcaatgagaatgtgcttggcccagtcagtattcttgcgagtattggtggcctgtatgccttcagtgttgcattttttctctgtctcatggctcaatgtgaaggcagaataaagaagcttcgtgacgaggataccagaatgctgaaaatcctgagcaaacaacgcgctcaacgaaattggaacaaggttcggaagtttgtcatgtacacatggggtccaagcaacttggatccaaccgatagaagtggaaagtggcctgaaggctcggtgatggattccatccatggatccttccacaagataagaaaaccaactagaagaggaacctctaacgggagcaaacctaaggagcccgctgacatggcagttgaaattgaaagagttggggagacacagcagccaagcagttctaggtagccttggtggatggaggttcaggacatgctgcagtacctctgaccatgatttgcaatacgaccatactcccggagtggagctgtctatatcaagagtgtaggtagaggcaagtcagcaagtgactaaaactgtacaggatcagtttgaagagtcgtagcaacagggttcaagggcgtgttgaatggccagttgatgagcagcaagtaatctgcttgatgagttggggagttccgttgctggtttaagctggagctggctgcttgtgaagtccggtcaggtgtcagtcttgttattcttttttatttcatttcatgagaagggatagatattatttccttgatttgtacatttcacctcctttgatgccaaattgtaatttggaagaaatcaggaagaagcaaggaaagaccgctattattcgtaggaaggtttgctacatgagtacagggcacgcatagcataggatatgagtacaggggctgcacaggatctgtttggtttggttggctgtataagcctattcaaagtgcaaatttcatttgag

SEQ ID NO: 212238 - DNA, 1247 bp, Zea Mays
ctatactctcgtgggtgtttacgaaaatgtggctgacttaagggcgtgactaccattttcgcaagaattgagcccgacagcaaaaagaaaggtgacgtttctctttcttggttccggcgccccaccgggagagtgagctgctgcctgcgcaactcgagcgccgcttgtcgcgagcaccgcggcctcgatccgtcaagctacatgtctggacagcaggaccacgctagtaaaagctctagctcaagcatcagcagcagtactcaagagagcgaggaggaagcacctgtccgaagcgtcaccattggtagcctccttgcccaagcaaatagcaccagtggacatagtcttgggaagcgcctgtcccatttggggtcaatcccgtatactccccgagttaatggaaaaatccccaatgttggtaatgcaacactggaccacgaacgattgctggaaaggttgggcacttatggtctagctgaatttcagatagagggggatgggaattgtcagttccgagctttggctgatcagatatatcacaatcctgactatcataagcatgtgagaaaagctgtcatgaaacagctgaaggaattcagaaaacaatatgaaagttacgtaccgatggaatataaggtgtacttgaagaaaatgaaaagatctggggaatggggagatcatctgaccttacaagcagctgcagatcggtttggtgccaaaatttgtttgctgacatcatttaaagacacctgtttaattgagatagtccctagggatctaactcccacaaaagagctttggctaagcttctggtgtgaagtacactacaattccttgtatggaatcgacgatctcctgacccgcaagacgaagaagaagcactggctgttctaggagggttctgaaggatccaaattctttcagcagctcctgctctgtccagccagcgcagcctctgtcttagtacttactagttggccaacactgtatcatatcctaagttgagtctaggctttacgcttttatgtacagtcgatctagatcttgtaaaattccctcaaggagcaacaggaactgtacaactcttagatccatgagattttggtgatctctcctccatgggaatgatagtgcttgggtgtatgtacattataaaagctaccaggggcattttgacgtgggcgtttggatgccattctccataatttttattctgaattcgtagagtggccatttccaggcatggg

SEQ ID NO: 212239 - DNA, 1198 bp, Zea Mays
caagaattgagcccgacagcaaaaagaaaggtgacgtttctctttcttggttccggcgccccaccgggagagtgagctgctgcctgcgcaactcgagcgccgcttgtcgcgagcaccgcggcctcgatccgtcaagctacatgtctggacagcaggaccacgctagtaaaagctctagctcaagcatcagcagcagtactcaagagagcgaggaggaagcacctgtccgaagcgtcaccattggtagcctccttgcccaagcaaatagcaccagtggacatagtcttgggaagcgcctgtcccatttggggtcaatcccgtatactccccgagttaatggaaaaatccccaatgttggtaatgcaacactggaccacgaacgattgctggaaaggttgggcacttatggtctagctgaatttcagatagagggggatgggaattgtcaggtttatttacaattccgagctttggctgatcagatatatcacaatcctgactatcataagcatgtgagaaaagctgtcatgaaacagctgaaggaattcagaaaacaatatgaaagttacgtaccgatggaatataaggtgtacttgaagaaaatgaaaagatctggggaatggggagatcatctgaccttacaagcagctgcagatcggtttggtgccaaaatttgtttgctgacatcatttaaagacacctgtttaattgagatagtccctagggatctaactcccacaaaagagctttggctaagcttctggtgtgaagtacactacaattccttgtatggaatcgacgatctcctgacccgcaagacgaagaagaagcactggctgttctaggagggttctgaaggatccaaattctttcagcagctcctgctctgtccagccagcgcagcctctgtcttagtacttactagttggccaacactgtatcatatcctaagttgagtctaggctttacgcttttatgtacagtcgatctagatcttgtaaaattccctcaaggagcaacaggaactgtacaactcttagatccatgagattttggtgatctctcctccatgggaatgatagtgcttgggtgtatgtacattataaaagctaccaggggcattttgacgtgggcgtttggatgccattctccataatttttattctgaattcgtagagtggccatttccaggcatggg

SEQ ID NO: 212240 - DNA, 1812 bp, Zea Mays
attgagcccgacagcaaaaagaaaggtgacgtttctctttcttggttccggcgccccaccgggagagtgagctgctgcctgcgcaactcgagcgccgcttgtcgcgagcaccgcggcctcgatccgtcaagctaaaagcatgtctggacagcaggaccacgctagtaaaagctctagctcaagcatcagcagcagtactcaagagagcgaggaggaagcacctgtccgaagcgtcaccattggtagcctccttgcccaagcaaatagcaccagtggacatagtcttgggaagcgcctgtcccatttggggtcaatcccgtatactccccgagttaatggaaaaatccccaatgttggtaatgcaacactggaccacgaacgattgctggaaaggttgggcacttatggtctagctgaatttcagatagagggggatgggaattgtcagttccgagctttggctgatcagatatatcacaatcctgactatcataagcatgtgagaaaagctgtcatgaaacagctgaaggaattcagaaaacaatatgaaagttacgtaccgatggaatataaggtgtacttgaagaaaatgaaaagatctggggaatggggagatcatctgaccttacaagcagctgcagatcgggtaaaatagcactttcagtttcatgatggtttattggtttctttgagtaaattaaatgcatgtttttatacataaattaccttaatcttttcctaattcttattataccttaaccaacacgacccttttcccctatgaatccaactcttagtcatgatactaaaaaaagcccggtggatatgaagtgtgtactgtcaatttgtttaggaatccttgtcctggaaaattttgtctgttataattcgttgaattatgaaggttaaacttcaaacatgagccattggttgattagtcaacttttcatttgcatttatgttcctgtagagatatgttgttctgatcaattatgccattgctgcatcagtattatctaatgtctgtatactgtaaattaactaacaccttatgtatcttaaatcctcacagtttggtgccaaaatttgtttgctgacatcatttaaagacacctgtttaattgagatagtccctagggatctaactcccacaaaaggtaagggcttggctaccctgctgctcagttatcagatgcttggttccatatcgaacttctctggcaccagcattgcagcatctattctgctcttgagacaattctgcattcaaccattgcaagatgcaaaccacaatagtatatttaggttctgcaggaatcattaccacctaatcccagtgatggtacacatttttgcagagctttggctaagcttctggtgtgaagtacactacaattccttgtatggaatcgacgatctcctgacccgcaagacgaagaagaagcactggctgttctaggagggttctgaaggatccaaattctttcagcagctcctgctctgtccagccagcgcagcctctgtcttagtacttactagttggccaacactgtatcatatcctaagttgagtctaggctttacgcttttatgtacagtcgatctagatcttgtaaaattccctcaaggagcaacaggaactgtacaactcttagatccatgagattttggtgatctctcctccatgggaatgatagtgcttgggtgtatgtacattataaaagctaccaggggcattttgacgtgggcgtttggatgccattctccataatttttattctgaattcgtagagtggccatttccaggcatggg

SEQ ID NO: 212241 - DNA, 1000 bp, Zea Mays
attgagcccgacagcaaaaagaaaggtgacgtttctctttcttggttccggcgccccaccgggagagtgagctgctgcctgcgcaactcgagcgccgcttgtcgcgagcaccgcggcctcgatccgtcaagctatatactccccgagttaatggaaaaatccccaatgttggtaatgcaacactggaccacgaacgattgctggaaaggttgggcacttatggtctagctgaatttcagatagagggggatgggaattgtcagttccgagctttggctgatcagatatatcacaatcctgactatcataagcatgtgagaaaagctgtcatgaaacagctgaaggaattcagaaaacaatatgaaagttacgtaccgatggaatataaggtgtacttgaagaaaatgaaaagatctggggaatggggagatcatctgaccttacaagcagctgcagatcggtttggtgccaaaatttgtttgctgacatcatttaaagacacctgtttaattgagatagtccctagggatctaactcccacaaaagagctttggctaagcttctggtgtgaagtacactacaattccttgtatggaatcgacgatctcctgacccgcaagacgaagaagaagcactggctgttctaggagggttctgaaggatccaaattctttcagcagctcctgctctgtccagccagcgcagcctctgtcttagtacttactagttggccaacactgtatcatatcctaagttgagtctaggctttacgcttttatgtacagtcgatctagatcttgtaaaattccctcaaggagcaacaggaactgtacaactcttagatccatgagattttggtgatctctcctccatgggaatgatagtgcttgggtgtatgtacattataaaagctaccaggggcattttgacgtgggcgtttggatgccattctccataatttttattctgaattcgtagagtggccatttccaggcatggg

SEQ ID NO: 212242 - DNA, 804 bp, Zea Mays
cgacgacatgttcgctgcggctcaggatgcggacaaggaagctgccaatgcacacattcgtgtccagttccgagctttggctgatcagatatatcacaatcctgactatcataagcatgtgagaaaagctgtcatgaaacagctgaaggaattcagaaaacaatatgaaagttacgtaccgatggaatataaggtgtacttgaagaaaatgaaaagatctggggaatggggagatcatctgaccttacaagcagctgcagatcggtttggtgccaaaatttgtttgctgacatcatttaaagacacctgtttaattgagatagtccctagggatctaactcccacaaaagagctttggctaagcttctggtgtgaagtacactacaattccttgtatggaatcgacgatctcctgacccgcaagacgaagaagaagcactggctgttctaggagggttctgaaggatccaaattctttcagcagctcctgctctgtccagccagcgcagcctctgtcttagtacttactagttggccaacactgtatcatatcctaagttgagtctaggctttacgcttttatgtacagtcgatctagatcttgtaaaattccctcaaggagcaacaggaactgtacaactcttagatccatgagattttggtgatctctcctccatgggaatgatagtgcttgggtgtatgtacattataaaagctaccaggggcattttgacgtgggcgtttggatgccattctccataatttttattctgaattcgtagagtggccatttccaggcatggg

SEQ ID NO: 212243 - DNA, 791 bp, Zea Mays
caggaatacatatcagcttggtcgggttcaggacgatacatacacaagtactatttccgagctttggctgatcagatatatcacaatcctgactatcataagcatgtgagaaaagctgtcatgaaacagctgaaggaattcagaaaacaatatgaaagttacgtaccgatggaatataaggtgtacttgaagaaaatgaaaagatctggggaatggggagatcatctgaccttacaagcagctgcagatcggtttggtgccaaaatttgtttgctgacatcatttaaagacacctgtttaattgagatagtccctagggatctaactcccacaaaagagctttggctaagcttctggtgtgaagtacactacaattccttgtatggaatcgacgatctcctgacccgcaagacgaagaagaagcactggctgttctaggagggttctgaaggatccaaattctttcagcagctcctgctctgtccagccagcgcagcctctgtcttagtacttactagttggccaacactgtatcatatcctaagttgagtctaggctttacgcttttatgtacagtcgatctagatcttgtaaaattccctcaaggagcaacaggaactgtacaactcttagatccatgagattttggtgatctctcctccatgggaatgatagtgcttgggtgtatgtacattataaaagctaccaggggcattttgacgtgggcgtttggatgccattctccataatttttattctgaattcgtagagtggccatttccaggcatggg

SEQ ID NO: 212244 - DNA, 3370 bp, Zea Mays
gcctgttttgccaaattcctcgtttggttccacgccggacgcatcctcccacgctcgggccgggcgcgtgaacccctcgccgccgtcgcagtcccgttgccggagggcgagagggacgagaaagaagagggcaagatgaagacgaccaaggggggcaaggcgatgaaccccacagacgcgttccgcaaggagcagcggaagaaggagctcaagcggaacaaaaaggaaaggaagaaagtgcgggatgttggcattttgaaaaaggatccggaggctatatgggagcagattgagaaattggagaagatgagtaagtaaactagctgcattgggaaaaacgaatcagaaagtgatgaagtgatctttgtaagaagtttatagtcactttcataaaccttaagttctatatacaattatgcatatatcaagagatcatgttacttacttgttctgctttagttatgacaacatagttcatttgatctgtagccatagcattatttgcacattgttcgtcaacatttgctaaacactcatacactattgtttttcccctaacttagtttgaatgcaaattttagttgatttgactcttgcagttggctaattatctctctggtctggtctttctagtatgaccctattgttgaaacaactgtatgtctcaggcatcttaaaatatcagtgtattagcatgggattaccaaatatgtatgtactgacctcatgaagcattatattttgcagcactttgcctctttgaattgctagctactttggccctgttttcaacatgaggctgatggtgctctggacaaggctaggaagcataagaaaagacagcttgaggatacatacaatcttattgttaagaaacgaatatgaacagaaaatgaaagagaagggtgaacaaccgattatgttcagccatcttgcaccaccaaagaggcggcctacaggagatgaagatggtagagctaatcctaagcccgaggactctgtttactatcatccaaccttaaatccatctggagcaccgccacctggaaaacctccgatgtacaaatcatctatagggccaaggatcccaccgccttcctcatccagcactggggcctcatcttccatgtcagagtctgaagcaggtccaacgaccctgccaccccctccaccaccaccgccattgccagacacctcagagtccattgatccacctgctcctcctttccctttgcctccactcccgccactgcccccaccaccacctaaacctaacagtgacgcagcattgccaggcttacctctgcctcctcctggtccacctctgagagaatctgtatcaggtcatacagtacttccgccgccactgcctccatcacagaggtcttcaaatccaccaccagcatctagtgcgaatgaaagcaaaacagattctgcttgggtatctactttggatctcttttgcatatttactagtgcttctaatccatttgttaatgcatcaaacccctttccctattgttcaaatgtttggatactggcctttgtgactttgtctgatgtaaccttgtttgcagcccttagttgtgttgcctccaccacccccgccacctgggttgtcaccaaaatcatatgacatggaggctgctggcacttcaaaggacactcctggacttaaagaagatactgcagcgagagtcttaccaccaccgcctccacctagtttgccgcctttacctccaatgcaatctgatatgctatctcctggagtcatgagattaccaccacctccgccaccaccagattcaaggccatcgcttatggctcctggtgttagcaggccccctccacctcctccaggattcccccgtctcaaatgccaataccaccatatgcatcctgtttggttcagctttttttttgactagcttttccgagaatctagctgtggggagaatctggctgtgtagagaatctgagtattattaggattatgtgcggaggaagataaagttgtccatgtggctcaggatctatacagtgacagattactactattgcgacgactcaaccgattatatgtttatgttgattttgaatggtttttacccaaacgaattttatagaagctggctgaaaagctgagtgtttagcagtccgcagcagcttttggtggtcagaagctgcgaaaaaccgaaacaaacagggacatggtgtcctccctggtccgccaccgatgcttaggcctccatttttgctaggaccctctatgcaactagatgagcttgctgcctttgccccaaggcctcagttacctcagcagccatcatatgtaaagtcggctgccccaacagttgttaagagaccattagcacagcacactcctgagctgacggctatggttcctgcatcagttcgtgtcaagagagaatctgcgctccccaaaccaaaaccaaaggtgcagcagcagcagcagctatcaacagcatccatttcaaggccttcagtgaccctcataagaagtgatgctcggccttcttcagcggcacccaagccgccaagtatggacgactcctacttggcattcttggaagatatgaaggaactaggggcacttgatgggtaactcatagagtaactgcctgagtgcacttaacagcttaattcatggaaaacctggacatgggaccttttttttttgcaatgtggtaaatggatagtctctgctcagtcaaccggagctgccgcggagaaagaaaatcatgcagtagtttaattgaaaacccgggaaaacgattgtagtctggctgctggagacctaaaggctctttgtggcccaactgtacacgtttgagatatttggaacttgaatagctgctggctctagcgaaggatatcttacaggtgctctttatgattcatgattgcactggctgatttgcagataataccattacaccagtcgtggggaggactactgttgtgccttaatttttgtatggtgcatttgccttgaaaaccatgacggagttgctgtcctgggaccccatgtaaacttgtgacattcacaaatgtcggtattggttctatagactatagtccggcgacattactggatacgagccacggcttctatataaaagtttcgtgctttctgtgctgaaatctgaaattaacagttttttatttggccagatgggaatatctgtttgcaaactgtgtaacgtatgatgcgatatgcctgcaaagtggcctcatctggccatctttgtacgtgagtcgcactaacatatgatgagtctatggcagattcatgtttcaggcctccacgtcttctgaaggaatcgtcgaagaatttgtcagttcaaac

SEQ ID NO: 212245 - DNA, 867 bp, Zea Mays
gaatacctttgcatggtattaattaatatatcctgaatgcacatcatcattaattcaagctttagtgctgtttagaggcaagcatccaatatatcgtcgtgatgagatagacaaaattatcaaaagtggtgcatcattcattgagaaagtacaacgaaaggatgggtcctggtatggttcttgggctgtgtgtttcacttatgcaacattctttgctataaaaggattagttgctgcaggaagaacataccggaatagtttggctattaggaaagcatgcaacttcttgttgtcaaagcaactaggaaccggtggatggggagaaaactatcttggttgtcaaattgaggagtatgttgacagtggcagtccacatggagtcaacactgcacaggcgatgctagctttactctacgctgggcaggtcgaacaagacccagcgccactataccgtgctgcaaaagaattaattaacatgcagatggagaacggagaatttccccaacaagaaattgttggcaacttcaactcctcacttttcttcaattacccgaactaccgaaacttatttcccatctgggctttaggagaatttcgccgccgacttgttgcaaaaaaaggttaagatgggtatcttaagctatttctaataattgtatttgggatacaagtatccatgtatattttatttttcgtgatgatgggaatgtaacacaaaataaaatttatatttagtacgtatatgttaatatttgtaagattatcacaaacaagttgataatcatcagtgatctggttcctcaaattcaataacaaggatgcaaaatgtttggtagcaagaatactgcaatggaatggaatagctaa

SEQ ID NO: 212246 - DNA, 2423 bp, Zea Mays
cagcaatccttcaccatcctaagctagccaagcatgtggaggctaaagatcggcgagaggccaagcaacccgctgcttcgctcgcccaatggcttccttgggagagaggtgtgggagttcgaccccgccgcaggcacgccggaggagcgcgccgaggtcgataggctgcgccaggagtacacccgcaaccgcttcacgcgacggcaatgcagtgaccttctcatgcgcatgcagtatgcaaaacagaaccttcataatacaaaccttccggctatcaagattgaccaggattcagacgtcacagaagaaactatactaattacattgaggcgtgctcttaatcaatattcttctttgcaaggacctgctgggcattggcctggggattacggcgggatttcgttcattttaccactcatgatatttgcattacatgtcacacgatcaatggatgaagttttgtcaatagagcatatacgtgagatatgtcgctacatttataacatgcagaatgaggatggaggctggggaacacataccttgggaccaagctccatgtttggcacatgtgtaaactatgcaaccttaaggattctaggagaggtgcttgatggagaaaatgatgcattatccaaagggcgttcttggattttgtctcatggaagtgcaactgcagcaccacaatgggcaaagatatatctctcgatgataggtgtatacgattgggctgggaacaatgcaatcattcctgagttatggatgcttccacattttctcccaattcatcctggaaggttttggtgcttttgtcggatggtttacatgccaatggcttacatttatggaaaaaagtttgttgggcctatcactacaactattttagaaataagaaatgagctctacaatataccatataataagatcaactggaacaaggcttgcaattcttgtgccaaggaagaccttatctatgagccttcatggttgcaaagtattgcaatggcttatttgaataagtttatagaaccattatcaaatctttggccaatgaataagctacgagaaagagctatgagtgacctcatggaacatatccactatgaagatgaaaccagcaactatgttggcttatgccctataaacaaggcattaaatatgatatgttgttggatagaaaaaccaaactcaaatgaatttagacaacatctcccaaggattcatgatttcctatggcttggagaagacggaatgaagtcaaaggttatcaaaaacattcctgattacaagagctactaccgtgaaagaactaaaggttcttggactctatccaatggagaaaacttttggcctattgctgatacaactgctgaggcacttaaggcaatactgttgctgtctaacattccttcagaacttgtcggggatccaataaaacaagaacgactatatgatgccgttgattgcctcctttctttcgtgaacaaagatggtacattatcatcagctgaatgtaaacgaacaacttcatgggtggagtttatcaatccttctgagagttttcgtaatatcatcgtcgactatccatatcctgaatgcacatcatcattaattcaagctttagtgctgtttagaggcaagcatccaatatatcgtcgtgatgagatagacaaaattatcaaaagtggtgcatcattcattgagaaagtacaacgaaaggatgggtcctggtatggttcttgggctgtgtgtttcacttatgcaacattctttgctataaaaggattagttgctgcaggaagaacataccggaatagtttggctattaggaaagcatgcaacttcttgttgtcaaagcaactaggaaccggtggatggggagaaaactatcttggttgtcaaattgaggagtatgttgacagtggcagtccacatggagtcaacactgcacaggcgatgctagctttactctacgctgggcaggtcgaacaagacccagcgccactataccgtgctgcaaaagaattaattaacatgcagatggagaacggagaatttccccaacaagaaattgttggcaacttcaactcctcacttttcttcaattacccgaactaccgaaacttatttcccatctgggctttaggagaatttcgccgccgacttgttgcaaaaaaaggttaagatgggtatcttaagctatttctaataattgtatttgggatacaagtatccatgtatattttatttttcgtgatgatgggaatgtaacacaaaataaaatttatatttagtacgtatatgttaatatttgtaagattatcacaaacaagttgataatcatcagtgatctggttcctcaaattcaataacaaggatgcaaaatgtttggtagcaagaatactgcaatggaatggaatagctaa

SEQ ID NO: 212247 - DNA, 2542 bp, Zea Mays
cagcaatccttcaccatcctaagctagccaagcatgtggaggctaaagatcggcgagaggccaagcaacccgctgcttcgctcgcccaatggcttccttgggagagaggtgtgggagttcgaccccgccgcaggcacgccggaggagcgcgccgaggtcgataggctgcgccaggagtacacccgcaaccgcttcacgcgacggcaatgcagtgaccttctcatgcgcatgcagtatgcaaaacagaaccttcataatacaaaccttccggctatcaagattgaccaggattcagacgtcacagaagaaactatactaattacattgaggcgtgctcttaatcaatattcttctttgcaaggacctgctgggcattggcctggggattacggcgggatttcgttcattttaccactcatgatatttgcattacatgtcacacgatcaatggatgaagttttgtcaatagagcatatacgtgagatatgtcgctacatttataacatgcagaatgaggatggaggctggggaacacataccttgggaccaagctccatgtttggcacatgtgtaaactatgcaaccttaaggattctaggagaggtgcttgatggagaaaatgatgcattatccaaagggcgttcttggattttgtctcatggaagtgcaactgcagcaccacaatgggcaaagatatatctctcgatgataggtgtatacgattgggctgggaacaatgcaatcattcctgagttatggatgcttccacattttctcccaattcatcctggaaggttttggtgcttttgtcggatggtttacatgccaatggcttacatttatggaaaaaagtttgttgggcctatcactacaactattttagaaataagaaatgagctctacaatataccatataataagatcaactggaacaaggcttgcaattcttgtgccaaggaagaccttatctatgagccttcatggttgcaaagtattgcaatggcttatttgaataagtttatagaaccattatcaaatctttggccaatgaataagctacgagaaagagctatgagtgacctcatggaacatatccactatgaagatgaaaccagcaactatgttggcttatgccctataaacaaggcattaaatatgatatgttgttggatagaaaaaccaaactcaaatgaatttagacaacatctcccaaggattcatgatttcctatggcttggagaagacggaatgaagtcaaaggtgtatgttggttgccatagttgggaaactgcgctcatagttcaggctttttgctcaacagggctcaccgaggagttttgttcgactcttcaaaaagctcatcagttcttaaaaaatgcacaggttatcaaaaacattcctgattacaagagctactaccgtgaaagaactaaaggttcttggactctatccaatggagaaaacttttggcctattgctgatacaactgctgaggcacttaaggcaatactgttgctgtctaacattccttcagaacttgtcggggatccaataaaacaagaacgactatatgatgccgttgattgcctcctttctttcgtgaacaaagatggtacattatcatcagctgaatgtaaacgaacaacttcatgggtggagtttatcaatccttctgagagttttcgtaatatcatcgtcgactatccatatcctgaatgcacatcatcattaattcaagctttagtgctgtttagaggcaagcatccaatatatcgtcgtgatgagatagacaaaattatcaaaagtggtgcatcattcattgagaaagtacaacgaaaggatgggtcctggtatggttcttgggctgtgtgtttcacttatgcaacattctttgctataaaaggattagttgctgcaggaagaacataccggaatagtttggctattaggaaagcatgcaacttcttgttgtcaaagcaactaggaaccggtggatggggagaaaactatcttggttgtcaaattgaggagtatgttgacagtggcagtccacatggagtcaacactgcacaggcgatgctagctttactctacgctgggtcgaacaagacccagcgccactataccgtgctgcaaaagaattaattaacatgcagatggagaacggagaatttccccaacaagaaattgttggcaacttcaactcctcacttttcttcaattacccgaactaccgaaacttatttcccatctgggctttaggagaatttcgccgccgacttgttgcaaaaaaaggttaagatgggtatcttaagctatttctaataattgtatttgggatacaagtatccatgtatattttatttttcgtgatgatgggaatgtaacacaaaataaaatttatatttagtacgtatatgttaatatttgtaagattatcacaaacaagttgataatcatcagtgatctggttcctcaaattcaataacaaggatgcaaaatgtttggtagcaagaatactgcaatggaatggaatagctaa

SEQ ID NO: 212248 - DNA, 1729 bp, Zea Mays
tgcaggacaatgacgcgcatagagaatggcatacgttcctttgagctctggcgcttactcaaggaaaaaaccaacttgccacaagtattgtgcatcggtggagcttacttggaaaccatgccgactagttggatatcgggattttcgactgaaagagctagcttgccaacaattggcccatggagtggatgaacaatatcctgtgaaaagtagcactgtggagcaagctcaggaccgccagccctgtctgccacaaggtgatgcttacttcgctggcctgtcgaagaaagaaatcgagagaaggcggaagattggcgctgccaacaaggggaaggttccctggacaaaaggcaggaaatggagtgaagagcacaagaaggtcatcaggcaacggactgctgaagctctgagagatcccaaggaagaaaatgttagggcaccgtcagctacatagacaaacaagcaaagacaagataagtgcggcgctgaggacggtctgggagaggcggatcgtttctgtccgatccagacagaaggttctgcagatctggtccaacagtatagctgaagcagcaaagaacggtggtcacggccaagatatgcttggctgggacagctacgagaggatcaagtcagagatggtatctacgttcctgtggatcaaggagaggggacgtatggtgaagaagcttgaaagggccgtggcaaaaatagctgccaagaggcttcaagtggtacggagaagggaagaacaggccacaaggatgaagaagctgaaacctgactgtcagacgttgctgcaaaacgcggaccgtcaaccagcaagagtggtagtatctgcaaggccaaagcttaaggagaggctagctaagtggcacggtcgaaagaaagagctcgagacagtgataagttcacgggcaaggaaaagaggattgcgaaatccaccacgaaggcaaatggcagcagaaagcctcgaggctctgtcaacttcggctgcaggagcaccataggaaggatgggcatgtaccctagctactgagcagctgggagctcgtagtcgccttatagagaagcagaagcccatgcctaatgaccaattcattaggcaggcacggggttttttgtttgcgttgctgaaactacgtgtagtaatttttgttttatagccttattaggctttctgtcaaaggaacatgtttatgctccctccaatgaaactacgtgtaacatgatttatgggtacaaaaaataaatgtactagaaaaatacagttaaaaaacatttgaataccactactcgtacacttacacttacgttaattgtcgaaatgaactgattactgccattttgggctgggcgtgccatacaacaatcatggggcaacatgtaacgtacgtctagtctaatcagcgcttcccaaacttaattaaagctggtaccaaaccaaggtggtagctgctacattcacaacgttgatgcgccaaacaagctggtccaatagctacctaactgcatcacacatatacacagctacaacaataggccagaatatccataacacaacaagaactatcctgtctgcgttagcatctgcctgcactgcacaagaggaaaaggaggaacagtgtaagcatcaaccaacatgtgctggactggaggatgctagagtagaaagtcacgtacgatcaatcaatacacagcagcagcagcagcagcagcagcctcagct

SEQ ID NO: 212249 - DNA, 1834 bp, Zea Mays
gtgggaacaacaggggaactcgaatccctggccacgggcacggccgccactcagcagtacacaggagtagagtagtctggagtcaggacccaggagacgatgcaggacaatgacgcgcatagagaatggcatacgttcctttgagctctggcgcttactcaaggaaaaaaccaacttgccacaagtattgtgcatcggtggagcttacttggaaaccatgccgactagttggatatcgggattttcgactgaaagagctagcttgccaacaattggcccatggagtggatgaacaatatcctgtgaaaagtagcactgtggagcaagctcaggaccgccagccctgtctgccacaaggtgatgcttacttcgctggcctgtcgaagaaagaaatcgagagaaggcggaagattggcgctgccaacaaggggaaggttccctggacaaaaggcaggaaatggagtgaagagcacaagaaggtcatcaggcaacggactgctgaagctctgagagatcccaagatcaggaagaaaatgttagggcaccgtcagctacatagacaaacaagcaaagacaagataagtgcggcgctgaggacggtctgggagaggcggatcgtttctgtccgatccagacagaaggttctgcagatctggtccaacagtatagctgaagcagcaaagaacggtggtcacggccaagatatgcttggctgggacagctacgagaggatcaagtcagagatggtatctacgttcctgtggatcaaggagaggggacgtatggtgaagaagcttgaaagggccgtggcaaaaatagctgccaagaggcttcaagtggtacggagaagggaagaacaggccacaaggatgaagaagctgaaacctgactgtcagacgttgctgcaaaacgcggaccgtcaaccagcaagagtggtagtatctgcaaggccaaagcttaaggagaggctagctaagtggcacggtcgaaagaaagagctcgagacagtgataagttcacgggcaaggaaaagaggattgcgaaatccaccacgaaggcaaatggcagcagaaagcctcgaggctctgtcaacttcggctgcaggagcaccataggaaggatgggcatgtaccctagctactgagcagctgggagctcgtagtcgccttatagagaagcagaagcccatgcctaatgaccaattcattaggcaggcacggggttttttgtttgcgttgctgaaactacgtgtagtaatttttgttttatagccttattaggctttctgtcaaaggaacatgtttatgctccctccaatgaaactacgtgtaacatgatttatgggtacaaaaaataaatgtactagaaaaatacagttaaaaaacatttgaataccactactcgtacacttacacttacgttaattgtcgaaatgaactgattactgccattttgggctgggcgtgccatacaacaatcatggggcaacatgtaacgtacgtctagtctaatcagcgcttcccaaacttaattaaagctggtaccaaaccaaggtggtagctgctacattcacaacgttgatgcgccaaacaagctggtccaatagctacctaactgcatcacacatatacacagctacaacaataggccagaatatccataacacaacaagaactatcctgtctgcgttagcatctgcctgcactgcacaagaggaaaaggaggaacagtgtaagcatcaaccaacatgtgctggactggaggatgctagagtagaaagtcacgtacgatcaatcaatacacagcagcagcagcagcagcagcagcctcagct

SEQ ID NO: 212250 - DNA, 1844 bp, Zea Mays
ccaaatcttaggcccggcaaagtcgacacgagcgaactccaggataaggtctggccaggctgctcgtcccgtcctcctctcgtggtcttccagaagccatggccgccgccgccgtccactgttccagggcatacgttcctttgagctctggcgcttactcaaggaaaaaaccaacttgccacaagtattgtgcatcggtggagcttacttggaaaccatgccgactagttggatatcgggattttcgactgaaagagctagcttgccaacaattggcccatggagtggatgaacaatatcctgtgaaaagtagcactgtggagcaagctcaggaccgccagccctgtctgccacaaggtgatgcttacttcgctggcctgtcgaagaaagaaatcgagagaaggcggaagattggcgctgccaacaaggggaaggttccctggacaaaaggcaggaaatggagtgaagagcacaagaaggtcatcaggcaacggactgctgaagctctgagagatcccaaggtgatgtcatatcaggaagaaaatgttagggcaccgtcagctacatagacaaacaagcaaagacaagataagtgcggcgctgaggacggtctgggagaggcggatcgtttctgtccgatccagacagaaggttctgcagatctggtccaacagtatagctgaagcagcaaagaacggtggtcacggccaagatatgcttggctgggacagctacgagaggatcaagtcagagatggtatctacgttcctgtggatcaaggagaggggacgtatggtgaagaagcttgaaagggccgtggcaaaaatagctgccaagaggcttcaagtggtacggagaagggaagaacaggccacaaggatgaagaagctgaaacctgactgtcagacgttgctgcaaaacgcggaccgtcaaccagcaagagtggtagtatctgcaaggccaaagcttaaggagaggctagctaagtggcacggtcgaaagaaagagctcgagacagtgataagttcacgggcaaggaaaagaggattgcgaaatccaccacgaaggcaaatggcagcagaaagcctcgaggctctgtcaacttcggctgcaggagcaccataggaaggatgggcatgtaccctagctactgagcagctgggagctcgtagtcgccttatagagaagcagaagcccatgcctaatgaccaattcattaggcaggcacggggttttttgtttgcgttgctgaaactacgtgtagtaatttttgttttatagccttattaggctttctgtcaaaggaacatgtttatgctccctccaatgaaactacgtgtaacatgatttatgggtacaaaaaataaatgtactagaaaaatacagttaaaaaacatttgaataccactactcgtacacttacacttacgttaattgtcgaaatgaactgattactgccattttgggctgggcgtgccatacaacaatcatggggcaacatgtaacgtacgtctagtctaatcagcgcttcccaaacttaattaaagctggtaccaaaccaaggtggtagctgctacattcacaacgttgatgcgccaaacaagctggtccaatagctacctaactgcatcacacatatacacagctacaacaataggccagaatatccataacacaacaagaactatcctgtctgcgttagcatctgcctgcactgcacaagaggaaaaggaggaacagtgtaagcatcaaccaacatgtgctggactggaggatgctagagtagaaagtcacgtacgatcaatcaatacacagcagcagcagcagcagcagcagcctcagct

SEQ ID NO: 212251 - DNA, 3298 bp, Zea Mays
aagaaaattagacttttttacacgaagctattcacaatatatcgcacattttctatttatactatttttttattcttagaaaatttttgatgtttttttaaggatctcgactgaagcatctcacaccttttttaagcataaaagatttgtagattttttccttttccttttttctttcactataatctattctagtctattctcgtattattttactctcccttcttggattctttcgatgaagaattatcttcgatttttttattttgactcgattgaaattaagtggatgcagtgaaaacagaagttgatataagagccaacaaaaacaccaacaaaaacgaggctgaagggaaaagctgcatagagaccacgaaacaggaaggaaagcgtgtaggcgtgtacagtgcatgtacagtgcacactacgtgatgtgtgtgcatcggaggggcattgactcgctggactttctttcccccaaagccgcgtggccgccgaggcgccgatagccaccagacgggagctgatctcccagaaaacaaccaaccaaccccgacccccgagaccagtgagtaactaaaaaaaaaaaagccaaaatggcggggggaggtcgtcgtctcccctccctgcgatcccctccatccgcgacgccatctcggccacttcatgatcactagggtttcgctcttctacccataagccctcgtcccgatgcgctggtggaagcgctcctcctccccctcctgccccgcctcctcatcctcagcatcgacccccgcttcccccgcccgcgcctccaccccccgtctcatcggcggttggggtagcggccctagctcacgccgcgatggcagcggggccagcaacgatccgcagccgcggctgatcagagcgcggcggatgcgctacgtcgtcgatgacctcgaggtcggggtctccgcgctcggcgtggactctccggcgaggagggacgcggcggcggggtttgcgcttgagacagtgagctccgcgccgatctcgtggtctccgagcaacatggaggtggcgccggcgagatcctcgtcgacccccgtgctgctgccgcatccgctgccccttccaggcgagggggaatcgccgtgccgcgggccggggaggccgcttccgccaccggtgccaaggatgctcgacggggaggggaaagggcctgcagcggacgctcccggtgttttagagactgggagccaaaggatgacgccgttactcgcacggagagtggcggtccaaactctaccaaaggctcatgagcacaacgactttcggttaaatgggactacctgttgtcagcggagaaaggcttttaaagagaagttccaggataagaactgtgatgaaactttgaacttcagattgaacattcctgctaaaagtgctccaagcagtgggttttcaagccctgtacaaagtcctcgaagactgagtaatgtagatttctcatctgctgcaatctctatccaagataccaatgtggtcaggagcgttctcctctctctagtccactgagaagtccagttttaaaatcaagaaacccaagtgcacctccatcaccaatgcatccaaagttgttcccggagaaccatgtttctcgccctgatggcaatggaagtgctagttttcacccattaccgctccctcctgcttctaaaggaaaactcttgggtagtggcacctttggatgcgtgtatgaggccaccaataggcacactggagctctttgtgccatgaaagaggtgaatataattccagatgatgctaaatcagtcgagtctctgaagcaattggaacaggaaattaagtttcttagtcaatttaagcatgaaaatattgtgcagtactatggcagtgaaactatcgaagatagattctacatatacctggagtatgttcatcctggttcaatccataagtatgttcatcaacactgtggatcgctgacagaagcagtcatccgtaacttcacacgtcatattctcaagggtcttgcttttttacatagccaaaagattatgcatagggatatcaaaggggcaaatttgttagttgatattaacggtgtagtgaaattggctgacttcggaatggcaaagcatttgagtactgcagctcctaatctttcattgaagggaacaccatactggatggctcctgaggttgttcgggctacactcgataaaagtgcaggttatgatcttgctgttgatatttggagccttggctgcacaatcattgagatgtttacaggaaagccaccttggagtggtcttgaagggccggctgcaatgtttaaggtgttgcgcacggacccaccaattccagataacctgtcccctgaagggaaggattttctgagatgctgcttcaagagaaaccctactgagcgaccaacagcaaacaagttgctcgaacacccatttatccaaactttgaaccactacagcccacatagcgttgtacattcattttcgggaattaaatctccagatactgtgcacagcagtgcaagagataaagtaccctggaaaagtgattcatatatgagagggaaacatgcaaatggtgaaacaagcagtgctcggtcgtcagagtcattggcttatcggttgatgacacccctacccaacttgggaaccaatagtttgtcacctccacctttgagttcggcctccagttctggctctgcagcacatacaccgaacagtatgcatttttcagtcccataccatcagcctagtcctttgccaaagcctaacgggaaggaagcaataaatttggtttcgcattgaataacagcatgccacctatcacaacatctgggcaaagtccacataaacagcgcaagtgtatccgtccctagcgtctgacccttgtactgccagtaatagctaacaattttctgggtcgtgtaaaaataatttccatgtaaagagatcaccgcgatatgatcacagggaaatgctgctaaatgagggagctttgtgaaatctgttgtatcgtttgatttctgggaaactgattggattgcccatgtaacatatttttattagggtgtagctgtaggtgaaactaatggtcaagattgtgccgacaaataggacattagggttgtagctgtagcgtgttgttgatgctgtgtaatgatcatacttgatgtaatcattattgatttttttggggaaggtaataatgcacgtcaattggcaaaaggggattgagatcgcagatccatgtactccctccgttaataaatatatgacctttt

SEQ ID NO: 212252 - DNA, 2047 bp, Zea Mays
cgctccttcccgttgtctcgtaagctgcgaggaatccccagctcgtcttgccccggttgttttgtatctcctcgtcggacccagcgttccagtcgagcatggcttcgattccgcctccgtcttcctccgtcgctgccctcacccgccaaccggcccagttcttgaaatggtgcagtgtatccaaggagacaaaggcatcggtctgcagtttcttggctacaaattcaaacagcactagggtgaaatcagtgggcttgagagtagcattatccttcaaaaatgatggtggttatccagctgacggtttctctgggaatggcaacacgctattgccaaaaagcacatccgttcgtggcgaggaccatccggttgctgatcctgtactcccaatggattcaatgatgacgccagaaatcctctctgctaatttggcacttgttatggacaagttctcagatgatgacacagatactgaacttgatttggatagcccgacagagggcttcgcgtcgattccagatgccattgaggacgtacggcaaggaaaacttgtgattgttgttgatgacgaatcaagggaaaatgaaggagatctgataatggctgcctccttggttaccccagaggcgatggcttttatagtaaggcatggaacaggaattgtttgtgtcagcatgaaagaagatgatctggaaagactgagccttcctttgatggttaccacaaaagaaaacgaggagaagctatgcactgcttttactgttacagtggatgcaaaagagggcacaactactggagtatctgccaaagacagggcaaaaacagttatgactcttgcatctcctgactctaggcctgaggacttcaaccgccctggtcatattttccctttgaaatacagagaagggggtgttctgaaacgagctggacacacagaggcatcggttgaccttgccatgctggctggattacctcctgttgctgtcctttgtgagattgtggatgatgcagatggttccatggctcgcctgccaaagttgcgtgtctttgctgaaagggaaaatttgaagattatatctattgctgacttgattaggtataggaggaaaagagacaggctagttgaacgtgcttctgttgcacgcttgccttcgcaatggggcaatggccatggatattgctacagatctgctattgatggcatcgagcatcttgccatggtgaaaggtgatattggtgacggccaagacattttggtgagggtgcactctgagtgcctcacaggcgacatttttagatccgcaagatgcgattgcggtgaccagcttgcaatggcaattgagatgattgagaaggccggaagaggcgtaatagtttatctccgtggacacgaaggacggggtatcggtctgggccacaagcttcgtgcttataacttgcaggatgatgggcgtgatactgtggaagctaatgaagaacttggtcttcctgtggactcacgagaatatgggattggcgcacagatactacgggacctaggagtccgttcgatgaagctgatgactaatagccctgcgaaatatagtggtctgaaaggttatggactgagcattgcgggcagggtgcccttggttacgccaattaccagcgagaacccccaaatactgtgtcccatccgtgaacatggaagagccaccgaagacggagaggaacttgtcaagcaaggatacatacccgacttgggcattttggtcttcagttgcggtcgttgcacgagctgctagaggtgtttgtcatcgttgtaacatcagcgtggtccaacatcttccgtatgttcgcaaacattcctccaagccatgaagaggtgctttgttgatcaatctagatgaggaggacgaggtcaactttgtgaaggtacaaatggagaatgtaacacccctggtgttatgtgaactaaaacattggcatgccatcatatgtactggcattatattgctcgtgttacacttagaatgcatccactagactaaaatttcaaaaaaatatg

SEQ ID NO: 212253 - DNA, 2109 bp, Zea Mays
tcgtctcccaccccacccgcaccaaacccctaatcaccacacaaccaaaacccaaacaacacgtgtcctcctacaattgccgacgtcgccgtcgtcttcgccagagcagcgccagcggttgttttgtatctcctcgtcggacccagcgttccagtcgagcatggcttcgattccgcctccgtcttcctccgtcgctgccctcacccgccaaccggcccagttcttgaaatggtgcagtgtatccaaggagacaaaggcatcggtctgcagtttcttggctacaaattcaaacagcactagggtgaaatcagtgggcttgagagtagcattatccttcaaaaatgatggtggttatccagctgacggtttctctgggaatggcaacacgctattgccaaaaagcacatccgttcgtggcgaggaccatccggttgctgatcctgtactcccaatggattcaatgatgacgccagaaatcctctctgctaatttggcacttgttatggacaagttctcagatgatgacacagatactgaacttgatttggatagcccgacagagggcttcgcgtcgattccagatgccattgaggacgtacggcaaggaaaacttgtgattgttgttgatgacgaatcaagggaaaatgaaggagatctgataatggctgcctccttggttaccccagaggcgatggcttttatagtaaggcatggaacaggaattgtttgtgtcagcatgaaagaagatgatctggaaagactgagccttcctttgatggttaccacaaaagaaaacgaggagaagctatgcactgcttttactgttacagtggatgcaaaagagggcacaactactggagtatctgccaaagacagggcaaaaacagttatgactcttgcatctcctgactctaggcctgaggacttcaaccgccctggtcatattttccctttgaaatacagagaagggggtgttctgaaacgagctggacacacagaggcatcggttgaccttgccatgctggctggattacctcctgttgctgtcctttgtgagattgtggatgatgcagatggttccatggctcgcctgccaaagttgcgtgtctttgctgaaagggaaaatttgaagattatatctattgctgacttgattaggtataggaggaaaagagacaggctagttgaacgtgcttctgttgcacgcttgccttcgcaatggggcaatggccatggatattgctacagatctgctattgatggcatcgagcatcttgccatggtgaaaggtgatattggtgacggccaagacattttggtgagggtgcactctgagtgcctcacaggcgacatttttagatccgcaagatgcgattgcggtgaccagcttgcaatggcaattgagatgattgagaaggccggaagaggcgtaatagtttatctccgtggacacgaaggacggggtatcggtctgggccacaagcttcgtgcttataacttgcaggatgatgggcgtgatactgtggaagctaatgaagaacttggtcttcctgtggactcacgagaatatgggattggcgcacagatactacgggacctaggagtccgttcgatgaagctgatgactaatagccctgcgaaatatagtggtctgaaaggttatggactgagcattgcgggcagggtgcccttggttacgccaattaccagcgagaacccccaaatactgtgtcccatccgtgaacatggaagagccaccgaagacggagaggaacttgtcaagcaaggatacatacccgacttgggcattttggtcttcagttgcggtcgttgcacgagctgctagaggtgtttgtcatcgttgtaacatcagcgtggtccaacatcttccgtatgttcgcaaacattcctccaagccatgaagaggtgctttgttgatcaatctagatgaggaggacgaggtcaactttgtgaaggtacaaatggagaatgtaacacccctggtgttatgtgaactaaaacattggcatgccatcatatgtactggcattatattgctcgtgttacacttagaatgcatccactagactaaaatttcaaaaaaatatg

SEQ ID NO: 212254 - DNA, 2059 bp, Zea Mays
cgctccttcccgttgtctcgtaagctgcgaggaatccccagctcgtcttgccccggttgttttgtatctcctcgtcggacccagcgttccagtcgagcatggcttcgattccgcctccgtcttcctccgtcgctgccctcacccgccaaccggcccagttcttgaaatggtgcagtgtatccaaggagacaaaggcatcggtctgcagtttcttggctacaaattcaaacagcactagggtgaaatcagtgggcttgagagtagcattatccttcaaaaatgatggtggttatccagctgacggtttctctgggaatggcaacacgctattgccaaaaagcacatccgttcgtggcgaggaccatccggttgctgatcctgtactcccaatggattcaatgatgacgccagaaatcctctctgctaatttggcacttgttatggacaagttctcagatgatgacacagatactgaacttgatttggatagcccgacagagggcttcgcgtcgattccagatgccattgaggacgtacggcaaggaaaacttgtgattgttgttgatgacgaatcaagggaaaatgaaggagatctgataatggctgcctccttggttaccccagaggcgatggcttttatagtaaggcatggaacaggaattgtttgtgtcagcatgaaagaagatgatctggaaagactgagccttcctttgatggttaccacaaaagaaaacgaggagaagctatgcactgcttttactgttacagtggatgcaaaagagggcacaactactggagtatctgccaaagacagggcaaaaacagttatgactcttgcatctcctgactctaggcctgaggacttcaaccgccctggtcatattttccctttgaaatacagagaagggggtgttctgaaacgagctggacacacagaggcatcggttgaccttgccatgctggctggattacctcctgttgctgtcctttgtgagattgtggatgatgcagatggttccatggctcgcctgccaaagttgcgtgtctttgctgaaagggaaaatttgaagattatatctattgctgacttgattaggtataggaggaaaagagacaggctagttgaacgtgcttctgttgcacgcttgccttcgcaatggggcaatggccatggatattgctacagatctgctattgatggcatcgagcatcttgccatggtgaaaggtgatattggtgacggccaagacattttggtgagggtgcactctgagtgcctcacaggcgacatttttagatccgcaagatgcgattgcggtgaccagcttgcaatggcaattgagatgattgagaaggccggaagaggcgtaatagtttatctccgtggacacgaaggacggggtatcggtctgggccacaagcttcgtgcttataacttgcaggatgatgggcgtgatactgtggaagctaatgaagaacttggtcttcctgtggactcacgagaatatgggattggcgcacagatactacgggacctaggagtccgttcgatgaagctgatgactaatagccctgcgaaatatagtggtctgaaaggttatggactgagcattgcgggcagggtgcccttggttacgccaattaccagcgagaaccgtaagtacctcgagaccaaaagaacaaagatggggcatgtatatggattggctaatgcgcaggttaaccagccaagtggtagccagagcacagaagagaagcattgagcccaaaaaagtgatgcattcttctttttgggagttcctgaaatcttctccctcgatatttccatatattcttttttttctatatttccatatattctttctttcacatagaaggccgttttgttcttcaactgtagctgtaggtttcaagatggttaatgagcttaataaaagcaagtttaataatataagcaactgttcttgtaatgagctttacagtctgtcttagccgatatgtataatggttagcctttacaatgaatatatggtcaactgtttttctcacaaaatttaaa

SEQ ID NO: 212255 - DNA, 2008 bp, Zea Mays
ccaggttgttttgtatctcctcgtcggacccagcgttccagtcgagcatggcttcgattccgcctccgtcttcctccgtcgctgccctcacccgccaaccggcccagttcttgaaatggtgcagtgtatccaaggagacaaaggcatcggtctgcagtttcttggctacaaattcaaacagcactagggtgaaatcagtgggcttgagagtagcattatccttcaaaaatgatggtggttatccagctgacggtttctctgggaatggcaacacgctattgccaaaaagcacatccgttcgtggcgaggaccatccggttgctgatcctgtactcccaatggattcaatgatgacgccagaaatcctctctgctaatttggcacttgttatggacaagttctcagatgatgacacagatactgaacttgatttggatagcccgacagagggcttcgcgtcgattccagatgccattgaggacgtacggcaaggaaaacttgtgattgttgttgatgacgaatcaagggaaaatgaaggagatctgataatggctgcctccttggttaccccagaggcgatggcttttatagtaaggcatggaacaggaattgtttgtgtcagcatgaaagaagatgatctggaaagactgagccttcctttgatggttaccacaaaagaaaacgaggagaagctatgcactgcttttactgttacagtggatgcaaaagagggcacaactactggagtatctgccaaagacagggcaaaaacagttatgactcttgcatctcctgactctaggcctgaggacttcaaccgccctggtcatattttccctttgaaatacagagaagggggtgttctgaaacgagctggacacacagaggcatcggttgaccttgccatgctggctggattacctcctgttgctgtcctttgtgagattgtggatgatgcagatggttccatggctcgcctgccaaagttgcgtgtctttgctgaaagggaaaatttgaagattatatctattgctgacttgattaggtataggaggaaaagagacaggctagttgaacgtgcttctgttgcacgcttgccttcgcaatggggcaatggccatggatattgctacagatctgctattgatggcatcgagcatcttgccatggtgaaaggtgatattggtgacggccaagacattttggtgagggtgcactctgagtgcctcacaggcgacatttttagatccgcaagatgcgattgcggtgaccagcttgcaatggcaattgagatgattgagaaggccggaagaggcgtaatagtttatctccgtggacacgaaggacggggtatcggtctgggccacaagcttcgtgcttataacttgcaggatgatgggcgtgatactgtggaagctaatgaagaacttggtcttcctgtggactcacgagaatatgggattggcgcacagatactacgggacctaggagtccgttcgatgaagctgatgactaatagccctgcgaaatatagtggtctgaaaggttatggactgagcattgcgggcagggtgcccttggttacgccaattaccagcgagaaccgtaagtacctcgagaccaaaagaacaaagatggggcatgtatatggattggctaatgcgcaggttaaccagccaagtggtagccagagcacagaagagaagcattgagcccaaaaaagtgatgcattcttctttttgggagttcctgaaatcttctccctcgatatttccatatattcttttttttctatatttccatatattctttctttcacatagaaggccgttttgttcttcaactgtagctgtaggtttcaagatggttaatgagcttaataaaagcaagtttaataatataagcaactgttcttgtaatgagctttacagtctgtcttagccgatatgtataatggttagcctttacaatgaatatatggtcaactgtttttctcacaaaatttaaa

SEQ ID NO: 212256 - DNA, 1848 bp, Zea Mays
ccgttctttcctcctccacgcgaatccgcatctccacactccaatcagcgctcctccgtccccgttctttcctcctcccttcagccatcgcagtcgcagcgcaggttcttggctggttgctggtgtcgacagcgaagtccgcaactccaatcctgcctgcgctcctcccttcctccgtcctcactaagcacccgcgcacgccgcctgcctgtcgattgagatctctttcacgcccctttctgccatcgcacaactgagccgcagctagtaacatccattttgctggtcaataagtcgtgggaggaagaagatggattatttgaaggtgcaggtggtagagtcatcatttgtagtgccgagcgagccgacgccaacgaaggcgctctggctctcttgcttggacatggttcagtccaacaaagcccacaccccaacgatccacttgtacagctccaacgatgctgcggcggctgattttttcgacctgggcagactcaagaaggctacggccaaagccttggtggccttctaccccctcgccggccgcctcgtcgacagcgacgatggtaggaaggagatcagctgcaacggcgaaggtgcactctttgttgtcgctcgcgcggatggtgatctcactatcgatgaagtcaagaaattcaagccatcgccagagttgaggaggctgtttattccactcatcgagccatcgtccatcataatggccatacaggtcgtgactttcttgaagtgtggaggtgtggtgttaggaacagctatccaccacgccgccacagacgtttcaagcgcgttccacttttttcagacatggtcggcgttctgcaagcatggtgacagtgctgccgtggagctcccgtgccacgaccgcaccctactccgcgcacggtccccgcccacagtccaccccgacgcgctctcgacattgcagcctcggctcgtcctcactgaacccgaggggcctcttgccatcgaaatcttcaccatttccagggaccatgtcgcctccctgaagcagctctgcggtggcacgagcaccttttgcgccgtcagcgctctcatctggcagtgcgcgtgcgttgcacgacggatcccaccggactctcaggtgcgcgtgatgttcccggccgacgtccgccgccggatgaggccgcccctcccgacccactacttcggcaacgcagtgatcaggctatacgccgctggcccggcaggggacattggcacggcggcgttggcatccgtcgctgcccgcatcaagggcgccgtcgagcggatggatgacgagctggtgcggtccgcgattgactactacgagatggccgagacgaacaagagacggactgggacaggcatcttaccacggacggacctgaatattaccagctggttgggtaggccacagcacgacgcagattttggctggggaaagccgcaatccatgtcgcgggcggagtctgtccgcggcggctctatgcacttgatgaacgacgacggtggtaccggcgacgtccgcgtgctcgtgtgcttggaggctgaaaatataaaggagctaggacggctgctttatgcaaagctctagcaagctgctagtgctatgctctaaaaataataatattaataataaggtttgttactatgcttaaggggaaccatactttttccctcgcgatttattattattatggcagtttcaataatgaaaaccatttgtaattcctgtgacaattaatttatgcgtccacgctagaaataaaaacttgtttgtaatactacagtttttttttgttatggcagtttcaataatgaaatccgtatgtaattcctgtgact

SEQ ID NO: 212257 - DNA, 4272 bp, Zea Mays
atggacgcgacgacgaagcggcggcaccagcccggcggcgcgcagcccacacgccgtaaggtcgtggaggaacccttccacaccgcaccccctacacctgccgcggcgtccccctcccgcctcgtcggcgccatcgtcgagaagggctactccgccgccgcaccctcctcggcgccccgaccttccgtcctccccttccccgtcgcccgccaccgctcccacggcccccactgggttcccttggtgaaggacgcccccaaggatgagaccgcggacaacgacgacgagatggacatggatgagacagactaccatcctgtggcagctgctgcagctggtcctgtgaggaggaaggagaagaagggcatggattttagccggtggcgtgagtttgttggcgatgctccccccaagcggaggcaggggaagccagtgcaggccaagaaacagagcgatcagagaattgatgctggggctgtagcttctaaggtaggtggtgtggcagctgaggggagaggattggagggaggtgctatgcggcttgacagtggaaatgctagcgaagggccaggtcccgtgcttttggtttctgatgtcgtgtccaagaagccaatgagtcaggttgaatcgagagatgaattggtgaacacaagtgaggctaggaatttggcatcacaagcagagagtatggacctcgacggcagggagtcatctatggaagcagagatcagcgcagagaacatggctaggttggctgggatgtctgcaggggagattgcagaggcccaagcagatattgtaaataagctgaaccctgcattgctggagatgctgaggcggcggggaagggagaagtctggaggcacgaaggatgtgggtaaggacaagggtctgaaaaactcagggctgcagaagaataaaagggctacaccaggggattggttgactgctggtgaacatactgggcactcctggaaggtgtggagcgaaagagtggagcggatcaggtcttgtaggttcacattagatggagacatattggggttccaatcttctcacgagcaacaagatggcaagaagatgccttcagaaagtgttgctgagcgtgatttccttagaacagaaggtgatcctgcagctgttgggtacacaatcaatgaggcagtggcacttaccaggagcatggttccggggcagcgtgtgcttgcactgcaacttcttgcttctattctgaatagggcattgcagagccttcataagaccgatctaatggataatgttaaaggaatgaattccaaggataacattgatgactggcaagcagtttggtcctatgcccttgggcctgaaccagaattggtactctccctaaggatggctttggatgataaccatgattctgtagttttgagttgtactaaagtagttaatgttatgctgagctgtgagttcaatgaatcctattttgaattttcagagaaagtaggtaatggaaaagatatctgcacagctcctgtgtttcgtagcaaacctgacttagatggaggctttcttgaaggtgggttctggaaatacaacacaaaaccttcaaatatactcccacattgtggtgataatgacgaagacgaagctgatgagaagcatacaattcaggatgatgttgttgtgtctggccaagatgttgctgctggttttgcatgcttaattcaattttggaaagaatatcaccagatgtcactcctgaggataaaagttacagcttgccctggatacctgattttgtccccaaaattggcctgggcataattagtaatggttttttcagctgttcgaccactgttgctggtagaaatgcagaacatcagcctttttgctgtgcatctttggtgcagggactttgttatatgagatgccatggtaatgttgatgtatcattgtcttccattagctgccttcaaagattggtgcagctatcctggtctgtcgacagagtgatccagggagccacaaaatgttgttccgagtgtttcaatgagtctggaacaggtgaagctggcaaactactagctgaaggtatctccagtttatggcataatgatttgctacacttgctgacttcgcttttgccaatgatttcatcacaatggtccatatcacagaacatagagatgtttggtagaggaggaccagctcctggtgttgggtttggctgggggacatgtggtggagggttttggtctcttaaatgcctacttgcacaattggattcacaattggttgtagaattgatcaaatgtttctcttcagttcaaggaagtcctatcatcctcgatgaaggtgtgaagttagataatgtgactaacacagttgtgacagcttcaaattggatcagttctaccctagggttgtctctgattgctggacctggacaaatctatatgttggagaaggttttcgatatgatttttgaaccttccattctgaagtatctcaaatcatctatacataaatttacctctgacatggaattactgaaaccttttgaatgggacttaaatgaagatgaatatatgctcttcagcagtgttctcaaatcacatttcagatccagatggttagccatcaagaagaagcattcagataaatatgcaggagataatagcagcaccaagatttcaaaaacaccagagatattggagacaattcaagaagaaacagagttgtcagaagctgtaaatcaaccttgcaacacattaatggtagagtgggcgcatcagagactgcctcttcctatccactggattctaagtgcagtttgctgcattgatgatccaaaaggcacactctcaacatcagccaactatattcttgatgtctcaagggctggtcttatcttccttttaggtctggaggccatttcagctaccccgtgccttcatgctcctttgatctggaaaattcatgcactttcggtctctatccgctctagcatgcatttgctacaggaagacagaagtagggatattttctgtgctttacaggaactgtatggcctgcatctgaacaggttataccaaaaattctgtaaaccaaactctatcgaggaagttaagggcgttgtagtgggcacttcagaggaagcgatggagatcagtagccttgaaattctcaggtttcaggagaaaattcatggaagctatactacttttgttgagagcctggttgatcaatttgcagctgtctcatatggagattttgtttttggtcggcaagtggccatttatctgcatagaaaggctgagccagcagtacgtcttgcagcatggaatgcactgtctagtgcgtatgtgcttgaactgttacccccgctagacaattgcattggcaacgccccaggatacttggagcctcttgaggatgatgaaaaaattttggaatcttatgctaaatcatggacgtctggtgtcctggacaaagctttacagcgtgattccatggccttcacattggcaaagcatcacctttcaggctttgtcttccagtccagcgattctggcacaatgctgcgaaaaaaactggtcaaatcgcttatccggtgctatgcacagaagcggcatcatgaggttatgcttaagtgcttcgttcagcaaggcatcgcacaggattccaagagcagtgagcttgaccggagatttgaaatcttgaaggatgcttgtgagatgaactccaacctcgtaggtgaagtccagagactgaaggcatgtcttggccaatgaagccagatatttaagtgtgtcattaacttggcagcgttagttgttgggaaagctcgacaaagtggcccaaaatatgcaactgaggaaactcacggtcggggctagtggttacttttaattttgatgaagggaacgccgagcacgcagcaaccctgagtctaacctggctatggttaggctgctcttagcagagcatgcatatggtcatgtaaacagtagaccacactgtctattgagtgaagtttgaaatagactttatatatagcattaggcttcctttgattcctcttccgcttctcatagtcggtggcgttcagccatctttcactatcgtggtttcaacatctaaagacgcttaagtcaggacaaaggcatcacgtataagaatagaaggcatgagatggggatatcataaaccttgataggcgagacaaggctatgggcttctggagttccaaaaatgagagttttgcagtatagtgagatgaacttttcc

SEQ ID NO: 212258 - DNA, 2796 bp, Zea Mays
attaaactcaaaagtcataggcaatataagacatgcagtgctttctgcaattatgctgatctcgaggcattcaccgaagagaaaaaaagatctctacttgctaagcgacatggtaaaggggctgattttttaagagcagttgatgagataattgaagtttatgattctctaaaggagaaaggtagtaacaaggatgacttggctgctgaagtaaagccaggtgtagaaaagtttgctgataataatgtttgcatggatactgaaaatatggtcagtagctcctatatacaaaatcatcaagagatagatgatcattatgtcactaccaagggtcatgacatgatcaagtctgacaggctttcagtcactataatgagtgacgaacgctgtgttataaattctgctcctgatgagcctactgaaaatgtatctgtacttgatgaaatgagggagatttctttgcgtactaactcattttcaaataagcaaagggatgcacagccacaaaattgctacacacgtagtagggttccatctctgcgaaagtcaaggagttcaataagtgttgaatcaaggaaggctcaaggttctgataatgtctggttgcattctggcagaggcacttccaaccaacctgtaactttggggactacttgtaacggcagcaaaatgttgaatcctcctgttaaggcggatagtacttgtaacagtgaagcatctgaaaatggaacttcagagacagaattgaaatcaaatggcacatctaatctacccatgaatacagaagtaattttcaggagaataagaaaatcagatagaaaacctgttcctcattatgaagattgtacaacaccaaataaagatgaattacgtgctgagtacagtgaaatcctttcagattctccaaattcaaagaatgaagtatgcaagtcagatggagatgagcacttgccattggtcaaaagagcaagggtccgaatgggaaggtctcatttggaggattcaccagttgatgaagttgatgtttctaataagaagccagagcttacaacaacctcagaccaatgcgataggaatggtaaacctgcaagtcctgtcaatgattattcagctgatcaggtgtccacagttgtaagttctgcttctaatccgtcctgcaaatcagacatgcctatcctgtcaaaggaaggtcatcttccttggaagaataaagaataccacccaaaaattttagcattagatgtggaagctgctttgcctccttcaaaacgccttcatcgtgccttagaagcgatgtctgctaatgtcgctgagaatgtcaagaatatacctgaagtgacaggaccaaatgaaatggctctaaatggctctctgttgacagcaaacaaccattctaataaatctgctgatgcagtagtcacagtatccaataaacctgtaatagttcaatgctctgaaccttctctagacacacagtttaagcatacccaatcaggtaaatgtacgtcagaatcaactttacaaaataataccatccctgattctgcttcagttccatcaaaagaaaatgatatcatgttaaaagaaaatgataccaatggttcctgggtttgtagtgaactagataatggttcctgtgggaaaacttcagccctttgtatgatattgaatcgacccggacttgatgttacacaaaccacatctgtacctgaccggttatcttcgtcttttgagaaagaaagtgaaaatgtggcaacaagcagtgtcaaagagacaaaaccttttggctcagctgtttgtgaggttgacagaagtgcagaagcagaacaaattgaccattcaaacaacaatgtgattagcaacactatacggcatagtgagactattgtagtggattcagtgaacaatgtgggagatacggcaagcaactcttcaatggctactaaatcatccagtatacaatccgatgcagacacccggacttctgaagtgcatacattctcatctctggcgttgaaagaactgaaccatagaaaaattaaggacagaagcacttctccagattcaatgccgatgaaagaacttatagctgtggcacaagctagaaggttttctcgactgacttcctttccagatatcttcctaaatgccaagtatattcctgaaagagccacaaatacacctcccaaggaaggctcacacaggcagttgtcaccctcaaatcggatattcaggtccacctctggaaatgataatgttcattctaggagtccttttgatattatccaacagaagaaattagcagggcatgttgaagccaatgcagcacgaaggtctttcaaagatttcctcagtacattgacaagaaccaaagaaagtatatcacgcgcgacgcgtcttgctattgagtgtgctaagtttggcattgctggcaattgacattatcgttgaacacttggaaaaggaatcaaatttatataagagggtggatctcttctttcttgtagattcaataacacaatgctctcgcaaccagaaaggtggagctggagatgtatatccctctctcattcaggcagttctacctcgaatactctatgctgctgcacctcctgggaactcagcatgggagaatcgaaagcaatgcctaaaggttttgaaactttggcttgaaaggagaacactttcagaatatattatccgtcaccatattaaagaaattgagactatcatgaggcatcatttggaagttctcgccgtccttcatgcccggggagagctctaaatgaccctttg

SEQ ID NO: 212259 - DNA, 3509 bp, Zea Mays
cgccctcctccgtcctcctcctccccctcccctcgactctggggtctggaactctggactcttccaccgaactgccccgctctctcttgactagcgcagtcgcacgctcgacggctcgagtaaacaataaactactaaaaaaatgcgcacaaaataaaaccgctggcgaaccaaaaaataagaatccccaaagctacctctcctgccgctcctcccctctcatgcctcctcccctcgctgccgccgccgccgccgccgttgagagaactaggaccacgggcgggtggagcactggcatcctgcggactcgccgccgctccacgggcgcaggcgctagccgtcgcggggtcgctctgtgagccctggtcggtgctggggggttcggcggcggtctggtagacgggcggtggcgggcgatggcgccggcgaagaggaagcgcgcagcggctgcggcggccgcggcggcggctgccgcggccaagtggaaggtaggggacctcgtgctcgctaagatgaagggcttcccggcctggccggctatgattagtgaaccagaacagtggaagatgccttctactaaaaagaaaccgctggtctatttctatggtactaaacagattgctttctgcaattatgctgatctcgaggcattcaccgaagagaaaaaaagatctctacttgctaagcgacatggtaaaggggctgattttttaagagcagttgatgagataattgaagtttatgattctctaaaggagaaaggtagtaacaaggatgacttggctgctgaagtaaagccaggtgtagaaaagtttgctgataataatgtttgcatggatactgaaaatatggtcagtagctcctatatacaaaatcatcaagagatagatgatcattatgtcactaccaagggtcatgacatgatcaagtctgacaggctttcagtcactataatgagtgacgaacgctgtgttataaattctgctcctgatgagcctactgaaaatgtatctgtacttgatgaaatgagggagatttctttgcgtactaactcattttcaaataagcaaagggatgcacagccacaaaattgctacacacgtagtagggttccatctctgcgaaagtcaaggagttcaataagtgttgaatcaaggaaggctcaaggttctggtaatttttttgatcataccaatttgtcttctattgggtcagttcctaatgaaaataaggaacgctccagtcgtcataggcatgcggatgacaaagctaactcaggttctgtttctatattagataatgtctggttgcattctggcagaggcacttccaaccaacctgtaactttggggactacttgtaacggcagcaaaatgttgaatcctcctgttaaggcggatagtacttgtaacagtgaagcatctgaaaatggaacttcagagacagaattgaaatcaaatggcacatctaatctacccatgaatacagaagtaattttcaggagaataagaaaatcagatagaaaacctgttcctcattatgaagattgtacaacaccaaataaagatgaattacgtgctgagtacagtgaaatcctttcagattctccaaattcaaagaatgaagtatgcaagtcagatggagatgagcacttgccattggtcaaaagagcaagggtccgaatgggaaggtctcatttggaggattcaccagttgatgaagttgatgtttctaataagaagccagagcttacaacaacctcagaccaatgcgataggaatggtaaacctgcaagtcctgtcaatgattattcagctgatcaggtgtccacagttgtaagttctgcttctaatccgtcctgcaaatcagacatgcctatcctgtcaaaggaaggtcatcttccttggaagaataaagaataccacccaaaaattttagcattagatgtggaagctgctttgcctccttcaaaacgccttcatcgtgccttagaagcgatgtctgctaatgtcgctgagaatgtcaagaatatacctgaagtgacaggaccaaatgaaatggctctaaatggctctctgttgacagcaaacaaccattctaataaatctgctgatgcagtagtcacagtatccaataaacctgtaatagttcaatgctctgaaccttctctagacacacagtttaagcatacccaatcaggtaaatgtacgtcagaatcaactttacaaaataataccatccctgattctgcttcagttccatcaaaagaaaatgatatcatgttaaaagaaaatgataccaatggttcctgggtttgtagtgaactagataatggttcctgtgggaaaacttcagccctttgtatgatattgaatcgacccggacttgatgttacacaaaccacatctgtacctgaccggttatcttcgtcttttgagaaagaaagtgaaaatgtggcaacaagcagtgtcaaagagacaaaaccttttggctcagctgtttgtgaggttgacagaagtgcagaagcagaacaaattgaccattcaaacaacaatgtgattagcaacactatacggcatagtgagactattgtagtggattcagtgaacaatgtgggagatacggcaagcaactcttcaatggctactaaatcatccagtatacaatccgatgcagacacccggacttctgaagtgcaggcatacattctcatctctggcgttgaaagaactgaaccatagaaaaattaaggacagaagcacttctccagattcaatgccgatgaaagaacttatagctgtggcacaagctagaaggttttctcgactgacttcctttccagatatcttcctaaatgccaagtatattcctgaaagagccacaaatacacctcccaaggaaggctcacacaggcagttgtcaccctcaaatcggatattcaggtccacctctggaaatgataatgttcattctaggagtccttttgatattatccaacagaagaaattagcagggcatgttgaagccaatgcagcacgaaggtctttcaaagatttcctcagtacattgacaagaaccaaagaaagtatatcacgcgcgacgcgtcttgctattgagtgtgctaagtttggcattgctggtgaggcaattgacattatcgttgaacacttggaaaaggaatcaaatttatataagagggtggatctcttctttcttgtagattcaataacacaatgctctcgcaaccagaaaggtggagctggagatgtatatccctctctcattcaggcagttctacctcgaatactctatgctgctgcacctcctgggaactcagcatgggagaatcgaaagcaatgcctaaaggttttgaaactttggcttgaaaggagaacactttcagaatatattatccgtcaccatattaaagaaattgagactatcatgaggcatcatttggaagttctcgccgtccttcatgcccggggagagctctaaatgaccctttg

SEQ ID NO: 212260 - DNA, 936 bp, Zea Mays
atcaacaaaaaaatattataatccctaaccctaataacatttcctactcctgccggatcagactagcgagccaagccaccgacggccgacgtcgagcctccgcggccgagcctccgcctagcaccaactccgtcgtcgatcgtcctatgcgaccacgcccccgtccgccttccgtctcctgcctccactgagtcgcgggcgcgacatcggggaacgccaaggctgagcttcgcccgggccaggagcttctcccggcagacccacccccgcccaacggagctccatgcctccgcccagggccattgtccgagctacgccccacgctcctgtccagtgccctggccacttagatggttctgctcagtcatgtttagtgtctggttcaacaacttcaacttcaaccaagggacgcatctatcacaagacgtatggttgccaaatgaatataagtgacatggagattgtgctttctatcatgaaaaatgaagcgatacgggtctgccatctctatatgacatttggctgtaaatggattatgatcatagttgaataagttggagcgtcaggtcaatggtccccccaataattaaactagatggtggagtggagctttgttttgggatgatgcaagcaacttttatgtttcagaacattgtactcaactgatgcttgtggccgttgaacctattctacttacttttggatttaagttaaggatagttaaaaatatttgatgtttaatacttgtgttggatgttttatgtgtcaattctatgtggatgctagaaaagttgtgtacactcatgttatttgatgaaattgtatgcacgatttggtttgaattcaattgaatattgatttttattaattaatgatgaactaaaaacgtaatgaacctaccatgtttgttgccacgtcatcatgctttatgacgaa

SEQ ID NO: 212261 - DNA, 968 bp, Zea Mays
taatccctaaccctaataacatttcctactcctgccggatcagactagcgagccaagccaccgacggccgacgtcgagcctccgcggccgagcctccgcctagcaccaactccgtcgtcgatcgtcctatgcgaccacgcccccgtccgccttccgtctcctgcctccactgagtcgcgggcgcgacatcggggaacgccaaggctgagcttcgcccatacgcctaccgccctgttatgccccgaaccgccgtgctgaggtccgcccaggccgggccaggagcttctcccggcagacccacccccgcccaacggagctccatgcctccgcccagggccattgtccgagctacgccccacgctcctgtccagtgccctggccacttagatggttctgctcagtcatgtgtctggttcaacaacttcaacttcaaccaagggacgcatctatcacaagacgtatggttgccaaatgaatataagtgacatggagattgtgctttctatcatgaaaaatgaagcgatacgggtctgccatctctatatgacatttggctgtaaatggattatgatcatagttgaataagttggagcgtcaggtcaatggtccccccaataattaaactagatggtggagtggagctttgttttgggatgatgcaagcaacttttatgtttcagaacattgtactcaactgatgcttgtggccgttgaacctattctacttacttttggatttaagttaaggatagttaaaaatatttgatgtttaatacttgtgttggatgttttatgtgtcaattctatgtggatgctagaaaagttgtgtacactcatgttatttgatgaaattgtatgcacgatttggtttgaattcaattgaatattgatttttattaattaatgatgaactaaaaacgtaatgaacctaccatgtttgttgccacgtcatcatgctttatgacgaa

SEQ ID NO: 212262 - DNA, 910 bp, Zea Mays
aaccctaataacatttcctactcctgccggatcagactagcgagccaagccaccgacggccgacgtcgagcctccgcggccgagcctccgcctagcaccaactccgtcgtcgatcgtcctatgcgaccacgcccccgtccgccttccgtctcctgcctccactgagtcgcgggcgcgacatcggggaacgccaaggctgagcttcgcccgggccaggagcttctcccggcagacccacccccgcccaacggagctccatgcctccgcccagggccattgtccgagctacgccccacgctcctgtccagtgccctggccacttagatggttctgctcagtcatggtatttgtctggttcaacaacttcaacttcaaccaagggacgcatctatcacaagacgtatggttgccaaatgaatataagtgacatggagattgtgctttctatcatgaaaaatgaagcgatacgggtctgccatctctatatgacatttggctgtaaatggattatgatcatagttgaataagttggagcgtcaggtcaatggtccccccaataattaaactagatggtggagtggagctttgttttgggatgatgcaagcaacttttatgtttcagaacattgtactcaactgatgcttgtggccgttgaacctattctacttacttttggatttaagttaaggatagttaaaaatatttgatgtttaatacttgtgttggatgttttatgtgtcaattctatgtggatgctagaaaagttgtgtacactcatgttatttgatgaaattgtatgcacgatttggtttgaattcaattgaatattgatttttattaattaatgatgaactaaaaacgtaatgaacctaccatgtttgttgccacgtcatcatgctttatgacgaa

SEQ ID NO: 212263 - DNA, 1669 bp, Zea Mays
aaccctaataacatttcctactcctgccggatcagactagcgagccaagccaccgacggccgacgtcgagcctccgcggccgagcctccgcctagcaccaactccgtcgtcgatcgtcctatgcgaccacgcccccgtccgccttccgtctcctgcctccactgagtcgcgggcgcgacatcggggaacgccaaggctgagcttcgcccgggccaggagcttctcccggcagacccacccccgcccaacggagctccatgcctccgcccagggccattgtccgagctacgccccacgctcctgtccagtgccctggccacttagatggttctgctcagtcatggtatttgtctggttcaacaacttcaacttcaaccaagggacgcatctatcacaagacgtatggttgccaaatgaatataagtgacatggagattgtgctttctatcatgaaaaatgaaggttatattgaaattgttcctcatcctgagagtgcatataatatttatcaacacctatgacatctaggacaatgtagataatatttatcaacatgatactgatgtatccttaatccttactgttctccatatattactcccatggtacattgttgctctggagattttcttacctatgctgttatgatcataactagaatgaccaattcgttgaacaggagtgcaagaaacttgtcattgttcacctatccgagagtattttgttgttctaaggaatttaaaactgcttgttgttccactatttgaactctgcaacaatgttcaggtgatgcagcattcatagtctcgttgtcgatggtgtccggctgaaactttggaaactttacacatccattgagttctcgatctgggagcagtaaatttatcttttttgaagtagagattgtacatggcattcttgttttatctattttgtttcgattaaccttgtttgtcttaaactgcttacattccatatataggttactgcctccattctacagggtattgctagtatgatgattgaaatacacaatttattgatattcagacttaatatattcttgtgagcctttccagccataactgttgtacatggttttccttcttttgtttggccataaccagtgtgtgctaatattgtatattgtgtcatgctttcaagtttcaagaatttattaagattttgtttctaaaacctgtttcatgtacattgatgcagcgatacgggtctgccatctctatatgacatttggctgtaaatggattatgatcatagttgaataagttggagcgtcaggtcaatggtccccccaataattaaactagatggtggagtggagctttgttttgggatgatgcaagcaacttttatgtttcagaacattgtactcaactgatgcttgtggccgttgaacctattctacttacttttggatttaagttaaggatagttaaaaatatttgatgtttaatacttgtgttggatgttttatgtgtcaattctatgtggatgctagaaaagttgtgtacactcatgttatttgatgaaattgtatgcacgatttggtttgaattcaattgaatattgatttttattaattaatgatgaactaaaaacgtaatgaacctaccatgtttgttgccacgtcatcatgctttatgacgaa

SEQ ID NO: 212264 - DNA, 5568 bp, Zea Mays
cgactcccaactcccgaccggctcgcgagctatctcggggacacaaccgactgcctcgcgcctcttcctcatccgtcgtcaccggttgcttcccaccgccgccttgcgcctccatgctctcagcaatgatgggaatagaaggcattgcagccacagtcaccgaggaccctgaaccctcaattcctccaggatttggaccttttgctgcctcggcatcatggggaatccaaaacgatgttaaacctgctgatgatcattctagttctgttttagcattacagagcatcgacgacgatgtggaaattttggaatatctatccagttcagtggatcaccagagtgacacaggttgctgtatttctgggagcaatacctgtaggaaatcactgcgtaatagacctccaatagattatagccgctttgatcagattgcagatgaagattctgatgctgaagtagcagacaagggtgtaaatgcagtgaaacacagacaacaattccctaaaggagtacttcgaggatgtccagaatgtgccaattgtcaaaaggttattgcaagatggaatccatctggtgcacgtaggcctgttcttgatgaggctcctgtttactatcctaccgaggaggaatttcaggacacattaaaatacattgagattatccgcccaacagcagaaccatatggaatatgccgtattgttccaccagcttcatggaagcctccatgccttcttaaagagaaaaacatttgggagtgctcaaaattttctactcgggtacagaaggttgacaagctccaaaatcgtaaatcgcccaagaagagcagaagaggtggaatgatgaagaagcgtagaaagatttcggagactgaagaaaacaatcaccatcaaattggaatgcagcaaaaccaagagagatttggatttgaaccaggaccagagttcacactacagatgtttcagaagtatgcagatgacttcagtgatcagtattttatgaaagataaatgcagagattcaccaccatcagtggaagatattgaaggcgagtattggcgcatagttgaaagaccgacagaggagatagaggtaatatatggtgccgatttggagactggaacttttggcagtgggtttccaaagttatgtcctgaaatgaaatctgatgtggaggataaatatgcacaatctgggtggaatctaaataacctgcctagactacaaggttcggttctttcttttgaaggcggtgacatttctggtgttttagtgccttggctttatgtcggcatgtgtttttcatctttctgctggcatgttgaagatcatcatttgtactcactgaactacatgcattggggtgctccaaagatgtggtatggagttccagggaaggatgctgtgaatttggaggctgcaatgaggaaacatcttcctgagttatttgaggagcaacctgatttgcttcacaacttagttactcagttctcaccatcattgcttaaatctgaaggagtaccagtctaccgatgtgttcagcatgagggagagtttgtcctgacgttcccacgggcataccatgctggttttaattgtggcttcaattgtgcagaagctgttaatgtggcacccattgattggttgccggttggacaaaatgctgttgatctttatcgtgaacaagctcggaaaataactatctcccatgataagctgttgcttggggctgcaagagaagcaataagagctcagtgggacatcctatttctcaagaggaattcttctgttaacttgaggtggaaaagcatatgtggacctgatagcacaatatgcaagtcactgaaggcacgaattgaaatggagttggtacaaagacaaaatatatcctctccatgtcaatctaggaaaatggatagtgagtttgattctactgatagggaatgtgcattgtgttactatgatctgcatctttcagcttcaggctgtccatgctccccagagaaatatgcttgcctggtacatgcaaagcagctttgttcatgcgattgggacaaaaggtttttcctatttcgttatgatgttaatgagttgaatatcttagctgatgctttagggggaaagctaagtgccattcacagatggggtgtctctgatcttggattaagtttgagctcctgtgtcaaacgggaaaaggtccaagattccaagactgttcgcagattaactgatggcccaagacggtcctacatgtcacaggcatcaacagtatcattgattccttcttctgttagcactgaacagaaaaagaatgaagataagacactggatttaggttgcccaggtatgaatttaccaaaaataagtccggaggcaaataatctgcgtccttcgacagaacagataaaatcagaaaatctctcacagctaaaggaaccatgtgtgaagaatgaattatcttgtccgaccagcaatggtaccagccaagaacataaaggagggattggaggccacaaacttgcagcagcaagcatgatggttctttctggtcaatcatttcctgcaaatgctggtgaatcagtgagaaatgcgcatgtcttggcagtatttaaagagggtagagactgtacatcttcacttacacttagggagtatcataacaggccagtgtcaatgattgataatggagctaacatgaagctggatctggaaaacatagacaattctcatatgttgatgtcatcaccagacttcaatgcaactgtatgtcattcttacaaggatcaaacattcttaacactggaaactaatacctctgtgatgactgagaaagatagcagtcaggcccgtaatgcaagccagcagtttgtcagtactgctttaagaacacaaaatgtgtctcaggaaccattgtgtaccgcgattgctccaaagcaactcatagatcctcaagttcagaaaaaatcatatggtgtttttggttctggcagtgcccatcttgggcatctgactgttggtaatcagcaactaaatgagagatggcatcaaagacaatctgattctttatccagtgtggaagttagagctaggggtcattcagctatgatagtgcagcctgctctggaaaatcacagcagaaatggagttgcacagaagggtcctcgcatagctaatgttgtacatagattcaagtgctctgttgaacctatagaaattggtgctgtgttatctgggaagttgtggtcctcaagtcaagcaatcttcccaaaagggtttaagagcagagtaaaatacttcagtgttgtagatccagtacaaatgacatactacatatctgaaatattggacgctggacagcagggaccactttttatggtgactgtagaaaactgtcctggtgaaattttcataaacatctctcctaccaagtgctggaacatggttcgtgaaaggctcaatatggaaataaggaggcagctcaatatgggaagagctaaccttcctacactacagcctccaggatcagttgatggccatgaaatgtttgggttgttaacaccagcaatagttcaggcaattgaggcccgggacagagattatatctgtacagagtactggcgatcaaggccccatgcaacaattgagaatcgagacaatcagaatatgtcacctcaggatccaccccttgttgcactgagggggctcttccagcgggctaattgtgatgaactgcgagcactacgcagtttgctgatgagcaatagaattctgggcgacaattctaggcagcaggcttgccaaatccttgatgaggagattgcgaagcaatggcactgaccagcgtaaatacaggatgttgtactaaccaattgtttggcatgattttgttttgacgggataaatcagttttaaggcttgcttcttccgttgcccttgtgcccattcttttcattcttgtgaccatacccaattctttattgcaagtggtgtcaacaagcatgaggctacagctgcatcacctgcaaggaagtcaaaaggacttattttaagtaaagctttaaaggcgcagaaagacgtcaaagatgcaagtgctcagatggccataggcaacctgtagtctgaagttattgggcttcaccgtgatcttgaagaaaaagaaataaagctaaatacttttgccaaagatctgattgaagaccacactaagttctagaaatcctctaaagagaaagacaacaaaatttcgaagctagaagttgacaactcgtagagcatgaaacacattgcagagcttgaggcctagataaaagagcaagttgtagcacacaaaggcaaaatggccaaattgaaagagaaggtcaaagatactagtgtaatttttgaggttgaaaaggtgaagcataaaatttctgataatgagagaaccacattatagaaaattgttgatgaactttgggagtctagcgaagaatgcttctactccactgcccagtgttgtaaaaaatttaaaaaataccttcgtctccataggagcattttcaagtgaaaaagaatttgtgcgcggcgacgcctctagtgcggtgaagtggataggagaagtggaggccttcgatgaagtattatccacccgtggtgattattgtgcgtgtataggggcacacgttgcaactttgctgcttgacaaggctagatgcgagcatgtaaaagttgccagctagccagagtttaaatattatgttgatgacaataagattcctttagctgaagcaaccgagcttgggagaaagttttataccgatgtctggcttggtggagggaagaagttagtagatgaagttgctagagaaaatgtaagaaatgtttctttttatcgtttatttttctgtttcgggacttagaattttagtgtttacacaaagactcacaagcttacaaaaaaggcggaagcaataaaggaacctttaagattaaaggaactcgaagatgccctttcgccagaacccaaagagtacaatccagatgaagattcactactgcaggattggctagcacatctggacatgttgtataaaacagtagacaaagttgttgatgatgttttcaataatgttcccgaaagagttaccttttcgaaatagtatatgattattataagggggcttcggcataaaggtcttctctcatggcaaagacatacagtgtgaagatgtaacccgaaggtgataagaatggtcgccgaagctatagccaaagagcttcgacttaatatggtgacgaagaccaaatatgatgctgaccgaaaggggaaaagactatttagtccttaatgattcatgttatgattataaatagatgccagggacataaatgtacttttacctggaatgtgtcccgtgcctataaatagataaacagtagcaccgtactgttcacgctgaattatagtcactctctcgcgtcttcagcttcgagcaagccgaaggtatcaatgtaatatgaattatgttgatattcatacatgttttatgggatgcaaatatgaatgaattaacaagatacaattactatcttc

SEQ ID NO: 212265 - DNA, 5124 bp, Zea Mays
gactcggtggcggcgtcagaggctccccctcctgcctcgcgccctcgcctccggtcctccgcacaccggccggcgaccctgctgtctcccggccccggcgggcagtgggagccagcagctgctgctccaacaagcaatgatgggaatagaaggcattgcagccacagtcaccgaggaccctgaaccctcaattcctccaggatttggaccttttgctgcctcggcatcatggggaatccaaaacgatgttaaacctgctgatgatcattctagttctgttttagcattacagagcatcgacgacgatgtggaaattttggaatatctatccagttcagtggatcaccagagtgacacaggttgctgtatttctgggagcaatacctgtaggaaatcactgcgtaatagacctccaatagattatagccgctttgatcagattgcagatgaagattctgatgctgaagtagcagacaagggtgtaaatgcagtgaaacacagacaacaattccctaaaggagtacttcgaggatgtccagaatgtgccaattgtcaaaaggttattgcaagatggaatccatctggtgcacgtaggcctgttcttgatgaggctcctgtttactatcctaccgaggaggaatttcaggacacattaaaatacattgagattatccgcccaacagcagaaccatatggaatatgccgtattgttccaccagcttcatggaagcctccatgccttcttaaagagaaaaacatttgggagtgctcaaaattttctactcgggtacagaaggttgacaagctccaaaatcgtaaatcgcccaagaagagcagaagaggtggaatgatgaagaagcgtagaaagatttcggagactgaagaaaacaatcaccatcaaattggaatgcagcaaaaccaagagagatttggatttgaaccaggaccagagttcacactacagatgtttcagaagtatgcagatgacttcagtgatcagtattttatgaaagataaatgcagagattcaccaccatcagtggaagatattgaaggcgagtattggcgcatagttgaaagaccgacagaggagatagaggtaatatatggtgccgatttggagactggaacttttggcagtgggtttccaaagttatgtcctgaaatgaaatctgatgtggaggataaatatgcacaatctgggtggaatctaaataacctgcctagactacaaggttcggttctttcttttgaaggcggtgacatttctggtgttttagtgccttggctttatgtcggcatgtgtttttcatctttctgctggcatgttgaagatcatcatttgtactcactgaactacatgcattggggtgctccaaagatgtggtatggagttccagggaaggatgctgtgaatttggaggctgcaatgaggaaacatcttcctgagttatttgaggagcaacctgatttgcttcacaacttagttactcagttctcaccatcattgcttaaatctgaaggagtaccagtctaccgatgtgttcagcatgagggagagtttgtcctgacgttcccacgggcataccatgctggttttaattgtggcttcaattgtgcagaagctgttaatgtggcacccattgattggttgccggttggacaaaatgctgttgatctttatcgtgaacaagctcggaaaataactatctcccatgataagctgttgcttggggctgcaagagaagcaataagagctcagtgggacatcctatttctcaagaggaattcttctgttaacttgaggtggaaaagcatatgtggacctgatagcacaatatgcaagtcactgaaggcacgaattgaaatggagttggtacaaagacaaaatatatcctctccatgtcaatctaggaaaatggatagtgagtttgattctactgatagggaatgtgcattgtgttactatgatctgcatctttcagcttcaggctgtccatgctccccagagaaatatgcttgcctggtacatgcaaagcagctttgttcatgcgattgggacaaaaggtttttcctatttcgttatgatgttaatgagttgaatatcttagctgatgctttagggggaaagctaagtgccattcacagatggggtgtctctgatcttggattaagtttgagctcctgtgtcaaacgggaaaaggtccaagattccaagactgttcgcagattaactgatggcccaagacggtcctacatgtcacaggcatcaacagtatcattgattccttcttctgttagcactgaacagaaaaagaatgaagataagacactggatttaggttgcccaggtatgaatttaccaaaaataagtccggaggcaaataatctgcgtccttcgacagaacagataaaatcagaaaatctctcacagctaaaggaaccatgtgtgaagaatgaattatcttgtccgaccagcaatggtaccagccaagaacataaaggagggattggaggccacaaacttgcagcagcaagcatgatggttctttctggtcaatcatttcctgcaaatgctggtgaatcagtgagaaatgcgcatgtcttggcagtatttaaagagggtagagactgtacatcttcacttacacttagggagtatcataacaggccagtgtcaatgattgataatggagctaacatgaagctggatctggaaaacatagacaattctcatatgttgatgtcatcaccagacttcaatgcaactgtatgtcattcttacaaggatcaaacattcttaacactggaaactaatacctctgtgatgactgagaaagatagcagtcaggcccgtaatgcaagccagcagtttgtcagtactgctttaagaacacaaaatgtgtctcaggaaccattgtgtaccgcgattgctccaaagcaactcatagatcctcaagttcagaaaaaatcatatggtgtttttggttctggcagtgcccatcttgggcatctgactgttggtaatcagcaactaaatgagagatggcatcaaagacaatctgattctttatccagtgtggaagttagagctaggggtcattcagctatgatagtgcagcctgctctggaaaatcacagcagaaatggagttgcacagaagggtcctcgcatagctaatgttgtacatagattcaagtgctctgttgaacctatagaaattggtgctgtgttatctgggaagttgtggtcctcaagtcaagcaatcttcccaaaagggtttaagagcagagtaaaatacttcagtgttgtagatccagtacaaatgacatactacatatctgaaatattggacgctggacagcagggaccactttttatggtgactgtagaaaactgtcctggtgaaattttcataaacatctctcctaccaagtgctggaacatggttcgtgaaaggctcaatatggaaataaggaggcagctcaatatgggaagagctaaccttcctacactacagcctccaggatcagttgatggccatgaaatgtttgggttgttaacaccagcaatagttcaggcaattgaggcccgggacagagattatatctgtacagagtactggcgatcaaggccccatgcaacaattgagaatcgagacaatcagaatatgtcacctcaggatccaccccttgttgcactgagggggctcttccagcgggctaattgtgatgaactgcgagcactacgcagtttgctgatgagcaatagaattctgggcgacaattctaggcagcaggcttgccaaatccttgatgaggagattgcgaagcaatggcactgaccagcgtaaatacaggatgttgtactaaccaattgtttggcatgattttgttttgacgggataaatcagttttaaggcttgcttcttccgttgcccttgtgcccattcttttcattcttgtgaccatacccaattctttattgcaagtggtgtcaacaagcatgaggctacagctgcatcacctgcaaggaagtcaaaaggacttattttaagtaaagctttaaaggcgcagaaagacgtcaaagatgcaagtgctcagatggccataggcaacctgtagtctgaagttattgggcttcaccgtgatcttgaagaaaaagaaataaagctaaatacttttgccaaagatctgattgaagaccacactaagttctagaaatcctctaaagagaaagacaacaaaatttcgaagctagaagttgacaactcgtagagcatgaaacacattgcagagcttgaggcctagataaaagagcaagttgtagcacacaaaggcaaaatggccaaattgaaagagaaggtcaaagatactagtgtaatttttgaggttgaaaaggtgaagcataaaatttctgataatgagagaaccacattatagaaaattgttgatgaactttgggagtctagcgaagaatgcttctactccactgcccagtgttgtaaaaaatttaaaaaataccttcgtctccataggagcattttcaagtgaaaaagaatttgtgcgcggcgacgcctctagtgcggtgaagtggataggagaagtggaggccttcgatgaagtattatccacccgtggtgattattgtgcgtgtataggggcacacgttgcaactttgctgcttgacaaggctagatgcgagcatgtaaaagttgccagctagccagagtttaaatattatgttgatgacaataagattcctttagctgaagcaaccgagcttgggagaaagttttataccgatgtctggcttggtggagggaagaagttagtagatgaagttgctagagaaaatgtaagaaatgtttctttttatcgtttatttttctgtttcgggacttagaattttagtgtttacacaaagactcacaagcttacaaaaaaggcggaagcaataaaggaacctttaagattaaaggaactcgaagaacccaaagagtacaatccagatgaagattcactactgcaggattggctagcacatctggacatgttgtataaaacagtagacaaagttgttgatgatgttttcaataatgttcccgaaagagttaccttttcg

SEQ ID NO: 212266 - DNA, 4983 bp, Zea Mays
cccaactcccgaccggctcgcgagctatctcggggacacaaccgactgcctcgcgcctcttcctcatccgtcgtcaccggttgcttcccaccgccgccttgcgcctccatgctctcagcaatgatgggaatagaaggcattgcagccacagtcaccgaggaccctgaaccctcaattcctccaggatttggaccttttgctgcctcggcatcatggggaatccaaaacgatgttaaacctgctgatgatcattctagttctgttttagcattacagagcatcgacgacgatgtggaaattttggaatatctatccagttcagtggatcaccagagtgacacaggttgctgtatttctgggagcaatacctgtaggaaatcactgcgtaatagacctccaatagattatagccgctttgatcagattgcagatgaagattctgatgctgaagtagcagacaagggtgtaaatgcagtgaaacacagacaacaattccctaaaggagtacttcgaggatgtccagaatgtgccaattgtcaaaaggttattgcaagatggaatccatctggtgcacgtaggcctgttcttgatgaggctcctgtttactatcctaccgaggaggaatttcaggacacattaaaatacattgagattatccgcccaacagcagaaccatatggaatatgccgtattgttccaccagcttcatggaagcctccatgccttcttaaagagaaaaacatttgggagtgctcaaaattttctactcgggtacagaaggttgacaagctccaaaatcgtaaatcgcccaagaagagcagaagaggtggaatgatgaagaagcgtagaaagatttcggagactgaagaaaacaatcaccatcaaattggaatgcagcaaaaccaagagagatttggatttgaaccaggaccagagttcacactacagatgtttcagaagtatgcagatgacttcagtgatcagtattttatgaaagataaatgcagagattcaccaccatcagtggaagatattgaaggcgagtattggcgcatagttgaaagaccgacagaggagatagaggtaatatatggtgccgatttggagactggaacttttggcagtgggtttccaaagttatgtcctgaaatgaaatctgatgtggaggataaatatgcacaatctgggtggaatctaaataacctgcctagactacaaggttcggttctttcttttgaaggcggtgacatttctggtgttttagtgccttggctttatgtcggcatgtgtttttcatctttctgctggcatgttgaagatcatcatttgtactcactgaactacatgcattggggtgctccaaagatgtggtatggagttccagggaaggatgctgtgaatttggaggctgcaatgaggaaacatcttcctgagttatttgaggagcaacctgatttgcttcacaacttagttactcagttctcaccatcattgcttaaatctgaaggagtaccagtctaccgatgtgttcagcatgagggagagtttgtcctgacgttcccacgggcataccatgctggttttaattgtggcttcaattgtgcagaagctgttaatgtggcacccattgattggttgccggttggacaaaatgctgttgatctttatcgtgaacaagctcggaaaataactatctcccatgataagctgttgcttggggctgcaagagaagcaataagagctcagtgggacatcctatttctcaagaggaattcttctgttaacttgaggtggaaaagcatatgtggacctgatagcacaatatgcaagtcactgaaggcacgaattgaaatggagttggtacaaagacaaaatatatcctctccatgtcaatctaggaaaatggatagtgagtttgattctactgatagggaatgtgcattgtgttactatgatctgcatctttcagcttcaggctgtccatgctccccagagaaatatgcttgcctggtacatgcaaagcagctttgttcatgcgattgggacaaaagggggaaagctaagtgccattcacagatggggtgtctctgatcttggattaagtttgagctcctgtgtcaaacgggaaaaggtccaagattccaagactgttcgcagattaactgatggcccaagacggtcctacatgtcacaggcatcaacagtatcattgattccttcttctgttagcactgaacagaaaaagaatgaagataagacactggatttaggttgcccaggtatgaatttaccaaaaataagtccggaggcaaataatctgcgtccttcgacagaacagataaaatcagaaaatctctcacagctaaaggaaccatgtgtgaagaatgaattatcttgtccgaccagcaatggtaccagccaagaacataaaggagggattggaggccacaaacttgcagcagcaagcatgatggttctttctggtcaatcatttcctgcaaatgctggtgaatcagtgagaaatgcgcatgtcttggcagtatttaaagagggtagagactgtacatcttcacttacacttagggagtatcataacaggccagtgtcaatgattgataatggagctaacatgaagctggatctggaaaacatagacaattctcatatgttgatgtcatcaccagacttcaatgcaactgtatgtcattcttacaaggatcaaacattcttaacactggaaactaatacctctgtgatgactgagaaagatagcagtcaggcccgtaatgcaagccagcagtttgtcagtactgctttaagaacacaaaatgtgtctcaggaaccattgtgtaccgcgattgctccaaagcaactcatagatcctcaagttcagaaaaaatcatatggtgtttttggttctggcagtgcccatcttgggcatctgactgttggtaatcagcaactaaatgagagatggcatcaaagacaatctgattctttatccagtgtggaagttagagctaggggtcattcagctatgatagtgcagcctgctctggaaaatcacagcagaaatggagttgcacagaagggtcctcgcatagctaatgttgtacatagattcaagtgctctgttgaacctatagaaattggtgctgtgttatctgggaagttgtggtcctcaagtcaagcaatcttcccaaaagggtttaagagcagagtaaaatacttcagtgttgtagatccagtacaaatgacatactacatatctgaaatattggacgctggacagcagggaccactttttatggtgactgtagaaaactgtcctggtgaaattttcataaacatctctcctaccaagtgctggaacatggttcgtgaaaggctcaatatggaaataaggaggcagctcaatatgggaagagctaaccttcctacactacagcctccaggatcagttgatggccatgaaatgtttgggttgttaacaccagcaatagttcaggcaattgaggcccgggacagagattatatctgtacagagtactggcgatcaaggccccatgcaacaattgagaatcgagacaatcagaatatgtcacctcaggatccaccccttgttgcactgagggggctcttccagcgggctaattgtgatgaactgcgagcactacgcagtttgctgatgagcaatagaattctgggcgacaattctaggcagcaggcttgccaaatccttgatgaggagattgcgaagcaatggcactgaccagcgtaaatacaggatgttgtactaaccaattgtttggcatgattttgttttgacgggataaatcagttttaaggcttgcttcttccgttgcccttgtgcccattcttttcattcttgtgaccatacccaattctttattgcaagtggtgtcaacaagcatgaggctacagctgcatcacctgcaaggaagtcaaaaggacttattttaagtaaagctttaaaggcgcagaaagacgtcaaagatgcaagtgctcagatggccataggcaacctgtagtctgaagttattgggcttcaccgtgatcttgaagaaaaagaaataaagctaaatacttttgccaaagatctgattgaagaccacactaagttctagaaatcctctaaagagaaagacaacaaaatttcgaagctagaagttgacaactcgtagagcatgaaacacattgcagagcttgaggcctagataaaagagcaagttgtagcacacaaaggcaaaatggccaaattgaaagagaaggtcaaagatactagtgtaatttttgaggttgaaaaggtgaagcataaaatttctgataatgagagaaccacattatagaaaattgttgatgaactttgggagtctagcgaagaatgcttctactccactgcccagtgttgtaaaaaatttaaaaaataccttcgtctccataggagcattttcaagtgaaaaagaatttgtgcgcggcgacgcctctagtgcggtgaagtggataggagaagtggaggccttcgatgaagtattatccacccgtggtgattattgtgcgtgtataggggcacacgttgcaactttgctgcttgacaaggctagatgcgagcatgtaaaagttgccagctagccagagtttaaatattatgttgatgacaataagattcctttagctgaagcaaccgagcttgggagaaagttttataccgatgtctggcttggtggagggaagaagttagtagatgaagttgctagagaaaatactcacaagcttacaaaaaaggcggaagcaataaaggaacctttaagattaaaggaactcgaagaacccaaagagtacaatccagatgaagattcactactgcaggattggctagcacatctggacatgttgtataaaacagtagacaaagttgttgatgatgttttcaataatgttcccgaaagagttaccttttcg

SEQ ID NO: 212267 - DNA, 4889 bp, Zea Mays
gactcggtggcggcgtcagaggctccccctcctgcctcgcgccctcgcctccggtcctccgcacaccggccggcgaccctgctgtctcccggccccggcgggcagtgggagccagcagctgctgctccaacaagcaatgatgggaatagaaggcattgcagccacagtcaccgaggaccctgaaccctcaattcctccaggatttggaccttttgctgcctcggcatcatggggaatccaaaacgatgttaaacctgctgatgatcattctagttctgttttagcattacagagcatcgacgacgatgtggaaattttggaatatctatccagttcagtggatcaccagagtgacacaggttgctgtatttctgggagcaatacctgtaggaaatcactgcgtaatagacctccaatagattatagccgctttgatcagattgcagatgaagattctgatgctgaagtagcagacaagggtgtaaatgcagtgaaacacagacaacaattccctaaaggagtacttcgaggatgtccagaatgtgccaattgtcaaaaggttattgcaagatggaatccatctggtgcacgtaggcctgttcttgatgaggctcctgtttactatcctaccgaggaggaatttcaggacacattaaaatacattgagattatccgcccaacagcagaaccatatggaatatgccgtattgttccaccagcttcatggaagcctccatgccttcttaaagagaaaaacatttgggagtgctcaaaattttctactcgggtacagaaggttgacaagctccaaaatcgtaaatcgcccaagaagagcagaagaggtggaatgatgaagaagcgtagaaagatttcggagactgaagaaaacaatcaccatcaaattggaatgcagcaaaaccaagagagatttggatttgaaccaggaccagagttcacactacagatgtttcagaagtatgcagatgacttcagtgatcagtattttatgaaagataaatgcagagattcaccaccatcagtggaagatattgaaggcgagtattggcgcatagttgaaagaccgacagaggagatagaggtaatatatggtgccgatttggagactggaacttttggcagtgggtttccaaagttatgtcctgaaatgaaatctgatgtggaggataaatatgcacaatctgggtggaatctaaataacctgcctagactacaaggttcggttctttcttttgaaggcggtgacatttctggtgttttagtgccttggctttatgtcggcatgtgtttttcatctttctgctggcatgttgaagatcatcatttgtactcactgaactacatgcattggggtgctccaaagatgtggtatggagttccagggaaggatgctgtgaatttggaggctgcaatgaggaaacatcttcctgagttatttgaggagcaacctgatttgcttcacaacttagttactcagttctcaccatcattgcttaaatctgaaggagtaccagtctaccgatgtgttcagcatgagggagagtttgtcctgacgttcccacgggcataccatgctggttttaattgtggcttcaattgtgcagaagctgttaatgtggcacccattgattggttgccggttggacaaaatgctgttgatctttatcgtgaacaagctcggaaaataactatctcccatgataagctgttgcttggggctgcaagagaagcaataagagctcagtgggacatcctatttctcaagaggaattcttctgttaacttgaggtggaaaagcatatgtggacctgatagcacaatatgcaagtcactgaagcttcaggctgtccatgctccccagagaaatatgcttgcctggtacatgcaaagcagctttgttcatgcgattgggacaaaagggggaaagctaagtgccattcacagatggggtgtctctgatcttggattaagtttgagctcctgtgtcaaacgggaaaaggtccaagattccaagactgttcgcagattaactgatggcccaagacggtcctacatgtcacaggcatcaacagtatcattgattccttcttctgttagcactgaacagaaaaagaatgaagataagacactggatttaggttgcccaggtatgaatttaccaaaaataagtccggaggcaaataatctgcgtccttcgacagaacagataaaatcagaaaatctctcacagctaaaggaaccatgtgtgaagaatgaattatcttgtccgaccagcaatggtaccagccaagaacataaaggagggattggaggccacaaacttgcagcagcaagcatgatggttctttctggtcaatcatttcctgcaaatgctggtgaatcagtgagaaatgcgcatgtcttggcagtatttaaagagggtagagactgtacatcttcacttacacttagggagtatcataacaggccagtgtcaatgattgataatggagctaacatgaagctggatctggaaaacatagacaattctcatatgttgatgtcatcaccagacttcaatgcaactgtatgtcattcttacaaggatcaaacattcttaacactggaaactaatacctctgtgatgactgagaaagatagcagtcaggcccgtaatgcaagccagcagtttgtcagtactgctttaagaacacaaaatgtgtctcaggaaccattgtgtaccgcgattgctccaaagcaactcatagatcctcaagttcagaaaaaatcatatggtgtttttggttctggcagtgcccatcttgggcatctgactgttggtaatcagcaactaaatgagagatggcatcaaagacaatctgattctttatccagtgtggaagttagagctaggggtcattcagctatgatagtgcagcctgctctggaaaatcacagcagaaatggagttgcacagaagggtcctcgcatagctaatgttgtacatagattcaagtgctctgttgaacctatagaaattggtgctgtgttatctgggaagttgtggtcctcaagtcaagcaatcttcccaaaagggtttaagagcagagtaaaatacttcagtgttgtagatccagtacaaatgacatactacatatctgaaatattggacgctggacagcagggaccactttttatggtgactgtagaaaactgtcctggtgaaattttcataaacatctctcctaccaagtgctggaacatggttcgtgaaaggctcaatatggaaataaggaggcagctcaatatgggaagagctaaccttcctacactacagcctccaggatcagttgatggccatgaaatgtttgggttgttaacaccagcaatagttcaggcaattgaggcccgggacagagattatatctgtacagagtactggcgatcaaggccccatgcaacaattgagaatcgagacaatcagaatatgtcacctcaggatccaccccttgttgcactgagggggctcttccagcgggctaattgtgatgaactgcgagcactacgcagtttgctgatgagcaatagaattctgggcgacaattctaggcagcaggcttgccaaatccttgatgaggagattgcgaagcaatggcactgaccagcgtaaatacaggatgttgtactaaccaattgtttggcatgattttgttttgacgggataaatcagttttaaggcttgcttcttccgttgcccttgtgcccattcttttcattcttgtgaccatacccaattctgtaagaattgctaccttattgagtgatataagaggtgcctcatctactactacggggttgcaaattatgatccttgtttttttcttgatcagttattgcaagtggtgtcaacaagcatgaggctacagctgcatcacctgcaaggaagtcaaaaggacttattttaagtaaagctttaaaggcgcagaaagacgtcaaagatgcaagtgctcagatggccataggcaacctgtagtctgaagttattgggcttcaccgtgatcttgaagaaaaagaaataaagctaaatacttttgccaaagatctgattgaagaccacactaagttctagaaatcctctaaagagaaagacaacaaaatttcgaagctagaagttgacaactcgtagagcatgaaacacattgcagagcttgaggcctagataaaagagcaagttgtagcacacaaaggcaaaatggccaaattgaaagagaaggtcaaagatactagtgtaatttttgaggttgaaaaggtgaagcataaaatttctgataatgagagaaccacattatagaaaattgttgatgaactttgggagtctagcgaagaatgcttctactccactgcccagtgttgtaaaaaatttaaaaaataccttcgtctccataggagcattttcaagtgaaaaagaatttgtgcgcggcgacgcctctagtgcggtgaagtggataggagaagtggaggccttcgatgaagtattatccacccgtggtgattattgtgcgtgtataggggcacacgttgcaactttgctgcttgacaaggctagatgcgagcatgtaaaagttgccagctagccagagtttaaatattatgttgatgacaataagattcctttagctgaagcaaccgagcttgggagaaagttttataccgatgtctggcttggtggagggaagaagttagtagatgaagttgctagagaaaatgtaagaaatgtttctttttatcgtttatttttctgtttcgggacttagaattttagtgtttacacaaagactcacaagcttacaaaaaaggcggaagcaataaaggaacctttaagattaaaggaa

SEQ ID NO: 212268 - DNA, 4092 bp, Zea Mays
cccaactcccgaccggctcgcgagctatctcggggacacaaccgactgcctcgcgcctcttcctcatccgtcgtcaccggttgcttcccaccgccgccttgcgcctccatgctctcagcaatgatgggaatagaaggcattgcagccacagtcaccgaggaccctgaaccctcaattcctccaggatttggaccttttgctgcctcggcatcatggggaatccaaaacgatgttaaacctgctgatgatcattctagttctgttttagcattacagagcatcgacgacgatgtggaaattttggaatatctatccagttcagtggatcaccagagtgacacaggttgctgtatttctgggagcaatacctgtaggaaatcactgcgtaatagacctccaatagattatagccgctttgatcagattgcagatgaagattctgatgctgaagtagcagacaagggtgtaaatgcagtgaaacacagacaacaattccctaaaggagtacttcgaggatgtccagaatgtgccaattgtcaaaaggttattgcaagatggaatccatctggtgcacgtaggcctgttcttgatgaggctcctgtttactatcctaccgaggaggaatttcaggacacattaaaatacattgagattatccgcccaacagcagaaccatatggaatatgccgtattgttccaccagcttcatggaagcctccatgccttcttaaagagaaaaacatttgggagtgctcaaaattttctactcgggtacagaaggttgacaagctccaaaatcgtaaatcgcccaagaagagcagaagaggtggaatgatgaagaagcgtagaaagatttcggagactgaagaaaacaatcaccatcaaattggaatgcagcaaaaccaagagagatttggatttgaaccaggaccagagttcacactacagatgtttcagaagtatgcagatgacttcagtgatcagtattttatgaaagataaatgcagagattcaccaccatcagtggaagatattgaaggcgagtattggcgcatagttgaaagaccgacagaggagatagaggtaatatatggtgccgatttggagactggaacttttggcagtgggtttccaaagttatgtcctgaaatgaaatctgatgtggaggataaatatgcacaatctgggtggaatctaaataacctgcctagactacaaggttcggttctttcttttgaaggcggtgacatttctggtgttttagtgccttggctttatgtcggcatgtgtttttcatctttctgctggcatgttgaagatcatcatttgtactcactgaactacatgcattggggtgctccaaagatgtggtatggagttccagggaaggatgctgtgaatttggaggctgcaatgaggaaacatcttcctgagttatttgaggagcaacctgatttgcttcacaacttagttactcagttctcaccatcattgcttaaatctgaaggagtaccagtctaccgatgtgttcagcatgagggagagtttgtcctgacgttcccacgggcataccatgctggttttaattgtggcttcaattgtgcagaagctgttaatgtggcacccattgattggttgccggttggacaaaatgctgttgatctttatcgtgaacaagctcggaaaataactatctcccatgataagctgttgcttggggctgcaagagaagcaataagagctcagtgggacatcctatttctcaagaggaattcttctgttaacttgaggtggaaaagcatatgtggacctgatagcacaatatgcaagtcactgaaggcacgaattgaaatggagttggtacaaagacaaaatatatcctctccatgtcaatctaggaaaatggatagtgagtttgattctactgatagggaatgtgcattgtgttactatgatctgcatctttcagcttcaggctgtccatgctccccagagaaatatgcttgcctggtacatgcaaagcagctttgttcatgcgattgggacaaaaggtttttcctatttcgttatgatgttaatgagttgaatatcttagctgatgctttagggggaaagctaagtgccattcacagatggggtgtctctgatcttggattaagtttgagctcctgtgtcaaacgggaaaaggtccaagattccaagactgttcgcagattaactgatggcccaagacggtcctacatgtcacaggcatcaacagtatcattgattccttcttctgttagcactgaacagaaaaagaatgaagataagacactggatttaggttgcccaggtatgaatttaccaaaaataagtccggaggcaaataatctgcgtccttcgacagaacagataaaatcagaaaatctctcacagctaaaggaaccatgtgtgaagaatgaattatcttgtccgaccagcaatggtaccagccaagaacataaaggagggattggaggccacaaacttgcagcagcaagcatgatggttctttctggtcaatcatttcctgcaaatgctggtgaatcagtgagaaatgcgcatgtcttggcagtatttaaagagggtagagactgtacatcttcacttacacttagggagtatcataacaggccagtgtcaatgattgataatggagctaacatgaagctggatctggaaaacatagacaattctcatatgttgatgtcatcaccagacttcaatgcaactgtatgtcattcttacaaggatcaaacattcttaacactggaaactaatacctctgtgatgactgagaaagatagcagtcaggcccgtaatgcaagccagcagtttgtcagtactgctttaagaacacaaaatgtgtctcaggaaccattgtgtaccgcgattgctccaaagcaactcatagatcctcaagttcagaaaaaatcatatggtgtttttggttctggcagtgcccatcttgggcatctgactgttggtaatcagcaactaaatgagagatggcatcaaagacaatctgattctttatccagtgtggaagttagagctaggggtcattcagctatgatagtgcagcctgctctggaaaatcacagcagaaatggagttgcacagaagggtcctcgcatagctaatgttgtacatagattcaagtgctctgttgaacctatagaaattggtgctgtgttatctgggaagttgtggtcctcaagtcaagcaatcttcccaaaagggtttaagagcagagtaaaatacttcagtgttgtagatccagtacaaatgacatactacatatctgaaatattggacgctggacagcagggaccactttttatggtgactgtagaaaactgtcctggtgaaattttcataaacatctctcctaccaagtgctggaacatggttcgtgaaaggctcaatatggaaataaggaggcagctcaatatgggaagagctaaccttcctacactacagcctccaggatcagttgatggccatgaaatgtttgggttgttaacaccagcaatagttcaggcaattgaggcccgggacagagattatatctgtacagagtactggcgatcaaggccccatgcaacaattgagaatcgagacaatcagaatatgtcacctcaggatccaccccttgttgcactgagggggctcttccagcgggctaattgtgatgaactgcgagcactacgcagtttgctgatgagcaatagaattctgggcgacaattctaggcagcaggcttgccaaatccttgatgaggagattgcgaagcaatggcactgaccagcgtaaatacaggatgttgtactaaccaattgtttggcatgattttgttttgacgggataaatcagttttaaggcttgcttcttccgttgcccttgtgcccattcttttcattcttgtgaccatacccaattctttattgcaagtggtgtcaacaagcatgaggctacagctgcatcacctgcaaggaagtcaaaaactacaaccaagtaaagctattgcacactcctcaacaactgtatgcaagaagcaggatagcggat

SEQ ID NO: 212269 - DNA, 1175 bp, Zea Mays
ctctatagtctccgccggccgtcgacaccaagcaggccttgagcttgtggcagccgtggtgatcggtcttatcaccagtggtgtcgttagatgccaaatgcagtttgctctgcacgaggattttgctttctggtgtctgtcccgttggaaccggggatttcctgagtgacgaatagacttcccatggcagctattctgttgaggatgtgggaaaggtgcactgcagagtctgagaagtgagagaaataaatgacaagtggtttcaactaaaccaagcaccacagttggaggtcaaatccttggaagacaatattgtgaagttattgtagcttgtgtgctaaaacgagatacagttttgcctcgccctggagtgatgtcgttgtggtgcttttgtgactgatcatctctggagcttttgtgaatgatctagctagatatctgtaaatgatctagttgtgaatgatattataattgtgatgcttttgtgaatatataattgtggtgcttttgtatttataatcaccgacaagcaaaaaggacagttttcataaattataattagaaacacatgtggatcatctggcaacgaacgaggaatcgaatggagtacgtacgtacgcgcgtacactgtctttatacatgccatcgacgacgacaattaacctaagaaatgaatgatgagggccatacatcatcagccagctgacctagacggcgtcaccgttctcggccgccgggtagtagcccgcgtcaacgtcgccgcggcacgacagggaggacgcggagcgcggcggcacgggcgggcgcgccagccggcggccgaagctgtcgtagtggatggcgcccgcgaagtccagcggctggcagcgctcccccatcaggatccgccggctccagagggccacctcgcccgccgaccccgacgacgccctgcccttgtcgatggccgccccgcgcgcgcacagcgccgccgcaaccacgtcggccgtcgtctggtggtgcttcgttggcctcctcctctggtggcgccggaggaggcgccgcgtcgcgcgcgacacgcgcactgtgcacgccgccaccaggcccgacaccctgcccaggagttcctcgccgtagcccgccgccatgcttttgtcgtgcgatgatctggaaagtgctacagcagcgggttcaat

SEQ ID NO: 212270 - DNA, 1248 bp, Zea Mays
cgtcttccaaaatccaaaccgctcgctcctcaccgaagacgccattagccatgagcagcttggcttatccgctcctccggctcccgtgccgctgctctatcgcgccggcgccggcgccggcgtctcagctccccgcaccggtgtgtctatctgcttcggcttccgcaaatgcagggggcgatctgacggcgcgggaaaagcgagcgcagcgtcgggaacggcgggagctgcgtgcgacggactggaaggaggaggtgcaggaccggctgatccacgagccagcgcggcggcggaagaagcctcctaagcgttcgtggagggaggagctcaacctcgacctcctcgccgagctggggccgcagtggtggctcgtgcgcgtctccatggcgcccggcaccgactacgtcgacctcctcaccaaggctatctcacggcgctactcggaagtccccttcaagatttacaatccatcaatccaagtaaagaggagattaaaaagtggtgcaatcagtgttaaatcgaagcctctgcatgccgggttggtctttctgcattgtaccttaaacaaggagcttcatgactttatcagagacacagagggttgttatggctttattggagctacagttggttcaatcaagaggcagattaaaaagccaaaacctattccagttgatgaagttgaatcaattattagagaagagaaggaggaacaagagagagttgacagagaatttgaagaaatggagaatatgggaaacattgagcctttcagtaaacccgttgaagaatctgaacttatgttaatgaataagatcaagaagcagtttaagaaatcgtcctcacagggtggcactagacacagtgctttttcgcctggtgcaactgttcatgttctctccgggccttttgcagacttcactggttccatcctggaagtgaatcgcaaaaacaagaaggaatcttgtgtttatgtatcacagtagccgataactttttatcaacaacccagatctccagctgggcctgagtgaatgaagcaggaacttcagtgggtgggcagtggaccgttgaagacccagctatcagcaagagaaacagttagcacacctgcgcatgagctaccgtcaaaattaaccatttataaacaatgaggatgctgaggttagaaagctcgctgatttccactaggctgttcacattattttccctgtgctcgaatgcagaaagcagtcccttaggccattc

SEQ ID NO: 212271 - DNA, 1095 bp, Zea Mays
cacggtttccaccaaagcgacgcgccccgcgacatggcggtggtgcgcctgcgcgtatctccacgcctccgctccattcccctcctgctctcccagccagacgccgctacagtccggcgtagtttcgcctgcgccagcgcctcccaagcccccgcacccgcgcgggctatggcggccccgtcctcctcatccgcgacgccctccccgtacacgacgctcgtcgggcgcgtgagctgcgagcgcgagatcaagcgcagcaagttcatcgccatcgcggccccggtccccaacgagcgtgccgccatggccttcctggatcaggtcaaggatccacgtgctacccataattgctgggcatacaagctgggagatcaattccgttacaacgatgacggtgaaccttctagtacagctgggaagccaatatactctgccatcatttcctctggcattgataaggtcatggtggttgtgattagatattttggaggcataaaactgggaaccggtggactggtgagggcttatggtggggttgcttctgaatgtcttaaagatgctcctacttgtcttgtgaaaccaaaggctcgtgtgggtatggaagtaccatttaatctgttgggaacagtctatcatcagctacaacatttcgaagctgaagatatcaaacaggactatgacactggaaaagatggtaccgttatggtcatgttcgaagtggaatatgaaaaaattgagaatcttggaaatgcagtgaactcagcttgcagtaggaagatagaactatatctataaaccacaatcacgggttaaggatgagtgtaagtgtggagacacgcaatcaacattcttgttcattgcaaatattgaacaagcctggaaattgtccttcagggacacgttgccacaagtctcagaccaaaagtcagtattgcttccgttaccctctatcattccccttccttttagatagatatgtttaattttgaggagatcattccgcacaggggaattggtattttttagctttggtatatgcactaggaacatcatgctgccaatagtgttactggacaagaataatgtaggaatctc

SEQ ID NO: 212272 - DNA, 1228 bp, Zea Mays
cagcgagcagctccggccggtacacggaatccgggcacccacggtttccaccaaagcgacgcgccccgcgacatggcggtggtgcgcctgcgcgtatctccacgcctccgctccattcccctcctgctctcccagccagacgccgctacagtccggcgtagtttcgcctgcgccagcgcctcccaagcccccgcacccgcgcgggctatggcggccccgtcctcctcatccgcgacgccctccccgtacacgacgctcgtcgggcgcgtgagctgcgagcgcgagatcaagcgcagcaagttcatcgccatcgcggccccggtccccaacgagcgtgccgccatggccttcctggatcaggtcaaggatccacgtgctacccataattgctgggcatacaagctgggagatcaattccgttacaacgatgacggtgaaccttctagtacagctgggaagccaatatactctgccatcatttcctctggcattgataaggtcatggtggttgtgattagatattttggaggcataaaactgggaaccggtggactggtgagggcttatggtggggttgcttctgaatgtcttaaagatgctcctacttgtcttgtgaaaccaaaggctcgtgtgggtatggaagtaccatttaatctgttgggaacagtctatcatcagctacaacatttcgaagctgaagatatcaaacaggactatgacactggaaaagatggtaccgttatggtcatgttcgaagtggaatatgaaaaaattgagaatcttggaaatgcagtgaactcagcttgcagtaggaagatagaactatatctataaaccacaatcacgggttaaggatgagtcatgtaggcaccagaaatattcagcgccttatccaagctaactgctagagtgctaggccatattgaactgctccagtgtaaactgtacagtcatctatcttttgaatttcaccatgaacattcttgttcattgcaaatattgaacaagcctggaaattgtccttcagggacacgttgccacaagtctcagaccaaaagtcagtattgcttccgttaccctctatcattccccttccttttagatagatatgtttaattttgaggagatcattccgcacaggggaattggtattttttagctttggtatatgcactaggaacatcatgctgccaatagtgttactggacaagaataatgtaggaatctc

SEQ ID NO: 212273 - DNA, 710 bp, Zea Mays
cttgaaagttcctgggaggcagctgaggaaccccagccgattgattgggagtactacagaaaaggaattggatcaaaagtggtggatatgtacaaagaggcttttgaaagcatcgagatcccgaagtacgtcgacacagttactccccagtacaagccaaagtttgatgctgtgattgctgaattaaaggaggctgagaaagagcatcagaaggagtcagaaaggatagagaaggaacttgctgaaatggaggaaatgaggaaaaagatcagtacaatgacagcagatgattactttgagaagtaccctgaactcaggaagaagtttgacgatgaaatccgtaacgataactggggatattgaagagattggagagaactcttatgatgccatttccatgtccgtgaagaaccaataattttcctgtgccctgaattgggtggtttccatagcatgtgcacggggtttgggtggaatgcctacagaatcgactgtgtcaagctttcttgattccgtagaaacatgttttgtttgacctcatcatagaggatctccgcttttatcgtacaaagattgtgatatgttcttagcttctttctacctgaataagaggatttctgcagacccttttccaactgactttctgtgacgcattggtctggatgcttaatttttttgttcggtgcaagtgtggcacttgtcctacgtta

SEQ ID NO: 212274 - DNA, 1016 bp, Zea Mays
aggcttcaggcgtggcatacagcccaacccaacaatcttcagacgcggactgtttcagcccatcgaacaagcgcagcggcggcggcgatagggagagaggagagagtctgcaggatccagcaggccgagggaggagtcagcggcgggccggagaatatgagcggcaacggcgcgaagaaggtggtcgatgcggcggtgaaggccggcaggacgatcatcgactgggacggcatggccaagttgctcgtcaccgacgaggcgcgcaaggagttcgccgccctccgccgcgctttcgatgacgtcaaccaccagctccagaccaagttctcccaggaaccccagccgattgattgggagtactacagaaaaggaattggatcaaaagtggtggatatgtacaaagaggcttttgaaagcatcgagatcccgaagtacgtcgacacagttactccccagtacaagccaaagtttgatgctgtgattgctgaattaaaggaggctgagaaagagcatcagaaggagtcagaaaggatagagaaggaacttgctgaaatggaggaaatgaggaaaaagatcagtacaatgacagcagatgattactttgagaagtaccctgaactcaggaagaagtttgacgatgaaatccgtaacgataactggggatattgaagagattggagagaactcttatgatgccatttccatgtccgtgaagaaccaataattttcctgtgccctgaattgggtggtttccatagcatgtgcacggggtttgggtggaatgcctacagaatcgactgtgtcaagctttcttgattccgtagaaacatgttttgtttgacctcatcatagaggatctccgcttttatcgtacaaagattgtgatatgttcttagcttctttctacctgaataagaggatttctgcagacccttttccaactgactttctgtgacgcattggtctggatgcttaatttttttgttcggtgcaagtgtggcacttgtcctacgtta

SEQ ID NO: 212275 - DNA, 990 bp, Zea Mays
cgacaagtcaacattggggcacaagattaatcttcgggtaaatgaggaagcaagtgacaaggttatggaggtggagcagaaatacagtgagatccgcagacctgtctatctcaagaggggtgacattatcaagaccatcccggacttttggctcacagcgtttatgagccatcctctattaagtgagcttctgactgaagaggaccagaagatattcaagtacttagactccattgatgtggatgattctgatgttaaggcaggatactccattcatcttaacttctctgagaacccgtactttgaggacacaaagcttgcaaagacctatatctttgctgatgatggaacaaccacaataaaagcttccgaaattaagtggaaggaaggaatgggacctgcaaatggaaatggtattaacaagaaggggagtaagcggccattagtagaggaaagctggtttggtgatacagagctcaagagtcttgctgatggtgtgcaagatgaggtggcggagatcataaaggaagatttgtggcctaatcctttgaagtacttcaacaatgaggttgacgatgaatttgaaggagatgaagatgatgatgatttggatggtgatgatgacgatgaaggcgatgatttggagaactgagcccttgcgcttggttcagaatgttgtccgtggatgatgtggctgggcggaactgtgacccttttgggagattttttgttgttgttgtttgacttagctggaactcaacgtagggaactgtttaatgccttatgaagtcaaccaacttgaaaggagactgcttatatcataatctcggtatatctagcaacgcaatttgacctcagtgtcctgtttgtgattcagtttttgcttcggtcggttgcctaaagatgacgtattgccttcagtttgtgctcaacagcattgttaacccccttattcccaacaagggcttgttcggttgtgaggggattaag

SEQ ID NO: 212276 - DNA, 1020 bp, Zea Mays
agcaactcggggcaggctagagttgaaacctaatcggaacgacaagtcaacattggggcacaagattaatcttcgggtaaatgaggaagcaagtgacaaggttatggaggtggagcagaaatacagtgagatccgcagacctgtctatctcaagaggggtgacattatcaagaccatcccggacttttggctcacagcgtttatgagccatcctctattaagtgagcttctgactgaagaggaccagaagatattcaagtacttagactccattgatgtggatgattctgatgttaaggcaggatactccattcatcttaacttctctgagaacccgtactttgaggacacaaagcttgcaaagacctatatctttgctgatgatggaacaaccacaataaaagcttccgaaattaagtggaaggaaggaatgggacctgcaaatggaaatggtattaacaagaaggggagtaagcggccattagtagaggaaagtttttttagctggtttggtgatacagagctcaagagtcttgctgatggtgtgcaagatgaggaagatttgtggcctaatcctttgaagtacttcaacaatgaggttgacgatgaatttgaaggagatgaagatgatgatgatttggatggtgatgatgacgatgaaggcgatgatttggagaactgagcccttgcgcttggttcagaatgttgtccgtggatgatgtggctgggcggaactgtgacccttttgggagattttttgttgttgttgtttgacttagctggaactcaacgtagggaactgtttaatgccttatgaagtcaaccaacttgaaaggagactgcttatatcataatctcggtatatctagcaacgcaatttgacctcagtgtcctgtttgtgattcagtttttgcttcggtcggttgcctaaagatgacgtattgccttcagtttgtgctcaacagcattgttaacccccttattcccaacaagggcttgttcggttgtgaggggattaag

SEQ ID NO: 212277 - DNA, 1091 bp, Zea Mays
agggcaatagggcatacatcatcatcaacagcaacaaagccttttagtccctaagcaactcggggcaggctagagttgaaacctaatcggaacgacaagtcaacattggggcacaagattaatcttcgggtaaatgaggaagcaagtgacaaggttatggaggtggagcagaaatacagtgagatccgcagacctgtctatctcaagaggggtgacattatcaagaccatcccggacttttggctcacagcgtttatgagccatcctctattaagtgagcttctgactgaagaggaccagaagatattcaagtacttagactccattgatgtggatgattctgatgttaaggcaggatactccattcatcttaacttctctgagaacccgtactttgaggacacaaagcttgcaaagacctatatctttgctgatgatggaacaaccacaataaaagcttccgaaattaagtggaaggaaggaatgggacctgcaaatggaaatggtattaacaagaaggggagtaagcggccattagtagaggaaagtttttttagctggtttggtgatacagagctcaagagtcttgctgatggtgtgcaagatgaggtggcggagatcataaaggaagatttgtggcctaatcctttgaagtacttcaacaatgaggttgacgatgaatttgaaggagatgaagatgatgatgatttggatggtgatgatgacgatgaaggcgatgatttggagaactgagcccttgcgcttggttcagaatgttgtccgtggatgatgtggctgggcggaactgtgacccttttgggagattttttgttgttgttgtttgacttagctggaactcaacgtagggaactgtttaatgccttatgaagtcaaccaacttgaaaggagactgcttatatcataatctcggtatatctagcaacgcaatttgacctcagtgtcctgtttgtgattcagtttttgcttcggtcggttgcctaaagatgacgtattgccttcagtttgtgctcaacagcattgttaacccccttattcccaacaagggcttgttcggttgtgaggggattaag

SEQ ID NO: 212278 - DNA, 2807 bp, Zea Mays
ctccattcccatctcccccctccctgcgcgcagccgcacaccaccaacacctttcaccagacgccgccgccgccaccccccatccctgtcccgtcccgcgcgcggccgccacatccgtccgggcatcctcgtctccccagccccgctgccgcagattttgcttcgggttcggctaaatttcgtcggatggatatcgatgccagcgccagcgtcatgtgccagctgctgagccccgagggagaccctctaggctctgcgctctatctgccccagaacgtcgggcccccgcagctccaggagattgtcaatcagctcctccacaatgaggagaagttgccctatgcattctacgttggagacgaggagctctctgtctacctgggtgcttacatgcggcagaagaacgccaatgttgaggttactctgcgcatagtatgccaaccacaagcacttttccggatcaggccggtcaaccgatgctctgccacgattgctggccacacggaagctgtaattgctgtttcttttagccctgatggaaagagtttggcgagcggttcaggtgacaccactgttcgcttttgggacctgagtacacagactccactgttcacatgcaaaggacacaaaaattgggttctctgtattgcatggtcacctgatggaaaacatcttgttagtggtagcaagtcgggagaacttatattatgggacccaaaaactgggaaccaattgggcactccacttatgggacacaggaaatggattactgctgtatcatgggagccagttcatttgcagtctccgtgccgccgctttgtaagtgcaagcaaggacggtgatgctcgcatttgggacatcaccacaaggaaatgtgttatttcccttacaggtcacactagttcagtgacctgtgtcaagtggggtggagatggtttgatttatactggttcccaagattgtttaatcaaagtatgggaaacttctcagggaaagttggtcaaaacattgaagggtcatgggcactgggtgaattcgcttgctttgagcacggaatatgttctccgtactggagcatatgaccacactggcaagacattttcgactgcagaggaaatgaaagaggctgctcttgcgagatacaagaagatgaggggtaatgctccggagagactagtttctggttctgatgattttacaatgtttctttgggaaccaacaattagtaaacaacctaaagctcgcatgactggtcatcagaagcttgtaaaccatgtttacttttcccctgatggacaatggttggcaagtgcatcctttgataaatctgtcaagttgtggaatggtatcacaggtaaatttgttgcagcattcagagggcacgttgcagatgtctaccagatcagctggtctgccgacagtaggcttctactaagtggaagcaaggattccactctaaagatctgggatattcgaacacacaagttgaaaatggacttgccgggccacgcggatgaggtgtacaccgtggattggagccctgacggtgaaaaggtggcgtctggtggcaaggatcgggtcctcaagctatggatgaactgattgattattatatatctatgcttgggcgaattatatattgtagtgatgataattttgaaggtatactgagatcaattaattgtacaagatccatgcttggctcaaaactggaagaagctagctggaaatcatgagttcagttggtggtgctcttcttcttcttcttgttcttcttcttgaggtccgtggcatagtagttgcatgtgatgaagacgcctcccttgaagcactctgctcgtgcgcatcccaccttggtgctcctcttgccgaccatgagcgcgaagtggccgcactccttgtacgccctgccgcctgtgcactgctccgtgtccctgtcgtagatggactcctccttgccccaccagaagacggcctccttggcggtggcgttccagtcgtcgtggctcctgaacaggctctcgccgtacttgtggccgctgtggacgagctcgcagtccttgcgcatgcggttggaccagcgccgcgcctgccgcgccagcttcctgtcccacttcatgggcggcacgccgtagcgcgcgcggagctcgttgtgggcgtccacgaactcccgggcgatgcccttgtaccaccccgtgccgttggtcggtgacacgatgcccttctccttggcgtacttgagcagctcctgctgggcagccttctccgccgcgaccgccttctccatctcctgctccttctccttctccttctcgccggcctcttccgacgacgacgacgaagtagattctccgctgctactgtcggtctcagtctcactctcagacggagacgactggtgcagcagagacgacgacgaggaggccagggcgcccgaggaggggacgttggagaggacgacggcgacgacgaggagcagcagtactgctatgctgctgctgggcgccatgctggctagctatggttcaagatcgagctaggcacgccgacgccggccctcctctcttgccaacgtcgtcagtgttgggaaggagggtaagggctgccggcaggggccttttatgcatgcatgccaacagctagctagcggtcctccattcttggctctgctccaacgcacgcatgcatggccttttttcgcgcggtttcgctggttcgttggacggttcgtcttcatcgattgtcctgttgcttcaatcatcgtagctaggtgtctatatatagctgctaccttgcttctctagctt

SEQ ID NO: 212279 - DNA, 2760 bp, Zea Mays
ctggcgcagaaagaaacaagagatgaggtctagtctgctaccggagtccccggttcatcagcagaagctgcttgcaccgccgccgccgccctcttcctgttctactgattttgcttcgggttcggctaaatttcgtcggatggatatcgatgccagcgccagcgtcatgtgccagctgctgagccccgagggagaccctctaggctctgcgctctatctgccccagaacgtcgggcccccgcagctccaggagattgtcaatcagctcctccacaatgaggagaagttgccctatgcattctacgttggagacgaggagctctctgtctacctgggtgcttacatgcggcagaagaacgccaatgttgaggttactctgcgcatagtatgccaaccacaagcacttttccggatcaggccggtcaaccgatgctctgccacgattgctggccacacggaagctgtaattgctgtttcttttagccctgatggaaagagtttggcgagcggttcaggtgacaccactgttcgcttttgggacctgagtacacagactccactgttcacatgcaaaggacacaaaaattgggttctctgtattgcatggtcacctgatggaaaacatcttgttagtggtagcaagtcgggagaacttatattatgggacccaaaaactgggaaccaattgggcactccacttatgggacacaggaaatggattactgctgtatcatgggagccagttcatttgcagtctccgtgccgccgctttgtaagtgcaagcaaggacggtgatgctcgcatttgggacatcaccacaaggaaatgtgttatttcccttacaggtcacactagttcagtgacctgtgtcaagtggggtggagatggtttgatttatactggttcccaagattgtttaatcaaagtatgggaaacttctcagggaaagttggtcaaaacattgaagggtcatgggcactgggtgaattcgcttgctttgagcacggaatatgttctccgtactggagcatatgaccacactggcaagacattttcgactgcagaggaaatgaaagaggctgctcttgcgagatacaagaagatgaggggtaatgctccggagagactagtttctggttctgatgattttacaatgtttctttgggaaccaacaattagtaaacaacctaaagctcgcatgactggtcatcagaagcttgtaaaccatgtttacttttcccctgatggacaatggttggcaagtgcatcctttgataaatctgtcaagttgtggaatggtatcacaggtaaatttgttgcagcattcagagggcacgttgcagatgtctaccagatcagctggtctgccgacagtaggcttctactaagtggaagcaaggattccactctaaagatctgggatattcgaacacacaagttgaaaatggacttgccgggccacgcggatgaggtgtacaccgtggattggagccctgacggtgaaaaggtggcgtctggtggcaaggatcgggtcctcaagctatggatgaactgattgattattatatatctatgcttgggcgaattatatattgtagtgatgataattttgaaggtatactgagatcaattaattgtacaagatccatgcttggctcaaaactggaagaagctagctggaaatcatgagttcagttggtggtgctcttcttcttcttcttgttcttcttcttgaggtccgtggcatagtagttgcatgtgatgaagacgcctcccttgaagcactctgctcgtgcgcatcccaccttggtgctcctcttgccgaccatgagcgcgaagtggccgcactccttgtacgccctgccgcctgtgcactgctccgtgtccctgtcgtagatggactcctccttgccccaccagaagacggcctccttggcggtggcgttccagtcgtcgtggctcctgaacaggctctcgccgtacttgtggccgctgtggacgagctcgcagtccttgcgcatgcggttggaccagcgccgcgcctgccgcgccagcttcctgtcccacttcatgggcggcacgccgtagcgcgcgcggagctcgttgtgggcgtccacgaactcccgggcgatgcccttgtaccaccccgtgccgttggtcggtgacacgatgcccttctccttggcgtacttgagcagctcctgctgggcagccttctccgccgcgaccgccttctccatctcctgctccttctccttctccttctcgccggcctcttccgacgacgacgacgaagtagattctccgctgctactgtcggtctcagtctcactctcagacggagacgactggtgcagcagagacgacgacgaggaggccagggcgcccgaggaggggacgttggagaggacgacggcgacgacgaggagcagcagtactgctatgctgctgctgggcgccatgctggctagctatggttcaagatcgagctaggcacgccgacgccggccctcctctcttgccaacgtcgtcagtgttgggaaggagggtaagggctgccggcaggggccttttatgcatgcatgccaacagctagctagcggtcctccattcttggctctgctccaacgcacgcatgcatggccttttttcgcgcggtttcgctggttcgttggacggttcgtcttcatcgattgtcctgttgcttcaatcatcgtagctaggtgtctatatatagctgctaccttgcttctctagctt

SEQ ID NO: 212280 - DNA, 2468 bp, Zea Mays
gtgtacctccgcctctgtcctctctccaccgatgaagggaaagcagaagcttcttttccccttcctccaaaaaaggcatcaaaattctttgctaaaaaaggcttcaaaattctccgcttagggaaaaaaacttgattaggagcaatccatcgtttctttactcctcgatcgagagccccattcgttaggggttagggtcgtagcgagggctctgaaattggaatcccaacagaggaattacacccgctttgggacttcggagaagggaatgtcggcaaccatcgaccggctcgcgacaccgagtcatgagggtcgtgcacacagtgacgaaaagcgagagtgcaattctgatgaagagaactcagaaggagaaagaaagcccaaaaaggattccttcaagaagagagcagttactacagggtatagatttaggcattccttaaggagaaagagtaaaacaaagaatgataaccatatagcctcaatagaagacataagagatgttcaagagctggagattgttgaaaggtttcgccagtgtttacttgatgatggtctgttgccagaacatcacgatgattatcacacgatgttgaggttcctgaaagcaagaaaatttaatattgacaaagcaaaacatatgtggtcagagatgcttagatggaggaaggaatttggtgctgacaatatagaggaatttgactacactgaattagatgaagttgtgaagtactatccgcagttttaccatggtgtggacaaagatggaagacccgtttacatagaactaattgggaaagttgataccaacaaactagtgcagatcacaactattgaccgctatttaaaatatcatgtcaaggagttcgagagatgtctccagatgaggtttccagcttgttctattgctgcgaaaaggcacatagactcgtctactacgatattggatgtgaaaggcgtgagcctaaagaacttcacaaaagatgcaagagagctaattatgcggttgcagaagatcaacaatgacaactatccagagaccttatatcaactgtacatcataaatgctggccaaggattcaagatattatggggtacaataaaatcatttcttgatccagaaaccgcttcaaaaattcatgtccttggaaacaagtaccaaactaaattacttgaaataatcgatggcagtgaactcccagaatttcttggtggcaagtgcaggtgtgaagaatatggaggttgtccaaaatcagacaaaggcccttggaaggaccctgaaattttcaagagggttatcaatggtgaggcaaactatggtcgacaagttcttgctgtatcaagcataaatcagaaggaagttggttgtactgaacacacaactgtggaagatgtttcttcttcaacggctttagtggatcccatcataagccctaatttgacccatgtggatgaggggatagcatccctgctgctggcaaggtcatggatgcatgctccaatccaagaaacagctcgacaccttccagctcaggttctttctctttgagaaatataccggcaacattgggaggacttaaaactcgaattgttgcatggtcaacattcgtaatcctgaccttgtcagcattcctctgttctgtgctgagcatagtgaccaaaaggctctcaaaccaggccatcacatgtgaccactatagtgctgacttccatcaaggatatatgggaaatggcacccttacatccgtattgacacggcttggtgagctggaggagaaggtacaagcacttgaagcaaagccaccccaagtgccatttgaaaaggaggaattgttacatactgctgtttaccgcgtggatgtgttggaagctgaactaatttctatgaagaaggccttgtatgagacattgattcggcaggatgagctgcttgcatatattgaccaacaacagacagccaaattttgtcggcagaagttctgtttctaagtactggagtacctgccacctattttcgtctctttggagatcgcatgcagctattgtggacccagtatacttgcaaatgttttcatatttgttgcagtgtaaagaaatgcaatttttagaaatacataggattgaggagcatggtagcttgtcttgagatcgtgttttagcgacaaaaacagaaaagcttgataccttgtacgcattttcaaccagatgcaggcgtaatctttccccagtatttggtgcaaggctccagtatttggtttgcttgtattatactatctctattctcgaatatttgtcatctgctagtttatttttaaactaaaacacgacaaataaaaagaacggagggagtatatgtctttgtttggggatgtaaatagagtggaactgtattttagaaaagaaagtgtttgatgaggctgtgagcagacgaaaaaaaagttcgttacatgtatgagtgtattggaaaa

SEQ ID NO: 212281 - DNA, 2553 bp, Zea Mays
cttcggaggcccatggacctgatcttgccgggaaccgtgtacctccgcctctgtcctctctccaccgatgaagggaaagcagaagcttcttttccccttcctccaaaaaaggcatcaaaattctttgctaaaaaaggcttcaaaattctccgcttagggaaaaaaacttgattaggagcaatccatcgtttctttactcctcgatcgagagccccattcgttaggggttagggtcgtagcgagggctctgaaattggaatcccaacagaggaattacacccgctttgggacttcggagaagggaatgtcggcaaccatcgaccggctcgcgacaccgagtcatgagggtcgtgcacacagtgacgaaaagcgagagtgcaattctgatgaagagaactcagaaggagaaagaaagcccaaaaaggattccttcaagaagagagcagttactacagggtatagatttaggcattccttaaggagaaagagtaaaacaaagaatgataaccatatagcctcaatagaagacataagagatgttcaagagctggagattgttgaaaggtttcgccagtgtttacttgatgatggtctgttgccagaacatcacgatgattatcacacgatgttgaggttcctgaaagcaagaaaatttaatattgacaaagcaaaacatatgtggtcagagatgcttagatggaggaaggaatttggtgctgacaatatagaggaatttgactacactgaattagatgaagttgtgaagtactatccgcagttttaccatggtgtggacaaagatggaagacccgtttacatagaactaattgggaaagttgataccaacaaactagtgcagatcacaactattgaccgctatttaaaatatcatgtcaaggagttcgagagatgtctccagatgaggtttccagcttgttctattgctgcgaaaaggcacatagactcgtctactacgatattggatgtgaaaggcgtgagcctaaagaacttcacaaaagatgcaagagagctaattatgcggttgcagaagatcaacaatgacaactatccagagaccttatatcaactgtacatcataaatgctggccaaggattcaagatattatggggtacaataaaatcatttcttgatccagaaaccgcttcaaaaattcatgtccttggaaacaagtaccaaactaaattacttgaaataatcgatggcagtgaactcccagaatttcttggtggcaagtgcaggtgtgaagaatatggaggttgtccaaaatcagacaaaggcccttggaaggaccctgaaattttcaagagggttatcaatggtgaggcaaactatggtcgacaagttcttgctgtatcaagcataaatcagaaggaagttggttgtactgaacacacaactgtggaagatgtttcttcttcaacggctttagtggatcccatcataagccctaatttgacccatgtggatgagttaaaatttcaaggacatgcttcctcatctgatgctcctcccattataggggatagcatccctgctgctggcaaggtcatggatgcatgctccaatccaagaaacagctcgacaccttccagctcaggttctttctctttgagaaatataccggcaacattgggaggacttaaaactcgaattgttgcatggtcaacattcgtaatcctgaccttgtcagcattcctctgttctgtgctgagcatagtgaccaaaaggctctcaaaccaggccatcacatgtgaccactatagtgctgacttccatcaaggatatatgggaaatggcacccttacatccgtattgacacggcttggtgagctggaggagaaggtacaagcacttgaagcaaagccaccccaagtgccatttgaaaaggaggaattgttacatactgctgtttaccgcgtggatgtgttggaagctgaactaatttctatgaagaaggccttgtatgagacattgattcggcaggatgagctgcttgcatatattgaccaacaacagacagccaaattttgtcggcagaagttctgtttctaagtactggagtacctgccacctattttcgtctctttggagatcgcatgcagctattgtggacccagtatacttgcaaatgttttcatatttgttgcagtgtaaagaaatgcaatttttagaaatacataggattgaggagcatggtagcttgtcttgagatcgtgttttagcgacaaaaacagaaaagcttgataccttgtacgcattttcaaccagatgcaggcgtaatctttccccagtatttggtgcaaggctccagtatttggtttgcttgtattatactatctctattctcgaatatttgtcatctgctagtttatttttaaactaaaacacgacaaataaaaagaacggagggagtatatgtctttgtttggggatgtaaatagagtggaactgtattttagaaaagaaagtgtttgatgaggctgtgagcagacgaaaaaaaagttcgttacatgtatgagtgtattggaaaa

SEQ ID NO: 212282 - DNA, 3082 bp, Zea Mays
acagccctagctccaccgataaaaccccacctcctcccgtaacccgcgcctcccttcccttctcctctcttccccgaaagagaggtcgcggacggaacccttccaccctcacctcatcccacaaccttcgattccttcacgatcttacctcgcgcgctcgccgattcctcgatcgagtcccgcgcgattcgctttctggtcggattctctcccccgaagcatgcagccggaccagcctgtgatcagcttgcgccccggcggcggcggcggcccgcgcgccggccgcctcttctcccccgccttcgccacctccgtctctggagacttcctccgcccgcacggcgggggcgcctccggcatctccaagatcggagattcacattttgagccacgtgagcgtgttcgatacacaagagatcaacttctcgagctgcgtgagattgttgatgtgtctgaggaaattttaagaatcaagcaagagattgatgtagagcttcatggtgaagaccagagctgggttcgcaatgattcaactgttcaaggacaagcacaagctcaaacacaagcacagaatcgctatgctgagactgatagccgtgattggcgtgcacggtctgcacagctgactccgactaatgaagaaaaatcttgggacaacataagggaggctaaagaagcctatgcctctagcggtaggcagcaagagcaagctaacaggcaagatcagttaagctcccagtttgcttcgaaagctcaggttggccctacccctgctcttattaaggctgaagtgccctggtcagcccgaagaggcaatctctcggagaaagaaagagtcttgaaaacggtgaaaggtatactgaacaaacttacaccagagaaattcgatcttttaaagggtcaactaatggaagctggaattactactgctgatatattgaaggcagtttttgagcccactttctgtccaatgtatgctcaactttgttctgatctcaatgaaaagcttccgacattcccttctgaagagccaggtggcaaagagatcacattcaagcgcgtgatattgaacaattgtcaggaagcctttgaaggtgctagcaacttaagagctgagatttctaaattaactggccctgaccaagggatggaaagaagagacaaagaacggttggtcaaacttagaacacttggaaatattcggctaattggtgagctactcaagcaaaaaatggttcctgagaagatagttcatcacattgttatggagctattggggtctgggactgataaaaaaccatgccctgaagaggaagatgttgaggctatctgtcatttcttcaatacgattggtaaacagcttgacgagaacacaaagtctcggcggatcaatgacacatacttcatccagatgaaggagctaacaatgaatccccagcttgcaccacgtttgaggtttatggttcgtgatgtgattgatctccggtcaaataactgggtgcctcgacgtgaggagattaaggccaagacaatcagtgaaattcactctgaggcagaaaagaatcttggattacgtcctggagcagcatctgtcattaggaatggccgtagctcaccaggagggccactttcacctggagggggatttccaatgaatcggccaggaactggaggcatgatgcctgggatgcctggttcaagaaagatgcctggaatgcctggtttggacaatgataactgggaagttccccgttctaaatcaatgccaagaggtgactcgattcgcaaccagggattgttgcttaataaaccatcaacagttcacaagacatcatctattaacacgaggcttcttcctcaaggcagtggtgcggcactaataggcaagagtgcacttttgggaaccggtgtctcagcatctcgtcctctcagctttacgcctgggcccacaccagctcaaactacaccaaaaccaatacgtgcagcaccagctgttgtccctgctcctgataaacaggccagtgctcccaaggggaacactgctgagcttcagaagaaaacaatagctcttcttgaggagtattttggcatacgtattttagatgaagcccatcaatgtatcgtggagctgcagagtcctgattactacccagaaattgttaaagaagctgtcaatcttgccctagataaaggcaccaattttgttgatcctcttgttaggctactggagcatttgtacacaaagaaaattttcaagactcaagacctggaatccggttgcttgttatatggtactctgctggatgacattggcattgaccttcctaaagctccagcacaatttggtgagatcattgctcgcctgactttgttgggtgccttgagatttgaagctctggaggttattttaaagaaaatggaggatacctacaaccgcaaagcagtttctaatgctttcatgaaaaccttggaagcaaacccatcaggtcaggctatcttaggctcacctgctgctgctgcagtaatagacgcttgcaacagccttttggaataatcttcctagcagctttggcctatcaaccttttcagattctgtatcttgcgaaagacggtctcgtgtactctctatagtttaggtgtcaaggaattgaggaacagacaattttgagctgtataattttgcgagatcagatgagtgttgattgttattgtttcggccaagaaggaaagaaagaagccatgaattttggtcttgggcgaccaacttaatttgcaggagtcctagatgaacaaggctaaatatgttgttactatgtccacctaaaatgttgttagttattttcctgtgactacacatttttgtaacgttgtactatgattttggaatgttttattgggtacaatatattgtgttatttaggagtcaaaactatctctaggtcctggtttaccctgttgctgccgtgatgttggctccctaattcctttgggcgacttagcgtatgttggctccaattcgtttgggctttgtatttccatgctgtttgactggatatttgatgggtctctttgtttgggtttg

SEQ ID NO: 212283 - DNA, 2501 bp, Zea Mays
aaaaagagcacacacacattgagaaaatattgttgatgtgtctgaggaaattttaagaatcaagcaagagattgatgtagagcttcatggtgaagaccagagctgggttcgcaatgattcaactgttcaaggacaagcacaagctcaaacacaagcacagaatcgctatgctgagactgatagccgtgattggcgtgcacggtctgcacagctgactccgactaatgaagaaaaatcttgggacaacataagggaggctaaagaagcctatgcctctagcggtaggcagcaagagcaagctaacaggcaagatcagttaagctcccagtttgcttcgaaagctcaggttggccctacccctgctcttattaaggctgaagtgccctggtcagcccgaagaggcaatctctcggagaaagaaagagtcttgaaaacggtgaaaggtatactgaacaaacttacaccagagaaattcgatcttttaaagggtcaactaatggaagctggaattactactgctgatatattgaaggatgttatatctctcatatttgagaaggcagtttttgagcccactttctgtccaatgtatgctcaactttgttctgatctcaatgaaaagcttccgacattcccttctgaagagccaggtggcaaagagatcacattcaagcgcgtgatattgaacaattgtcaggaagcctttgaaggtgctagcaacttaagagctgagatttctaaattaactggccctgaccaagggatggaaagaagagacaaagaacggttggtcaaacttagaacacttggaaatattcggctaattggtgagctactcaagcaaaaaatggttcctgagaagatagttcatcacattgttatggagctattggggtctgggactgataaaaaaccatgccctgaagaggaagatgttgaggctatctgtcatttcttcaatacgattggtaaacagcttgacgagaacacaaagtctcggcggatcaatgacacatacttcatccagatgaaggagctaacaatgaatccccagcttgcaccacgtttgaggtttatggttcgtgatgtgattgatctccggtcaaataactgggtgcctcgacgtgaggagattaaggccaagacaatcagtgaaattcactctgaggcagaaaagaatcttggattacgtcctggagcagcatctgtcattaggaatggccgtagctcaccaggagggccactttcacctggagggggatttccaatgaatcggccaggaactggaggcatgatgcctgggatgcctggttcaagaaagatgcctggaatgcctggtttggacaatgataactgggaagttccccgttctaaatcaatgccaagagtggtgcggcactaataggcaagagtgcacttttgggaaccggtgtctcagcatctcgtcctctcagctttacgcctgggcccacaccagctcaaactacaccaaaaccaatacgtgcagcaccagctgttgtccctgctcctgataaacaggccagtgctcccaaggggaacactgctgagcttcagaagaaaacaatagctcttcttgaggagtattttggcatacgtattttagatgaagcccatcaatgtatcgtggagctgcagagtcctgattactacccagaaattgttaaagaagctgtcaatcttgccctagataaaggcaccaattttgttgatcctcttgttaggctactggagcatttgtacacaaagaaaattttcaagactcaagacctggaatccggttgcttgttatatggtactctgctggatgacattggcattgaccttcctaaagctccagcacaatttggtgagatcattgctcgcctgactttgttgggtgccttgagatttgaagctctggaggttattttaaagaaaatggaggatacctacaaccgcaaagcagtttctaatgctttcatgaaaaccttggaagcaaacccatcagattctgtatcttgcgaaagacggtctcgtgtactctctatagtttaggtgtcaaggaattgaggaacagacaattttgagctgtataattttgcgagatcagatgagtgttgattgttattgtttcggccaagaaggaaagaaagaagccatgaattttggtcttgggcgaccaacttaatttgcaggagtcctagatgaacaaggctaaatatgttgttactatgtccacctaaaatgttgttagttattttcctgtgactacacatttttgtaacgttgtactatgattttggaatgttttattgggtacaatatattgtgttatttaggagtcaaaactatctctaggtcctggtttaccctgttgctgccgtgatgttggctccctaattcctttgggcgacttagcgtatgttggctccaattcgtttgggctttgtatttccatgctgtttgactggatatttgatgggtctctttgtttgggtttg

SEQ ID NO: 212284 - DNA, 3051 bp, Zea Mays
ccgcccacacacaccggcctctcgcttctctcccatcctccaaccactttcccttgcacgctagtagcagtggtactagtcctaggccagtactgccaccactcgtagcccagatcagcgggagcaggaaaaaaaaatcgaaccaaagagagggggagggaggtgaaaagcttggggagaggagacgagggagcgcagcataaatcccgatccccaaatcgcaaaacctagccgctcccgatctgcaatgccgcaggcttgagtgcgagcgcacggggaatgaggcgggtggcaccggcgatgatcgccgccggcagtgctggcggcgaggatacggcggagggggcggtggtggagaagacgctgctcaacggggacgtctaccgcggcgggttctccgctggatctccgcacgggaagggcaagtacgtctgggctgacggctgcatgtacgagggggagtggcggcggggcaaggcgtccgggaagggccgcttctcgtggccttcgggcgccacattcgagggggagttccgcagcggccggatcgaggggcagggcgtgttcgtcggccccgacggcgccacctaccgcggcgcgtgggtggcggaccgacgccacggcgtgggcgccaagagctacgccaacggggactactacgagggccagtggcggcgcaacttccaggacggccacggacggtacgtctgggccaacggcaaccagtacgtcggggagtggcgcgccggggtgctctcgggccgcggcgtgctcatctgggccaatggcagccgctacgacggggtctgggagaatggcgtgcccagggggactggggtcttcacgtggcccgacggcagccggtacgtcggctcctggcctgggacctgcgtcgacctgccggctataagcggcacgttcttcgcgccggtgggcgctggggctcctgctgctgtgaggaagagatcctccgtggagggtgtgggggagaaggcgaccccgcggatctgcatctgggagtcggagggcgaggctggagacattacttgcgacatcgttgacgcgctcgaggcgtccatgctctacaaggaggccgcggctgttgcgggaggggcaacgtacacgcggaaactgccccagaggaatacccggcgagcagccagcggagtcccacgctgggcgtcgtcggcggccaccacgcctgagagtaagcgacccgggcagaccatctccaagggacacaagaattacgagctcatgctgcagctgcaattgggcatcaggcattccgtgggaaagtcttcggccgtgccgatgcgagcactgcaaccgggcgattttgacccaggggagaagttctggacacggttcccaccagagggttcgaaggttacgctaccacattcatctggagagttccgatggaaggactactgccccatggtgttcagcggattacatgcttgcgatctgtggcaatgatgctctgagggagctgtcttcacccggcaaaagtgggagcttcttttaccttacccaagatgaccgattcatgattaagacagtgaagaaatcagaagtcaagctgctaattcgaatgttaaatagctactacaaccatttcaatcgatacaagaactcattaatcacgaggttctatggtgtacactgtgtgaagccccttaatggacaaaaggtccgatttattgtcatgggtaatctgttctgttcagaataccagatacatcgccgttttgatttgaaaggttcatcctatggacgaacagcagacaagtttgaagatgaaattgatgagacaactacactcaaggatttggacctcaattttgtcttccggttgcagcgatcttggtacaccgatctccatgaacaattgggacgagactgtgattttttggaatcagaagggattatggattacagtttcttggtaggagttcacttttgtgatgacatctctgcctcaaagatgggatcctctacttttactgcctctccaaagcttttaacaaagagtgagtcatttcaaggtggtggcacgccagagctttgcttctcggatgatgattttgatatggtacctgattgccaccggaaacctctgattagacttggtgcacacatgccagcccgggcagagcaagcatccaggaggagtgaattcgacccgcttctcctaacaggtggaggattcctgttcccaaaccagaccggcgaagtgcatgatgtgattttattctttgggataattgacatcctccaggattacagcttaagaaagcgggccgagcatgcttacaagtcattacagacagatcccaactcgatctctgccgtggacccgaagctctactcgaagaggttccaagacttcatcggcagaatttttgtggaagatggctaactggcattggatagagattaaccgcgaattccatgcggaggccagagcacctgtaatgattccgggacagtttttttgcgctcagtaaagaagtctgcataattgccaagaatcatcttcatccatggggatccggtaaagcagcagcccctcggctgggtgtaacctactgtgaagcatcaggtcagcagtgaaggagatctgagttcgaagcaaatttgccgcgaattctccggaaatcattcgagtggctggattttgaagcgcagccatgggatcggaggattttgtctgtaaaatgatgtgattcggcgggtgagagactggttcttccgggtccattgtagcagcagtcctttttttttatctccttagttttgttggagttcttttccccccgctccccttctatatatatcgttccgatgtgaggaatggggcagggagttttgtttccagaaagatgatatttaaggctgcggctggcagtgaacaataagatcatgtacagatacaccttgatcctgggaatgggtggattagaattgaattcagcatcttcatgacccgtgggccccagaccactgcttctcccctctcttttgtgttgttggcttctccttttc

SEQ ID NO: 212285 - DNA, 3002 bp, Zea Mays
cgcccacacacaccggcctctcgcttctctcccatcctccaaccactttcccttgcacgctagtagcagtggtactagtcctaggccagtactgccaccactcgtagcccagatcagcgggagcaggaaaaaaaaatcgaaccaaagagagggggagggaggtgaaaagcttggggagaggagacgagggagcgcagcataaatcccgatccccaaatcgcaaaacctagccgctcccgatctgcaatgccgcaggcttgagtgcgagcgcacggggaatgaggcgggtggcaccggcgatgatcgccgccggcagtgctggcggcgaggatacggcggagggggcggtggtggagaagacgctgctcaacggggacgtctaccgcggcgggttctccgctggatctccgcacgggaagggcaagtacgtctgggctgacggctgcatgtacgagggggagtggcggcggggcaaggcgtccgggaagggccgcttctcgtggccttcgggcgccacattcgagggggagttccgcagcggccggatcgaggggcagggcgtgttcgtcggccccgacggcgccacctaccgcggcgcgtgggtggcggaccgacgccacggcgtgggcgccaagagctacgccaacggggactactacgagggccagtggcggcgcaacttccaggacggccacggacggtacgtctgggccaacggcaaccagtacgtcggggagtggcgcgccggggtgctctcgggccgcggcgtgctcatctgggccaatggcagccgctacgacggggtctgggagaatggcgtgcccagggggactggggtcttcacgtggcccgacggcagccggtacgtcggctcctggcctgggacctgcgtcgacctgccggctataagcggcacgttcttcgcgccggtgggcgctggggctcctgctgctgtgaggaagagatcctccgtggagggtgtgggggagaaggcgaccccgcggatctgcatctgggagtcggagggcgaggctggagacattacttgcgacatcgttgacgcgctcgaggcgtccatgctctacaaggaggccgcggctgttgcgggaggggcaacgtacacgcggaaactgccccagaggaatacccggcgagcagccagcggagtcccacgctgggcgtcgtcggcggccaccacgcctgagagtaagcgacccgggcagaccatctccaagggacacaagaattacgagctcatgctgcagctgcaattgggcatcaggcattccgtgggaaagtcttcggccgtgccgatgcgagcactgcaaccgggcgattttgacccaggggagaagttctggacacggttcccaccagagggttcgaaggttacgctaccacattcatctggagagttccgatggaaggactactgccccatggtgttcaggcatttgaggaagttgtttgctgttgatacagcggattacatgcttgcgatctgtggcaatgatgctctgagggagctgtcttcacccggcaaaagtgggagcttcttttaccttacccaagatgaccgattcatgattaagacagtgaagaaatcagaagtcaagctgctaattcgaatgttaaatagctactacaaccatttcaatcgatacaagaactcattaatcacgaggttctatggtgtacactgtgtgaagccccttaatggacaaaaggtccgatttattgtcatgggtaatctgttctgttcagaataccagatacatcgccgttttgatttgaaaggttcatcctatggacgaacagcagacaagtttgaagatgaaattgatgagacaactacactcaaggatttggacctcaattttgtcttccggttgcagcgatcttggtacaccgatctccatgaacaattgggacgagactgtgattttttggaatcagaagggattatggattacagtttcttggtaggagttcacttttgtgatgacatctctgcctcaaagatgggatcctctacttttactgcctctccaaagcttttaacaaagagtgagtcatttcaaggtggtggcacgccagagctttgcttctcggatgatgattttgatatggtacctgattgccaccggaaacctctgattagacttggtgcacacatgccagcccgggcagagcaagcatccaggaggagtgaattcgacccgcttctcctaacaggattacagcttaagaaagcgggccgagcatgcttacaagtcattacagacagatcccaactcgatctctgccgtggacccgaagctctactcgaagaggttccaagacttcatcggcagaatttttgtggaagatggctaactggcattggatagagattaaccgcgaattccatgcggaggccagagcacctgtaatgattccgggacagtttttttgcgctcagtaaagaagtctgcataattgccaagaatcatcttcatccatggggatccggtaaagcagcagcccctcggctgggtgtaacctactgtgaagcatcaggtcagcagtgaaggagatctgagttcgaagcaaatttgccgcgaattctccggaaatcattcgagtggctggattttgaagcgcagccatgggatcggaggattttgtctgtaaaatgatgtgattcggcgggtgagagactggttcttccgggtccattgtagcagcagtcctttttttttatctccttagttttgttggagttcttttccccccgctccccttctatatatatcgttccgatgtgaggaatggggcagggagttttgtttccagaaagatgatatttaaggctgcggctggcagtgaacaataagatcatgtacagatacaccttgatcctgggaatgggtggattagaattgaattcagcatcttcatgacccgtgggccccagaccactgcttctcccctctcttttgtgttgttggcttctccttttc

SEQ ID NO: 212286 - DNA, 765 bp, Zea Mays
catgtgggggcctccgacacagggatttccccttgccaatagcattggtggagaacagtggaaggtgcaagactaatgagcatggggagaagatacttccggacggaactctgtgggttccaaacctgatgaaagaaattactgttgtcatctcaaacgggagcagtcccactcatgttgatcagaagttaattgatggtccaaaccctaacaatcgccgaaagttgttcataccacttatccttgctgtggagtacttcttggtggtaaaaggaatccggagggcgatccatgcagatatcgcaaacgggaaggtagatgactgggagcagcgttaccgggacctggtgggaagcagggacctcgtagagcagaaaggttctacctcccggaaccgcaaagcctaagttggtgtaccagaaaggattctattcgtgttgagacccacccactcgatctgctgctccttttcctaaatctgtgctgggggctttatagagttcgctggtactacttgaaaaaaaaatgctcctgttgtagttgataagattatgtttcccattttatgacgattggccgtcttcgcaattttgaagatgttatcgaatacgtgttattttattgttttaaattatatatggcatggaaacatcaagtgtggactggagtgctctgaacatcctcaaacgtcggttgataagatcaatgtgttgcagttcggccatataaaatttaaatcaaccgatcggttgataagatcaatgt

SEQ ID NO: 212287 - DNA, 1066 bp, Zea Mays
cagcaatctcaggtccctaagctcctgcaaaaaaaggactttttcactgtttccctgtgggccatacacgcaagtgcaaggtgttgttcaggatagaaatggtcgaactgttgctacactatttggaaaatgggatgaaagcatgcactatgtaatgggtgattgctttgggaaaggcatgggaactgaacagttttcagaggcccatttgttgtggaaaagaagcaaaccacctaattttcccactagatacaatctcactcgctttgcaattacactgaacgaacttacccctggattgaaggaaaaattgccaccaacagactcaagattacgaccagaccagagatgtctggagaaaggtgaatatgaaagggcaaatgctgagaagttgaggcttgaacagaaacagcggcaggcacgaaagatgcaggatagcggatggaagcctcggtggtttgcaaaggataaagctactgacacataccgttacctcggtgggtactgggaatccagagaaaagagcagctgggaaggctgccccgacatcttcgggcaagaccctaacgatctgatgatagctgactaggtttgagtaggttataggtcttttggttctctttttcgggaacgcataattccggaaatttttagtggttcatattatagagcaattaaatggccgttgatatgtaagcattggcagtgcctcagggagtattgatctcgtacataataattagacaatggttcgtctcacatgtcaccttatttttttggcaaagtatttttagccctcttgtgaggttttcacgctcacaagttcagtcttcagagtggtggtataaggtgggcgatcagtgattcaccagtatatggctattattattatataaatgtagtcttatactggatatgtaactacacatacaagtgcaggagggcgtgactttgttcatcattttggtggagtgctagtaaagatattaagctggtcatttgcgtatctttattctcgtgaatgtatgttgcgttgttgattctcgtgagaggccgtgaatgcatg

SEQ ID NO: 212288 - DNA, 1029 bp, Zea Mays
caaagacagttttttttcaccagccatctcccataggtgcaaggtgttgttcaggatagaaatggtcgaactgttgctacactatttggaaaatgggatgaaagcatgcactatgtaatgggtgattgctttgggaaaggcatgggaactgaacagttttcagaggcccatttgttgtggaaaagaagcaaaccacctaattttcccactagatacaatctcactcgctttgcaattacactgaacgaacttacccctggattgaaggaaaaattgccaccaacagactcaagattacgaccagaccagagatgtctggagaaaggtgaatatgaaagggcaaatgctgagaagttgaggcttgaacagaaacagcggcaggcacgaaagatgcaggatagcggatggaagcctcggtggtttgcaaaggataaagctactgacacataccgttacctcggtgggtactgggaatccagagaaaagagcagctgggaaggctgccccgacatcttcgggcaagaccctaacgatctgatgatagctgactaggtttgagtaggttataggtcttttggttctctttttcgggaacgcataattccggaaatttttagtggttcatattatagagcaattaaatggccgttgatatgtaagcattggcagtgcctcagggagtattgatctcgtacataataattagacaatggttcgtctcacatgtcaccttatttttttggcaaagtatttttagccctcttgtgaggttttcacgctcacaagttcagtcttcagagtggtggtataaggtgggcgatcagtgattcaccagtatatggctattattattatataaatgtagtcttatactggatatgtaactacacatacaagtgcaggagggcgtgactttgttcatcattttggtggagtgctagtaaagatattaagctggtcatttgcgtatctttattctcgtgaatgtatgttgcgttgttgattctcgtgagaggccgtgaatgcatg

SEQ ID NO: 212289 - DNA, 1490 bp, Zea Mays
cacatcttatttcttcaatctggcttataagagggaatagtcttatgaggattcttagcatagcagcatttgctgtttctggatatgcctctacagatgggaggagctgtaagccttttaatccccttcttggggagacatatgaagcagactatccagacaaaggcctccgttttttctctgaaaaggttagtcatcaccctatggttattgcatgccactgtgtgggaactggctggaggttttgggctgatagcaacctgaagagtaaattctggggtcgttccattcaacttgatcctgttggtgcattaacactggagtttgatgatggtgaagttttccaatggagcaaggtgacaacttcaatttacaatctcatattgggcaagctatattgcgatcactatggtactatgcgcatacaaggtaattgtgaatattcatgtaagcttaagttcaaggagcagtcaattatcgatcgcaaccctcaccaggtgcaaggtgttgttcaggatagaaatggtcgaactgttgctacactatttggaaaatgggatgaaagcatgcactatgtaatgggtgattgctttgggaaaggcatgggaactgaacagttttcagaggcccatttgttgtggaaaagaagcaaaccacctaattttcccactagatacaatctcactcgctttgcaattacactgaacgaacttacccctggattgaaggaaaaattgccaccaacagactcaagattacgaccagaccagagatgtctggagaaaggtgaatatgaaagggcaaatgctgagaagttgaggcttgaacagaaacagcggcaggcacgaaagatgcaggatagcggatggaagcctcggtggtttgcaaaggataaagctactgacacataccgttacctcggtgggtactgggaatccagagaaaagagcagctgggaaggctgccccgacatcttcgggcaagaccctaacgatctgatgatagctgactaggtttgagtaggttataggtcttttggttctctttttcgggaacgcataattccggaaatttttagtggttcatattatagagcaattaaatggccgttgatatgtaagcattggcagtgcctcagggagtattgatctcgtacataataattagacaatggttcgtctcacatgtcaccttatttttttggcaaagtatttttagccctcttgtgaggttttcacgctcacaagttcagtcttcagagtggtggtataaggtgggcgatcagtgattcaccagtatatggctattattattatataaatgtagtcttatactggatatgtaactacacatacaagtgcaggagggcgtgactttgttcatcattttggtggagtgctagtaaagatattaagctggtcatttgcgtatctttattctcgtgaatgtatgttgcgttgttgattctcgtgagaggccgtgaatgcatg

SEQ ID NO: 212290 - DNA, 2955 bp, Zea Mays
gtcctgttcaccacccttttcgttctcgtcttcctggctcccggcggcacccacccgttcccggagcaaaaataaaacgatcccaaaacacaaaagaatccgccacctcgccggcgacaggggcgacctcgcgcgccccggccggtgctgaccccgacttctccatgcatccattctgctgcgcgcctctcgtgcccgtatcgcccgcggcctctgccgcccccgctgcgtcctccgctgtggcgggcacccaggccgtgatgccgccaccgcagcccccgccgttgccgcctccgccgcctcgaaacaactccgccactggcggtgagaggcgcgcgcgcgcagcgggggtcagcggtggtggaggaggcgattcctcgccgctcgagggggtgaagctgaacgagatcgtcggcggcggcatctcgggaatcatgtacaagtgggtgaactacgggcgcgggtggaggccgcgctggttcgctctccacgaaggcgtgctctccttctacaagatccacgggcccgaccgcatcatcctatcgcgcgagaccgagcggggcgccaaggtcatcggcgaggagtccctccgccgcctcaaccgcccctccgccttctcgccgtcccactccaacggccaccaccaccctcgaaatcccatcggcgaaatccacctcaaggtgtcaaccgtgagggagagcagatcggacgacaggagattctccatcttctcggggacgaagacgttgcacctgcgggcggagaccagggaggacagagctgcgtggctcgaggcgctgcgggtgaccaaggacatgttcccgaggatgtcctctagcgagatggtcgggccaggggacaccgctgcggcagtggccgtctcaaccgagcgcctaaggcagcggctgcagcaggaaggggtcagcgaggcggccattgctgacagcgagaggatcgtgcgagaagaattcgaggctctgcacaagcagcttgtgctcgccaagcagaagcatgcgctcctcttggaaactcttcgccagctagagacagaaaaggttgatttggagaatacccttgttgatgagagccaaaggcagtcaaaagagtatggatctgcttctaaaccaaggcatgagaagtatagtgaaggaagtgctagcgaatctgatgattataatgaaccacaagatccagctgaagagactgacgatgaagcaaatctttactttgatacaagagattttctatcctcaagctcttttaaaagtagtggatctgatttccaaaggtctgaagctggttcggatgatgaagatgattatccaatggatggaattaatccttctatgaagtctatcggagttagttatgcatatgtaagaagacggaacaggctgccagatccagttgagaaagaaaagggtgtaagtttgtggtcaatgatcaaggacaacataggaaaggatcttacaaaagtttgtctgcctgtttacttcaatgagccactctcatcgctacaaaaatgttttgaagatcttgaatattcctaccttattgatcgtgcatccgaatgggggaaaagggggaatagtcttatgaggattcttagcatagcagcatttgctgtttctggatatgcctctacagatgggaggagctgtaagccttttaatccccttcttggggagacatatgaagcagactatccagacaaaggcctccgttttttctctgaaaaggttagtcatcaccctatggttattgcatgccactgtgtgggaactggctggaggttttgggctgatagcaacctgaagagtaaattctggggtcgttccattcaacttgatcctgttggtgcattaacactggagtttgatgatggtgaagttttccaatggagcaaggtgacaacttcaatttacaatctcatattgggcaagctatattgcgatcactatggtactatgcgcatacaaggatagaaatggtcgaactgttgctacactatttggaaaatgggatgaaagcatgcactatgtaatgggtgattgctttgggaaaggcatgggaactgaacagttttcagaggcccatttgttgtggaaaagaagcaaaccacctaattttcccactagatacaatctcactcgctttgcaattacactgaacgaacttacccctggattgaaggaaaaattgccaccaacagactcaagattacgaccagaccagagatgtctggagaaaggtgaatatgaaagggcaaatgctgagaagttgaggcttgaacagaaacagcggcaggcacgaaagatgcaggatagcggatggaagcctcggtggtttgcaaaggataaagctactgacacataccgttacctcggtgggtactgggaatccagagaaaagagcagctgggaaggctgccccgacatcttcgggcaagaccctaacgatctgatgatagctgactaggtttgagtaggttataggtcttttggttctctttttcgggaacgcataattccggaaatttttagtggttcatattatagagcaattaaatggccgttgatatgtaagcattggcagtgcctcagggagtattgatctcgtacataataattagacaatggttcgtctcacatgtcaccttatttttttggcaaagtatttttagccctcttgtgaggttttcacgctcacaagttcagtcttcagagtggtggtataaggtgggcgatcagtgattcaccagtatatggctattattattatataaatgtagtcttatactggatatgtaactacacatacaagtgcaggagggcgtgactttgttcatcattttggtggagtgctagtaaagatattaagctggtcatttgcgtatctttattctcgtgaatgtatgttgcgttgttgattctcgtgagaggccgtgaatgcatg

SEQ ID NO: 212291 - DNA, 3056 bp, Zea Mays
ggcaaacatagctcctgtagtcctgttcaccacccttttcgttctcgtcttcctggctcccggcggcacccacccgttcccggagcaaaaataaaacgatcccaaaacacaaaagaatccgccacctcgccggcgacaggggcgacctcgcgcgccccggccggtgctgaccccgacttctccatgcatccattctgctgcgcgcctctcgtgcccgtatcgcccgcggcctctgccgcccccgctgcgtcctccgctgtggcgggcacccaggccgtgatgccgccaccgcagcccccgccgttgccgcctccgccgcctcgaaacaactccgccactggcggtgagaggcgcgcgcgcgcagcgggggtcagcggtggtggaggaggcgattcctcgccgctcgagggggtgaagctgaacgagatcgtcggcggcggcatctcgggaatcatgtacaagtgggtgaactacgggcgcgggtggaggccgcgctggttcgctctccacgaaggcgtgctctccttctacaagatccacgggcccgaccgcatcatcctatcgcgcgagaccgagcggggcgccaaggtcatcggcgaggagtccctccgccgcctcaaccgcccctccgccttctcgccgtcccactccaacggccaccaccaccctcgaaatcccatcggcgaaatccacctcaaggtgtcaaccgtgagggagagcagatcggacgacaggagattctccatcttctcggggacgaagacgttgcacctgcgggcggagaccagggaggacagagctgcgtggctcgaggcgctgcgggtgaccaaggacatgttcccgaggatgtcctctagcgagatggtcgggccaggggacaccgctgcggcagtggccgtctcaaccgagcgcctaaggcagcggctgcagcaggaaggggtcagcgaggcggccattgctgacagcgagaggatcgtgcgagaagaattcgaggctctgcacaagcagcttgtgctcgccaagcagaagcatgcgctcctcttggaaactcttcgccagctagagaaaaggttgatttggagaatacccttgttgatgagagccaaaggcagtcaaaagagtatggatctgcttctaaaccaaggcatgagaagtatagtgaaggaagtgctagcgaatctgatgattataatgaaccacaagatccagctgaagagactgacgatgaagcaaatctttactttgatacaagagattttctatcctcaagctcttttaaaagtagtggatctgatttccaaaggtctgaagctggttcggatgatgaagatgattatccaatggatggaattaatccttctatgaagtctatcggagttagttatgcatatgtaagaagacggaacaggctgccagatccagttgagaaagaaaagggtgtaagtttgtggtcaatgatcaaggacaacataggaaaggatcttacaaaagtttgtctgcctgtttacttcaatgagccactctcatcgctacaaaaatgttttgaagatcttgaatattcctaccttattgatcgtgcatccgaatgggggaaaagggggaatagtcttatgaggattcttagcatagcagcatttgctgtttctggatatgcctctacagatgggaggagctgtaagccttttaatccccttcttggggagacatatgaagcagactatccagacaaaggcctccgttttttctctgaaaaggttagtcatcaccctatggttattgcatgccactgtgtgggaactggctggaggttttgggctgatagcaacctgaagagtaaattctggggtcgttccattcaacttgatcctgttggtgcattaacactggagtttgatgatggtgaagttttccaatggagcaaggtgacaacttcaatttacaatctcatattgggcaagctatattgcgatcactatggtactatgcgcatacaaggtaattgtgaatattcatgtaagcttaagttcaaggagcagtcaattatcgatcgcaaccctcaccaggtgcaaggtgttgttcaggatagaaatggtcgaactgttgctacactatttggaaaatgggatgaaagcatgcactatgtaatgggtgattgctttgggaaaggcatgggaactgaacagttttcagaggcccatttgttgtggaaaagaagcaaaccacctaattttcccactagatacaatctcactcgctttgcaattacactgaacgaacttacccctggattgaaggaaaaattgccaccaacagactcaagattacgaccagaccagagatgtctggagaaaggtgaatatgaaagggcaaatgctgagaagttgaggcttgaacagaaacagcggcaggcacgaaagatgcaggatagcggatggaagcctcggtggtttgcaaaggataaagctactgacacataccgttacctcggtgggtactgggaatccagagaaaagagcagctgggaaggctgccccgacatcttcgggcaagaccctaacgatctgatgatagctgactaggtttgagtaggttataggtcttttggttctctttttcgggaacgcataattccggaaatttttagtggttcatattatagagcaattaaatggccgttgatatgtaagcattggcagtgcctcagggagtattgatctcgtacataataattagacaatggttcgtctcacatgtcaccttatttttttggcaaagtatttttagccctcttgtgaggttttcacgctcacaagttcagtcttcagagtggtggtataaggtgggcgatcagtgattcaccagtatatggctattattattatataaatgtagtcttatactggatatgtaactacacatacaagtgcaggagggcgtgactttgttcatcattttggtggagtgctagtaaagatattaagctggtcatttgcgtatctttattctcgtgaatgtatgttgcgttgttgattctcgtgagaggccgtgaatgcatg

SEQ ID NO: 212292 - DNA, 3134 bp, Zea Mays
aattaattttgtaactcgttatttaaacattcgtgacagtgatgaagaaaagcgacaaccaaccgtcatgcaaaggcaaacatagctcctgtagtcctgttcaccacccttttcgttctcgtcttcctggctcccggcggcacccacccgttcccggagcaaaaataaaacgatcccaaaacacaaaagaatccgccacctcgccggcgacaggggcgacctcgcgcgccccggccggtgctgaccccgacttctccatgcatccattctgctgcgcgcctctcgtgcccgtatcgcccgcggcctctgccgcccccgctgcgtcctccgctgtggcgggcacccaggccgtgatgccgccaccgcagcccccgccgttgccgcctccgccgcctcgaaacaactccgccactggcggtgagaggcgcgcgcgcgcagcgggggtcagcggtggtggaggaggcgattcctcgccgctcgagggggtgaagctgaacgagatcgtcggcggcggcatctcgggaatcatgtacaagtgggtgaactacgggcgcgggtggaggccgcgctggttcgctctccacgaaggcgtgctctccttctacaagatccacgggcccgaccgcatcatcctatcgcgcgagaccgagcggggcgccaaggtcatcggcgaggagtccctccgccgcctcaaccgcccctccgccttctcgccgtcccactccaacggccaccaccaccctcgaaatcccatcggcgaaatccacctcaaggtgtcaaccgtgagggagagcagatcggacgacaggagattctccatcttctcggggacgaagacgttgcacctgcgggcggagaccagggaggacagagctgcgtggctcgaggcgctgcgggtgaccaaggacatgttcccgaggatgtcctctagcgagatggtcgggccaggggacaccgctgcggcagtggccgtctcaaccgagcgcctaaggcagcggctgcagcaggaaggggtcagcgaggcggccattgctgacagcgagaggatcgtgcgagaagaattcgaggctctgcacaagcagcttgtgctcgccaagcagaagcatgcgctcctcttggaaactcttcgccagctagagacagaaaaggttgatttggagaatacccttgttgatgagagccaaaggcagtcaaaagagtatggatctgcttctaaaccaaggcatgagaagtatagtgaaggaagtgctagcgaatctgatgattataatgaaccacaagatccagctgaagagactgacgatgaagcaaatctttactttgatacaagagattttctatcctcaagctcttttaaaagtagtggatctgatttccaaaggtctgaagctggttcggatgatgaagatgattatccaatggatggaattaatccttctatgaagtctatcggagttagttatgcatatgtaagaagacggaacaggctgccagatccagttgagaaagaaaagggtgtaagtttgtggtcaatgatcaaggacaacataggaaaggatcttacaaaagtttgtctgcctgtttacttcaatgagccactctcatcgctacaaaaatgttttgaagatcttgaatattcctaccttattgatcgtgcatccgaatgggggaaaagggggaatagtcttatgaggattcttagcatagcagcatttgctgtttctggatatgcctctacagatgggaggagctgtaagccttttaatccccttcttggggagacatatgaagcagactatccagacaaaggcctccgttttttctctgaaaaggttagtcatcaccctatggttattgcatgccactgtgtgggaactggctggaggttttgggctgatagcaacctgaagagtaaattctggggtcgttccattcaacttgatcctgttggtgcattaacactggagtttgatgatggtgaagttttccaatggagcaaggtgacaacttcaatttacaatctcatattgggcaagctatattgcgatcactatggtactatgcgcatacaaggtaattgtgaatattcatgtaagcttaagttcaaggagcagtcaattatcgatcgcaaccctcaccaggtgcaaggtgttgttcaggatagaaatggtcgaactgttgctacactatttggaaaatgggatgaaagcatgcactatgtaatgggtgattgctttgggaaaggcatgggaactgaacagttttcagaggcccatttgttgtggaaaagaagcaaaccacctaattttcccactagatacaatctcactcgctttgcaattacactgaacgaacttacccctggattgaaggaaaaattgccaccaacagactcaagattacgaccagaccagagatgtctggagaaaggtgaatatgaaagggcaaatgctgagaagttgaggcttgaacagaaacagcggcaggcacgaaagatgcaggatagcggatggaagcctcggtggtttgcaaaggataaagctactgacacataccgttacctcggtgggtactgggaatccagagaaaagagcagctgggaaggctgccccgacatcttcgggcaagaccctaacgatctgatgatagctgactaggtttgagtaggttataggtcttttggttctctttttcgggaacgcataattccggaaatttttagtggttcatattatagagcaattaaatggccgttgatatgtaagcattggcagtgcctcagggagtattgatctcgtacataataattagacaatggttcgtctcacatgtcaccttatttttttggcaaagtatttttagccctcttgtgaggttttcacgctcacaagttcagtcttcagagtggtggtataaggtgggcgatcagtgattcaccagtatatggctattattattatataaatgtagtcttatactggatatgtaactacacatacaagtgcaggagggcgtgactttgttcatcattttggtggagtgctagtaaagatattaagctggtcatttgcgtatctttattctcgtgaatgtatgttgcgttgttgattctcgtgagaggccgtgaatgcatg

SEQ ID NO: 212293 - DNA, 1188 bp, Zea Mays
tacgatagttggtggaatgaaggaagtgctagcgaatctgatgattataatgaaccacaagatccagctgaagagactgacgatgaagcaaatctttactttgatacaagagattttctatcctcaagctcttttaaaagtagtggatctgatttccaaaggtctgaagctggttcggatgatgaagatgattatccaatggatggaattaatccttctatgaagtctatcggagttagttatgcatatgtaagaagacggaacaggctgccagatccagttgagaaagaaaagggtgtaagtttgtggtcaatgatcaaggacaacataggaaaggatcttacaaaagtttgtctgcctgtttacttcaatgagccactctcatcgctacaaaaatgttttgaagatcttgaatattcctaccttattgatcgtgcatccgaatgggggaaaagggggaatagtcttatgaggattcttagcatagcagcatttgctgtttctggatatgcctctacagatgggaggagctgtaagccttttaatccccttcttggggagacatatgaagcagactatccagacaaaggcctccgttttttctctgaaaaggttagtcatcaccctatggttattgcatgccactgtgtgggaactggctggaggttttgggctgatagcaacctgaagagtaaattctggggtcgttccattcaacttgatcctgttggtgcattaacactggagtttgatgatggtgaagttttccaatggagcaaggtgacaacttcaatttacaatctcatattgggcaagctatattgcgatcactatggtactatgcgcatacaaggtaattgtgaatattcatgtaagcttaagttcaaggagcagtcaattatcgatcgcaaccctcaccaggcaagtgttacatttctcactatggaaagacacattcttttaaacaattttgtcgagaagattgcatgggaacatgtttttgaaagcgctgggaattatggcatgtagcgttctgcttgaaataatttacactatgtgtttgaacctgaacattcttattattgttagaagatgttttggcttttctagatacatagcttttgttatgtatttagatatacaatatgtctagatatattgtatgtatttaggaaagccaaaacgtct

SEQ ID NO: 212294 - DNA, 1138 bp, Zea Mays
tggaacactttgcaactggttctgtctgtgtacatgggttcaagggtgaaggataattctgagcaaggacagggtaatgatgctaggagtaaatgtactcaaagctctgtcgttgagcccacacaaccatcttcagggtctgttgtgcttaaccctatgatgccattttggcctgtgccccctcccatggctggcccagcaactactctgaatatgggagtggattactggggtactcctgcttctgtacccatgcatggtaaagttattgcagcaccgacatcagctccttcgtcaaattcacgtgatattgttctcagtgatccgactatacaggatgggagagaactgaagagacaaaaacggaagcaatcaaatagggaatcagctcgacgctcaagattgcgcaagcaggctgaatgggaggaagtagccaatcgtgcagatttgctaaagcaggaaaatagttcacttaaagaagaattgaaacaacttcaggagaagtgtgatggcttgacctcagaaaatacatctctacatgagaagcttaaagcgcttgaggatgagaaatcaaatggaaattggtacaaggattaaaggctgaaacttctctctctttctgactgctgatataatttggtggtaacctgataggacgacaactaaggaggtattcatatacggtattagacttttgtccgagggggtaaaattgtatcataggatttgacatggttgacggctacagattcttcgtccagttgtgctgctgtgctgtgttgtctttcttccctcttcgtgctagatcctacagaagtacaactatgtagaaacccccaggtggtgtttgaagcctggggggattagcgtgtggtattggtatagctgttgtagagctgctcactgagcttcttgacagaaactgaagcgtgctaaagcagtcgtgtgatttacgattcagacggattaattttacggatagtaatgtaactgcactcatgaatacaaatagccttttactgatttcgccctgtacggggaacggctttggaaaactgtggaagctgaacagtgtgtggtgttgctcatatgttagttgggaacgtattattcccatgtacaagatgcagcaactcag

SEQ ID NO: 212295 - DNA, 2024 bp, Zea Mays
aaagctttcttttaacatgataagctcacaaagttggttgggtattgctagggttatttgatgtccgattattagaaaaaaagaaaaacaggaaaaccacgctgtgtctctgcctccgttgtctgtccgacccggcgttgtgattgggggagtatgaagtgctcacaccatctcctctccattcacatcagcgctccacgcctgcgcccctgaattcccaaatcctgcgcgcctctgccccaaccccgctcgtcgactcctctctgccaaacacgtcggaggaatccttctccggaactcgtcttcgtcctgtctgtcgggctggcgtggagtggagatccatcaccacgtggataggtctcttcttctgctggttcaacgctgaatctgtccttcaatgccttcacaggctctacccctgaagaagttgcagagttagaagctattgccgcattttttgttgaagggaacatttttttgggtcatatccagattgaatacgaaacatgctcgtccttttgggactttaagagaataagaggcaaaaggaacataaggatagaggagagaaataaacaatggggaagggagatgtggctaccaggtcaaaatctcaaaaatcaccagcaatacagaatgagcagagtacacctgctaacccgcccacagcatatcctgattggtctcagttccaggcatactataatgctgctgggacagctccagtgaccccacctttttttcatccatctgtagctccaagccatcaggggcacccatatatgtggggtccacaggtatattctctctcttcaaccattttgcaagaataagtctagcagctagtgtaagtctgcaacatgaggtttaatgagttgatgttaggatgaacctgtcttctgctacttgtagtacgaggtacgattctggcagattttttaacatttgttcatatggtttgctagccatttatttattttaaggatactatcagctaccacaaccattgtaaaaaaactcggccggggagggtaagaccaccctcacggtattatattaatagaaggccgcgacaacggtcccgaccgagaaatccccgaaccccgtcctcccatcactaacgggcagggtcaaagctgcttactctgcaaaggcccacctaggcctgagggtggcgcacaaccgagctgtaacccgagagcggacgaggaacaatgaggggatttttttgtacagggccagggtattaccccatgacctggtgaaagggaccactgagccgtaatgcaaccattgtaactctggagataatccgtcatctaacatttgattattcaactggatagatgatgtctccttatgggacaccaccaccatatgcagcaatgtatgcacaaggtacaccatatcagcaggcaccaatgccaccgggttcacacccatacagtccttatcctatgcagttaccaaacgggacagttcaaactccaacatctggtgctggtggtacagcgacagataaatcaaataaaaataagcggaaggcttccctcaagagatcaaaaggaagcttaggtagtctggatgttgttgcagtaaaaaataacaagtcaccggcaaagccttcaacttcttcctccaatgaaggttcttcacaaagtgagagtggaagcgggagttcttctgaaggaagcagtacaaattcaaaaagtggttcaagggtgaaggataattctgagcaaggacagggtaatgatgctaggagtaaatgtactcaaagctctgtcgttgagcccacacaaccatcttcagggtctgttgtgcttaaccctatgatgccattttggcctgtgccccctcccatggctggcccagcaactactctgaatatgggagtggattactggggtactcctgcttctgtacccatgcatggtaaagttattgcagcaccgacatcagctccttcgtcaaattcacgtgatattgttctcagtgatccgactatacaggtttttttatta

SEQ ID NO: 212296 - DNA, 781 bp, Zea Mays
ggctgcgaggcagggaactgaggaaacgtctcgaatggtcgaacagtagtttgctcgctattatccatggcgacttctacggctgctgccactgcactgctccgccccaggccggcagttccagccaagaggaggtgcctccatgcggttgctgggtggacgacgatgaggaggaggggagctgcaggggtcgtgcgagctttcttcaaccctctcggggatgagcgcatcctccgagaagccatcaaggagccagtagcattcatgggtggtgtgtttgctggcctcttgaggcttgacctgaatgaggatcctctcaaggaatggataagtcggacagtggaggcttctggaatagctgaggaaaacagctctgaagaatcaagtgaggcagatcaaaatgatgcacctcagcaaattgagattgagtgagggacggctatcggaatatccttcgcctgtaaggatggttggcaccccagaaccagaaactgcgtaattgttgatttgaccccaaggcacagacgttaactcgagtgatatatcaatgcaaccgctaactacttgatgacgactggaaaatatttccgctagacttatgcctctcattgttgatgaccggaaatctggaagatttttctgctagagatcttttatgcttctcactggaaaggggctgccctttaatgctgacgatgaagaaatggcatgaattcatgttaagaacatttccagcaattgcattggagaagttgcatatggtttatcaattgataatttg

SEQ ID NO: 212297 - DNA, 737 bp, Zea Mays
ggctgcgaggcagggaactgaggaaacgtctcgaatggtcgaacagtagtttgctcgctattatccatggcgacttctacggctgctgccactgcactgctccgccccaggccggcagttccagccaagttggcgcagaggaggtgcctccatgcggttgctgggtggacgacgatgaggaggaggggagctgcaggggtcgtgcgagctttcttcaaccctctcggggatgagcgcatcctccgagaagccatcaaggtggtatacgaaggttgggcagatttctcttgatcaacggtgccccacatgcaaactcactgataaaatgtttgctgaattagtcatttggtttccctttttccattggaaggtctgcgtattgtcgcacaggacggctatcggaatatccttcgcctgtaaggatggttggcaccccagaaccagaaactgcgtaattgttgatttgaccccaaggcacagacgttaactcgagtgatatatcaatgcaaccgctaactacttgatgacgactggaaaatatttccgctagacttatgcctctcattgttgatgaccggaaatctggaagatttttctgctagagatcttttatgcttctcactggaaaggggctgccctttaatgctgacgatgaagaaatggcatgaattcatgttaagaacatttccagcaattgcattggagaagttgcatatggtttatcaattgataatttg

SEQ ID NO: 212298 - DNA, 2627 bp, Zea Mays
ctcaagccgaccgacggcgaccacctcagcagtcacccgcgatcccacgctctgcccccacctgacacaccctcgcccgcgcgcctcccgtgccccgaggccacgtgaattccccgccctgcccctaccgcccagcatccccagggggcatgccagtaatttccttccgccaccgtgtgccgtccggtctccggaccccggtgggctgtatcctcgcctgacctgcccgcctgcgctacgacgctgcaggccgggctctcgctcgtcgcgtttttatctccacccacctctctctctccgaaaccaaaaccgaccggcctcgctttcgccggttacccggtcaaacgcatcaaccgccggcacgtctccgatcggatcacgatggctgccccgtgcccccgccggtcaggccaggtcgcgtggtcacgtgcgacgcgcatgccgtcctcggccggcgccccagccccctcgccgtgtccttttattctcccccgcctcaccgcccgcatccccaattcacgcccccaccacgacttccgtgctcgccgccttctcggactaggggggttcggctcgagatctgatttcgggcgccggaggactacatggaggttagggagatggcgatggccgcggcggctgcggctgcggcgtccggcgggggaggcgtcaagctgccgccgcccaatcccaacctgccctacagggaggactgctggagcgacggcgagacggcagctctcgtctccgcctggggcagccgctacgtcgagctcaaccgcggtaacctgcgccagaagcagtggcaggaggtggcggacgccgtcaactcgcgccggggagcctccgcgcggcgccgcccgccgcgcaccgacatccagtgcaagaaccgcgtcgataccctcaagaagaagtacaaggccgagctcgcccgcaacgcgccgtccgcctggtcctacttccccgagctcgaccgcctcgtcggcccaaccctcagcgcctccgcctccaagagacccttggcgtctctgcctcctcaattcgctttgcccatgcatccaccagccgtgcggaggcccccgtcgccttcgccgtcatcgtcctccccgccgcagccgcctatggctttgcctctacccaattaccgccgtgggtccccgctccctgctgctgccctcatccagaaggaagccgcggctgctgcggctgctgcgtctgattcagaggactccgatgatgcggctggcggcaataatcacaaattgccccggtcgccttcgcgctcggtgtcgtcactctctgccagtaacaagaagcgctgcagagatgaggctggcagcagtgctgacaaaggtttcagagagttagcaagggcgatcgaagcttttgcggagatgtatgagcgtgtggagagtgctaagcaaaagcatgtggtggagatggagcgccagcgaattgaattcctgaagcaactggaggtgaaacgcatggagaatttcgttgatgcccatgtgaagctggctagagcaaagcgcacgaagaagactacagggggtgctgccgacggtgctggtggtatggagttggttgccaccgttgctgcgctgcctttcgtctccacctccaccttcctctgatattgaggaagagtttagagaaagagggagcaaaaaatggtggtccaaggaagcaagctaatccgaaagatagcaagtgaagcgtttggccgggcgtttgggtggtgcgaatttctgggtgatcaaaactggaatgtggattctgcagttggagatagcctttcttttagttgatgacttgaatctgtgccttttgttttcgcctgtctgtcgtgatctggttgtaaataagaaagtcttatgccgctagtcgcaggtcgaactttatcttctatcctaggccctctacttatctaggttgatagtgtaaggtgtctagatagagatctgacctaattgctattctgtcggatcgtttgatcgcgatggatgtcgttgttctgaaactttcctatttcctaatgaaatagggggcttcgccccttcgtcaattttttttgggatggatggactagttggtaaagtacttgcacatgtgttctaaactgttgatataaaaaagggctgtcaagggcacggtgatcccaagtagctggccctcgactgcggagctcgtagtcggcggccgattcctccaaggcggaggttatgcccctcacgtataggtgtatatttgggccgggcctaatgggccggctcgaagcacggaaaaaaacacggtctaggcacggcacgacacgaaatattttagtgccgggccgacacggcccgatatatcggcccgggtttgggccgaggtcgcggcccatgggcgggcacgacccgtttaaggcaggcacgaaatggcccatatagaggcacgaaaagactcatatatttattaaaatcacacttcattccacactttcatgtatttgataaagaacacaaagctagagataatgttagttagatgttttttatagctttgaattagagtatgtgatgtaattttatttttgttacgaacattagataatgaactgaacttacgaactttatatagagctg

SEQ ID NO: 212299 - DNA, 1536 bp, Zea Mays
aggaactattcttctgagaatctcgactcctaatctctaccttccccgtctagaagatctgccagtgctgccccgtctccaagaaggatttggaggatgacagaagctgcagttacaaggtactggtgccatggatgtgtgagggttgttgaggaggccatgggggaggagatcaagtgcccattttgtggtggtggattcattgaagagatgattggtgaggaatttgatgggttggccagccagcagtcagagcgggattcatcacaatggggagcgtcgaacaacccctttgagcagccaagggcggaggcggacagtgaggatgaagaagatgatgatgattacgatgatgatataggccgtgcatttgagagtttcatcaggaggcatgggcggccatcagctctccgtcgggcgtttgacagcatccaggacgaccttagagctgatagggatagtgacttctccattctgatcaatgccttcaaccaagccctcgctttgcaacgctcagtgcttgatgctgatgaggcccgagatgaccaaggtggatctagcaatgatgatggcttgatggaagaatatgtcctgggggctgggctaaccctgctgcttcaatatttgactgagaatgatccaagccagtatggcacccctcctgcaaacaaagaggcggttgacgctctgcccactgtccaaatagcagaggctgtcagctgttcagtctgccttgatgatcttgagctagggtcccaggcaaagcaaatgccttgtgagcataagttccactctccttgtatactgccatggcttgaactccatagctcctgccctgtgtgccggtttgagctgccatctgaagagacagaagatttggatgagcctagcaatgtggacagaacagagaacacccatgaggaagtcagggccgatggccctgaagatgacagtgagagcagtaacagagcgtgggcccttgttccttggttcagtgggctattctcaacacctgaaccacaaactgtcagaggcgctttcactgatcagcagactcgctccacttctggaaccaacatgaatgctggcgaaagctgatctcttcctcctttgtgaataatgcccatacatctgagaatagcaatggaccttgtcagtagataacttatttttctgtactgataatccttcttggatgaatcgcaaggtacaaagtttgtgacagctccattttttgccaggattttagcgatcatttcactgttgattgatttcatagctactgagcatctctgcatcctatgtgtgcgatcatttactttcttggctctgagaatccacccatgtttattgtcttgaactagtgctagtcgtaaaatgtttgtgatttgtgaacaccagtagaggtaagcctcgtcatgggaagacaccaaacattcttggggagaatctgtcggccacggagtacagatatcaatatcacgaaaggcaacctgaaatattgtgaccaaatttacacatttggttagaaatatt

SEQ ID NO: 212300 - DNA, 809 bp, Zea Mays
gcaaaccttttttttttatttgcaccgaccgaccgaccgacgacaccgccaggtccgccaccaccaccggtacaaggtctgaacaagaaggacagaatcggagacgtgggaggtaggaacttctacctgcacaagaacgattcaagcaacgacgggctctacctccagggccaggaggagcccggtgcagatccaagtggtggtgacatcagccggcactcctcctcaggagtaggacaagcatctggtggcgctacaagtcagcaccaggtcctcaccatcgtcatcagcaagctggataagattgggcggcggacgaggcggatctggaggttcatcacctgcaacaactgcgcatgacgcagcacaatgcacaaagcatctgctgcacaacagtgcaggcaagaggtagttagctaattaaccagtgaaaggcttggcatggattctggttaaccagtgtgtggtgtggtgtggtgtgtaatcctaattcctagcagcagttaaccagtgtacatgccattgtggttgtggttaaaccacaagaagagccagtggggaaggggatagccccactaagcagagtcatgggcacctatcgccgatttattaagatatgtgtccatgcgcatgtataaaattcaaaagttgtagctcgaaagaaaaattacagctctctctctctctctctctctctctataccgtggtcggtgctgcagtgtgtcgttgtctgtcgtctctgcccagctgggactggttttacatgaaaaccttgaaaacttgtaaggcttcgattttcaactgttcc

SEQ ID NO: 212301 - DNA, 942 bp, Zea Mays
ccgggaggtgcaggaggcgaaggtggtggtgagcgtgacggttgagggcagcgtcggcccggtgaaggccatggtcaggctgggcgccagcgtcggggaggccattgctgccgtggtcgagaggtacgccagggaggggagaagcccgcgcctggacccggccgcagccgagagcttccaacttcaccactcccacttcagccttgagagtctgaacaagaaggacagaatcggagacgtgggaggtaggaacttctacctgcacaagaacgattcaagcaacgacgggctctacctccagggccaggaggagcccggtgcagatccaagtggtggtgacatcagccggcactcctcctcaggagtaggacaagcatctggtggcgctacaagtcagcaccaggtcctcaccatcgtcatcagcaagctggataagattgggcggcggacgaggcggatctggaggttcatcacctgcaacaactgcgcatgacgcagcacaatgcacaaagcatctgctgcacaacagtgcaggcaagaggtagttagctaattaaccagtgaaaggcttggcatggattctggttaaccagtgtgtggtgtggtgtggtgtgtaatcctaattcctagcagcagttaaccagtgtacatgccattgtggttgtggttaaaccacaagaagagccagtggggaaggggatagccccactaagcagagtcatgggcacctatcgccgatttattaagatatgtgtccatgcgcatgtataaaattcaaaagttgtagctcgaaagaaaaattacagctctctctctctctctctctctctctataccgtggtcggtgctgcagtgtgtcgttgtctgtcgtctctgcccagctgggactggttttacatgaaaaccttgaaaacttgtaaggcttcgattttcaactgttcc

SEQ ID NO: 212302 - DNA, 1550 bp, Zea Mays
cttctctgcaatgaaaataattaagaacaaactgtgcaacaggatttcagatgaattgttcaatcacttgatggtgtgttacacagagcgggaattgttcaaagcacttgataattcaaccataacacgatgatttcagagtataaagactcgaaaaataagtctacctcgtgttatacgagactagcacattatatacatgatgcctagaccccgagaacttcaaggagttcaaacttgttgagaagaggcagctgagtcataatgttgccaagttcaagtttgcgctcccaacacctacttctgtattgggtcttccaatcggacagcatataagctgcagaggacaggatgcttctggcgaggaagtgatcaagccttatactccaactactctggactctgatgttggatcttttgagcttgttataaagatgtatccccaaggaagaatgtctcatcatttccgtgagatgaaagttggtgattatatgtctgtgaagggacctaagggccgtttcaagtacctacctggacaagtgagagcattaggaatggtagctggaggatcaggcattactccaatgttccaagtcacaagggcaattcttgagaacccaaaggacaacacgaaagtacacttaatctatgcaaatgtcacgtatgaggatattcttctgaaggaagaacttgacggcatggccaaaaactatcctgatcgtttcaagatctactatgtcttgaatcagcctcctgaagtctgggacggtggcgtcgggttcgtgtcgaaggaaatgatccagactcattgcccagcgcctgccgccgacattcaggtattgcgatgtggacctcctcccatgaacaaagccatggccgcgcacctggacgaccttggctacacgaaggagatgcagttccagttctaagcgttacattctctctaccagtaccagaataaacgggggtggaacaagtttcgtcgcctctttgagcagacgaagcctgaccatatcgccatatagctccaaacagacgcggtttgccactgacagtcacagagcgtcgtacttaaggggtgtttggtttatagggactaaactttagtctctccactttattccattttagttcataaattattaaatagggaaacttaaatagagttttagtttctatatttagtaatttagggactaaaatggaataaaatagaggactaaaaattagtccctagaaaccaaacacccctttactctacctggatgaaagcagcagtacagtacccacctaatttgtatcggtgtcgggacattgtaccatgccgttcttttgtatcggtttgtcactcactcactccgcgagccagcagcccagcacacgatccatcgtgtcattttggcaacgtcatacagatacaaaaaactgcatgtgcagcagatgtgctctgttctctcctgcagagcgatgaacgcgtacgcgcacggtagcaagcaggcgagcaggccgacatgtgttcgctgcagctcctgccgtgtgagggtgaggcc

SEQ ID NO: 212303 - DNA, 1220 bp, Zea Mays
agctgaaacaattttgtagtgtgctctctggattgcacgcgagatgcctagaccccgagaacttcaaggagttcaaacttgttgagaagaggcagctgagtcataatgttgccaagttcaagtttgcgctcccaacacctacttctgtattgggtcttccaatcggacagcatataagctgcagaggacaggatgcttctggcgaggaagtgatcaagccttatactccaactactctggactctgatgttggatcttttgagcttgttataaagatgtatccccaaggaagaatgtctcatcatttccgtgagatgaaagttggtgattatatgtctgtgaagggacctaaggaagaacttgacggcatggccaaaaactatcctgatcgtttcaagatctactatgtcttgaatcagcctcctgaagtctgggacggtggcgtcgggttcgtgtcgaaggaaatgatccagactcattgcccagcgcctgccgccgacattcaggtattgcgatgtggacctcctcccatgaacaaagccatggccgcgcacctggacgaccttggctacacgaaggagatgcagttccagttctaagcgttacattctctctaccagtaccagaataaacgggggtggaacaagtttcgtcgcctctttgagcagacgaagcctgaccatatcgccatatagctccaaacagacgcggtttgccactgacagtcacagagcgtcgtacttaaggggtgtttggtttatagggactaaactttagtctctccactttattccattttagttcataaattattaaatagggaaacttaaatagagttttagtttctatatttagtaatttagggactaaaatggaataaaatagaggactaaaaattagtccctagaaaccaaacacccctttactctacctggatgaaagcagcagtacagtacccacctaatttgtatcggtgtcgggacattgtaccatgccgttcttttgtatcggtttgtcactcactcactccgcgagccagcagcccagcacacgatccatcgtgtcattttggcaacgtcatacagatacaaaaaactgcatgtgcagcagatgtgctctgttctctcctgcagagcgatgaacgcgtacgcgcacggtagcaagcaggcgagcaggccgacatgtgttcgctgcagctcctgccgtgtgagggtgaggcc

SEQ ID NO: 212304 - DNA, 889 bp, Zea Mays
tatgtctgtgaagggacctaaggaagaacttgacggcatggccaaaaactatcctgatcgtttcaagatctactatgtcttgaatcagcctcctgaagtctgggacggtggcgtcgggttcgtgtcgaaggaaatgatccagactcattgcccagcgcctgccgccgacattcaggtattgcgatgtggacctcctcccatgaacaaagccatggccgcgcacctggacgaccttggctacacgaaggagatgcagttccagttctaagcgttacattctctctaccagtaccagaataaacgggggtggaacaagtttcgtcgcctctttgagcagacgaagcctgaccatatcgccatatagctccaaacagacgcggtttgccactgacagtcacagagcgtcgtacttaaggggtgtttggtttatagggactaaactttagtctctccactttattccattttagttcataaattattaaatagggaaacttaaatagagttttagtttctatatttagtaatttagggactaaaatggaataaaatagaggactaaaaattagtccctagaaaccaaacacccctttactctacctggatgaaagcagcagtacagtacccacctaatttgtatcggtgtcgggacattgtaccatgccgttcttttgtatcggtttgtcactcactcactccgcgagccagcagcccagcacacgatccatcgtgtcattttggcaacgtcatacagatacaaaaaactgcatgtgcagcagatgtgctctgttctctcctgcagagcgatgaacgcgtacgcgcacggtagcaagcaggcgagcaggccgacatgtgttcgctgcagctcctgccgtgtgagggtgaggcc

SEQ ID NO: 212305 - DNA, 890 bp, Zea Mays
gttcaattgatggtgcctatttggaagaacttgacggcatggccaaaaactatcctgatcgtttcaagatctactatgtcttgaatcagcctcctgaagtctgggacggtggcgtcgggttcgtgtcgaaggaaatgatccagactcattgcccagcgcctgccgccgacattcaggtattgcgatgtggacctcctcccatgaacaaagccatggccgcgcacctggacgaccttggctacacgaaggagatgcagttccagttctaagcgttacattctctctaccagtaccagaataaacgggggtggaacaagtttcgtcgcctctttgagcagacgaagcctgaccatatcgccatatagctccaaacagacgcggtttgccactgacagtcacagagcgtcgtacttaaggggtgtttggtttatagggactaaactttagtctctccactttattccattttagttcataaattattaaatagggaaacttaaatagagttttagtttctatatttagtaatttagggactaaaatggaataaaatagaggactaaaaattagtccctagaaaccaaacacccctttactctacctggatgaaagcagcagtacagtacccacctaatttgtatcggtgtcgggacattgtaccatgccgttcttttgtatcggtttgtcactcactcactccgcgagccagcagcccagcacacgatccatcgtgtcattttggcaacgtcatacagatacaaaaaactgcatgtgcagcagatgtgctctgttctctcctgcagagcgatgaacgcgtacgcgcacggtagcaagcaggcgagcaggccgacatgtgttcgctgcagctcctgccgtgtgagggtgaggcc

SEQ ID NO: 212306 - DNA, 2504 bp, Zea Mays
caaccacccccaccggaaaccgtgctcgcgccgcgtccgttcccgtaaacaattgctggatccccatttccccaccaagaaaagcagtagaaccgcgccggcccacgccccgctgtacagttgtcgcgctcgggcggccgagtagtttaatcctcgaggaaggaggggggcggtcgccccggatggccgtgtcctcgtcgccttcctgcagacccactcccgggtttgaggcgtccctcctcctccgccgccgctctttccggttgcgtttgggaggaatggttgtggagttggtggattctcattctccgctggggttttaggaggattccgggctcttggccggggaagcggagatcggaggttctgccaggcgtacggattgggcgctggagctcctgtttgtttgaattgaattttggggaaaagcttccacctttcttctgcctttaaaaggagatggctttttcacacgacggaaagatgaagggctgtcagacaaaccttttccggacaaaggataagaaagtcgtcaagatgacagatagtgcaagctgctccacagctaagtatggatcaagcaactcaaaatcaccatcttcatcccccttccggaagctttcagaagttaggagcatacgtctcaaccattttctaagtcactcttcaaatgctacaaaatatgaacatgtcaggatatttgtctccacatggaatgttggaggaaaagcacctactgccgagttgaaactggatgactttcttcctgttgatgaccattcagacatttatgttttaggctttcaggaaattgtgcctctcaatgctggtaatgtccttgtgatagaagataacgagccagctgcaagatggcttgctcttataaaccgtgcgctaaaccaaccagttgacactgttgatgatatatttcagcataaaccatatccctccctggattcaacctcatcccggtcaacaccatgccttgatggttccttctccaaccgttcaagaacagccagtggttctataatcttccaaaagtccttgaaatccatcaagaaatcttacatgccatcccagagaaaacaactcaaattctgcaattgcccagtggaaatggccaagaaatcctacaaagatgcttgcttttggtgtccacaagcatatgccaatgacatggactcctcagaagaggatgaattggatgacaatttgaatgatatttttggccttaatgatgatggcgttacttcgtctgtttctgcctccagggaccagctaaagtataacctcatatcttgcaaacaaatggttggtatttttgtcacagtctgggcaaagaaagaattaatgcagcatattggacatttgagaacgtcctgtgttggtcgcggaataatgggatatcttggaaataagggatgtatatcagtaagcatgacactataccagacaagcttttgtttcatctgcagccatttggcttcaggtgagaaggaaggtgatgaattgaggcgaaatttagatgtgttagagattctaaggctcacacaatttcgaaggatttgcagaagagctgggcgaagaatccctgagaaaattcttgaccatgagcgggtgatatggttaggagatctgaactaccgaatttccttgagctatgaagataccaaaaaacttctgactgaaaataactgggatgccctttttgaaaaggatcagctcaatatccagcgtgcttctggaagtgtgttcaaggggtggagtgaggagaagatatattttgctcccacatacaagtactcttgcaattcagattcttatgctggagagactgccacatcaaagaaaaagaggagaaccccagcctgaatactatggcatggagatggtattgcacagttgtcctacttccggggggaatctcaattctctgaccatcgtcctgtttgtgggacatttattgttgaggttaaaaggctagatggtcaatcaaagcggcgcccatcaaacaccaacattaaaatcggtgctgaagagttgttaccgacaagagacaggcataactaaggtgctggggcggggcccaaatcaccgattaaagctaggtttttgtgtgacttgggaacacaacaccgcggaaccttcgtaaggacgctaagctatctgttcctcgaggaaattacctgtgaccatagaaatatgattaaagatcatatgcttattattatgttgttgttattgtacatcatatagtcgcgtacagttttgaaaggaacattagtcattagtttatattgtatacttgtaaaacttcctcacagggttgttttggttttcatttctacttctttcatttgtgtaatttccaaagttcaacagagtagccaaagcatgttcgctttctttgttgtactgtacaaagtttgtattttgacctttgtaggggtcaagttttgaatttgtgtatcagccttgctggaaggagtttaattgtacaa

SEQ ID NO: 212307 - DNA, 3303 bp, Zea Mays
ctcgaaccctcgtcgcgcacgtataaaccggggcaaccggggacgcggacctcttcatctccgttcccgtcgccggcgacgctggtctctaggtgtcaggccgcgcgagccctagcatagcagctgtagtagtgctagactgctagtagtttagcagggcgctccgcgcgtcagttccaccagaaacagaaaggcaaattcggcttcgcttttacgcccgcttgatttgcctcttccaccctcttccaccagaaggcgggcggccgagcgaccaaaagtcaaaaggaggattggcccacggccacggccgagagcggcaggcgggcagggtgaggtgaggagaggccatcagggccgagagaccatggcacagcatatatacgccaccggctgcggccgctgcgggtgcgcccgccccatcatccggacactactgcccgcgctgacccaccatctcgcctcctcgtctctgttgcggcgccggaaggctcccatgggcgccagcgatcacctgggcctggcggcggtggccgccgccaagccgcggaatggcaggacgtgcatggccgtgctgggcgagccactgccggctcttgacgaccccggcatcctcgtccaccccagcgccgacttcgccgcccaggcgctcgtctcgtccacgaaacagtaccgagatatgtaccaaaagtcgatcgacgacccagctggtttctggtcagaaatcgcagatgagttctactggaagcagaagtggagccctgataatgtttgcgctgagaaccttgacgtgaccaaggggccgatcatgattgaatggtttaaggggggaaagaccaacatatgctacaatgcagtggaccgcaatgtggaggcagggaatggggacaagatcgccatgtactgggaggggaatgagcccagtcaggatgggaagctcacctactctgaactgctggaaaaggtttgccagctgtcaaattacttgaaaagcgtcggcgtacgaaaaggtgatgccgtggtgatctacctaccaatgttgatggagctgccgattgcaatgcttgcttgtgcccgcattggtgctgttcactcggttgtgtttgctggcttctcagcagatgcactggcccaacgagtcattgattgcaagcctaaggttgttattacctgcaatgctgtgaaaagggggatgaaaatcatccatctcaaagatatagtagatgcatctctggatcaaagtgcaaagaatggagttgatgtaggcatttgcttgacatatgaaaatcagtccgctctgaataaagtagacactcgatggaaaacaggaagagatgtctggtggcaggatgttgtgcctgatttcccaactaaatgcgatgtggaatgggttgatgcagaggatccactgtttcttttgtacacaagtggcagcacaggaaagccaaagggtgtgttgcatacaactgggggatatatggtctactctgctacaacatttaagcatgcatttgactacaaaccaacagacatatactgattgtggctggattactggacatagttatgtgacatatggtccactattgaatggagccacagttcttgttttcgaaggggccccaaattaccctgatcctggccgctgttgggacattgttgataaatatggagtgacaatattttatacagcaccaacacttatacgctcacttatgcgtgatggtactgagtatgttgctcggtactctcgcaagtctctccgagtacttggaagtgtgggtgagccaatcaaccccaccgcatggaggtggttgtatgatgttattggtgactcacgatgccccatatcagatacttggtggcagactgaaaccgggggattcatgatcactcctttacctggtgcttggcctcaaaagccaggatcagcaacgtttcctttcttcggtgtgcagccagtcattgttgacgagaaaggtcgggaaatggaaggagaatgcagtggatatctttgcataaagaaatcatggcctggggctttccggactctgtatggagataaagagagatatgagacgacatacttcaaaccatttgctggatattatttctcgggcgatggctgcagcagggataaagatggctaccactggctgactggaagagttgatgatgttatcaatgttagtggacaccggattgggacagcggaagttgagtctgctctggtttcacatccaaaatgtgctgaggctgctgttgttggtattgatcatgaggttaaaggccagggaatatatgcttttgtgactttggtggatggtgttccctacagcgatgatctacggaaaagcctcgttacgacggtccgcagtcagattggtgcgtttgctgctcctgacaagatccattgggcacctgggctccctaagacacgaagtgggaagatcatgcgaagaatcttaagaaaaatcgcatccaggcaactagatgagctcggcgacacgagcacgcttgctgaccctggtgttgtggaccagctgattgcactcagtgacagctaatctatcggctatgtgggagggggtgagacatgatcactgcctgcactatacttatgcaaaattcagctttatgatgcgaggtctgttgggcccagcgttctcttaattgcttcggtgtcatggggatgccaacaaaagagagatgctgcgaacttggggagatgcggacatatgcggggtgcgtctgtaaattgttggatcgcagtcactgatagttattgtacattggtaaataaggagatgaagtgtatatgcgagttttggctaaaatgtttaatgatagatctcgcattttatggttacgtacaggattcagccatggacattgaaggacaacgtgtttactacacctctttgttcgctgttcaaagcatgagcaccatcttagaaacattggaatttagggatctacatgagaattgagctgcttcggtcgaatttctgcggaggcagctgggatgtgtcccaaactagacacggtcggtaccaatactccttgaaccaatggggcacgggaatttggcagagttccgctcccaacttcggagcggattctacgtatctctaccaaacacgatacaattgtattttggtaggtgataaatcgcttcttcatttatactattgagttctgacttctgaggaaaaatatatgctcctcgtttcttccttttcaatcgtcactaacaccatttcataatcgattcacacctatttccattccaaaatcacttcatcg

SEQ ID NO: 212308 - DNA, 3187 bp, Zea Mays
cgccgatcgagtcctcgaaccctcgtcgcgcacgtataaaccggggcaaccggggacgcggacctcttcatctccgttcccgtcgccggcgacgctggtctctaggtgtcaggccgcgcgagccctagcatagcagctgtagtagtgctagactgctagtagtttagcagggcgctccgcgcgtcagttccaccagaaacagaaaggcaaattcggcttcgcttttacgcccgcttgatttgcctcttccaccctcttccaccagaaggcgggcggccgagcgaccaaaagtcaaaaggaggattggcccacggccacggccgagagcggcaggcgggcagggtgaggtgaggagaggccatcagggccgagagaccatggcacagcatatatacgccaccggctgcggccgctgcgggtgcgcccgccccatcatccggacactactgcccgcgctgacccaccatctcgcctcctcgtctctgttgcggcgccggaaggctcccatgggcgccagcgatcacctgggcctggcggcggtggccgccgccaagccgcggaatggcaggacgtgcatggccgtgctgggcgagccactgccggctcttgacgaccccggcatcctcgtccaccccagcgccgacttcgccgcccaggcgctcgtctcgtccacgaaacagtaccgagatatgtaccaaaagtcgatcgacgacccagctggtttctggtcagaaatcgcagatgagttctactggaagcagaagtggagccctgataatgtttgcgctgagaaccttgacgtgaccaaggggccgatcatgattgaatggtttaaggggggaaagaccaacatatgctacaatgcagtggaccgcaatgtggaggcagggaatggggacaagatcgccatgtactgggaggggaatgagcccagtcaggatgggaagctcacctactctgaactgctggaaaagctgtcaaattacttgaaaagcgtcggcgtacgaaaaggtgatgccgtggtgatctacctaccaatgttgatggagctgccgattgcaatgcttgcttgtgcccgcattggtgctgttcactcggttgtgtttgctggcttctcagcagatgcactggcccaacgagtcattgattgcaagcctaaggttgttattacctgcaatgctgtgaaaagggggatgaaaatcatccatctcaaagatatagtagatgcatctctggatcaaagtgcaaagaatggagttgatgtaggcatttgcttgacatatgaaaatcagtccgctctgaataaagtagacactcgatggaaaacaggaagagatgtctggtggcaggatgttgtgcctgatttcccaactaaatgcgatgtggaatgggttgatgcagaggatccactgtttcttttgtacacaagtggcagcacaggaaagccaaagggtgtgttgcatacaactgggggatatatggtctactctgctacaacatttaagcatgcatttgactacaaaccaacagacatatactggtgcactgcagattgtggctggattactggacatagttatgtgacatatggtccactattgaatggagccacagttcttgttttcgaaggggccccaaattaccctgatcctggccgctgttgggacattgttgataaatatggagtgacaatattttatacagcaccaacacttatacgctcacttatgcgtgatggtactgagtatgttgctcggtactctcgcaagtctctccgagtacttggaagtgtgggtgagccaatcaaccccaccgcatggaggtggttgtatgatgttattggtgactcacgatgccccatatcagatacttggtggcagactgaaaccgggggattcatgatcactcctttacctggtgcttggcctcaaaagccaggatcagcaacgtttcctttcttcggtgtgcagccagtcattgttgacgagaaaggtcgggaaatggaaggagaatgcagtggatatctttgcataaagaaatcatggcctggggctttccggactctgtatggagataaagagagatatgagacgacatacttcaaaccatttgctggatattatttctcgggcgatggctgcagcagggataaagatggctaccactggctgactggaagagttgatgatgttatcaatgttagtggacaccggattgggacagcggaagttgagtctgctctggtttcacatccaaaatgtgctgaggctgctgttgttggtattgatcatgaggttaaaggccagggaatatatgcttttgtgactttggtggatggtgttccctacagcgatgatctacggaaaagcctcgttacgacggtccgcagtcagattggtgcgtttgctgctcctgacaagatccattgggcacctgggctccctaagacacgaagtgggaagatcatgcgaagaatcttaagaaaaatcgcatccaggcaactagatgagctcggcgacacgagcacgcttgctgaccctggtgttgtggaccagctgattgcactcagtgacagctaatctatcggctatgtgggagggggtgagacatgatcactgcctgcactatacttatgcaaaattcagctttatgatgcgaggtctgttgggcccagcgttctcttaattgcttcggtgtcatggggatgccaacaaaagagagatgctgcgaacttggggagatgcggacatatgcggggattcagccatggacattgaaggacaacgtgtttactacacctctttgttcgctgttcaaagcatgagcaccatcttagaaacattggaatttagggatctacatgagaattgagctgcttcggtcgaatttctgcggaggcagctgggatgtgtcccaaactagacacggtcggtaccaatactccttgaaccaatggggcacgggaatttggcagagttccgctcccaacttcggagcggattctacgtatctctaccaaacacgatacaattgtattttggtaggtgataaatcgcttcttcatttatactattgagttctgacttctgaggaaaaatatatgctcctcgtttcttccttttcaatcgtcactaacaccatttcataatcgattcacacctatttccattccaaaatcacttcatcg

SEQ ID NO: 212309 - DNA, 3092 bp, Zea Mays
cacgtataaaccggggcaaccggccagccacagacacagcacaacccccgtccgccgatcgagtcctcgaaccctcgtcgcgcacgtataaaccggggcaaccggggacgcggacctcttcatctccgttcccgtcgccggcgacgctggtctctaggtgtcaggccgcgcgagccctagcatagcagctgtagtagtgctagactgctagtagtttagcagggcgctccgcgcgtcagttccaccagaaacagaaaggcaaattcggcttcgcttttacgcccgcttgatttgcctcttccaccctcttccaccagaaggcgggcggccgagcgaccaaaagtcaaaaggaggattggcccacggccacggccgagagcggcaggcgggcagggtgaggtgaggagaggccatcagggccgagagaccatggcacagcatatatacgccaccggctgcggccgctgcgggtgcgcccgccccatcatccggacactactgcccgcgctgacccaccatctcgcctcctcgtctctgttgcggcgccggaaggctcccatgggcgccagcgatcacctgggcctggcggcggtggccgccgccaagccgcggaatggcaggacgtgcatggccgtgctgggcgagccactgccggctcttgacgaccccggcatcctcgtccaccccagcgccgacttcgccgcccaggcgctcgtctcgtccacgaaacagtaccgagatatgtaccaaaagtcgatcgacgacccagctggtttctggtcagaaatcgcagatgagttctactggaagcagaagtggagccctgataatgtttgcgctgagaaccttgacgtgaccaaggggccgatcatgattgaatggtttaaggggggaaagaccaacatatgctacaatgcagtggaccgcaatgtggaggcagggaatggggacaagatcgccatgtactgggaggggaatgagcccagtcaggatgggaagctcacctactctgaactgctggaaaaggtttgccagctgtcaaattacttgaaaagcgtcggcgtacgaaaaggtgatgccgtggtgatctacctaccaatgttgatggagctgccgattgcaatgcttgcttgtgcccgcattggtgctgttcactcggttgtgtttgctggcttctcagcagatgcactggcccaacgagtcattgattgcaagcctaaggttgttattacctgcaatgctgtgaaaagggggatgaaaatcatccatctcaaagatatagtagatgcatctctggatcaaagtgcaaagaatggagttgatgtaggcatttgcttgacatatgaaaatcagtccgctctgaataaagtagacactcgatggaaaacaggaagagatgtctggtggcaggatgttgtgcctgatttcccaactaaatgcgatgtggaatgggttgatgcagaggatccactgtttcttttgtacacaagtggcagcacaggaaagccaaagggtgtgttgcatacaactgggggatatatggtctactctgctacaacatttaagcatgcatttgactacaaaccaacagacatatactggtgcactgcagattgtggctggattactggacatagttatgtgacatatggtccactattgaatggagccacagttcttgttttcgaaggggccccaaattaccctgatcctggccgctgttgggacattgttgataaatatggagtgacaatattttatacagcaccaacacttatacgctcacttatgcgtgatggtactgagtatgttgctcggtactctcgcaagtctctccgagtacttggaagtgtgggtgagccaatcaaccccaccgcatggaggtggttgtatgatgttattggtgactcacgatgccccatatcagatacttggtggcagactgaaaccgggggattcatgatcactcctttacctggtgcttggcctcaaaagccaggatcagcaacgtttcctttcttcggtgtgcagccagtcattgttgacgagaaaggtcgggaaatggaaggagaatgcagtggatatctttgcataaagaaatcatggcctggggctttccggactctgtatggagataaagagagatatgagacgacatacttcaaaccatttgctggatattatttctcgggcgatggctgcagcagggataaagatggctaccactggctgactggaagagttgatgatgttatcaatgttagtggacaccggattgggacagcggaagttgagtctgctctggtttcacatccaaaatgtgctgaggctgctgttgttggtattgatcatgaggttaaaggccagggaatatatgcttttgtgactttggtggatggtgttccctacagcgatgatctacggaaaagcctcgttacgacggtccgcagtcagattggtgcgtttgctgctcctgacaagatccattgggcacctgggctccctaagacacgaagtgggaagatcatgcgaagaatcttaagaaaaatcgcatccaggcaactagatgagctcggcgacacgagcacgcttgctgaccctggtgttgtggaccagctgattgcactcagtgacagctaatctatcggctatgtgggagggggattcagccatggacattgaaggacaacgtgtttactacacctctttgttcgctgttcaaagcatgagcaccatcttagaaacattggaatttagggatctacatgagaattgagctgcttcggtcgaatttctgcggaggcagctgggatgtgtcccaaactagacacggtcggtaccaatactccttgaaccaatggggcacgggaatttggcagagttccgctcccaacttcggagcggattctacgtatctctaccaaacacgatacaattgtattttggtaggtgataaatcgcttcttcatttatactattgagttctgacttctgaggaaaaatatatgctcctcgtttcttccttttcaatcgtcactaacaccatttcataatcgattcacacctatttccattccaaaatcacttcatcg

SEQ ID NO: 212310 - DNA, 3400 bp, Zea Mays
atcgagtcctcgaaccctcatcgcgcacgtataaaccggggcaaccggccagccacagacacagcacaacccccgtccgccgatcgagtcctcgaaccctcgtcgcgcacgtataaaccggggcaaccggggacgcggacctcttcatctccgttcccgtcgccggcgacgctggtctctaggtgtcaggccgcgcgagccctagcatagcagctgtagtagtgctagactgctagtagtttagcagggcgctccgcgcgtcagttccaccagaaacagaaaggcaaattcggcttcgcttttacgcccgcttgatttgcctcttccaccctcttccaccagaaggcgggcggccgagcgaccaaaagtcaaaaggaggattggcccacggccacggccgagagcggcaggcgggcagggtgaggtgaggagaggccatcagggccgagagaccatggcacagcatatatacgccaccggctgcggccgctgcgggtgcgcccgccccatcatccggacactactgcccgcgctgacccaccatctcgcctcctcgtctctgttgcggcgccggaaggctcccatgggcgccagcgatcacctgggcctggcggcggtggccgccgccaagccgcggaatggcaggacgtgcatggccgtgctgggcgagccactgccggctcttgacgaccccggcatcctcgtccaccccagcgccgacttcgccgcccaggcgctcgtctcgtccacgaaacagtaccgagatatgtaccaaaagtcgatcgacgacccagctggtttctggtcagaaatcgcagatgagttctactggaagcagaagtggagccctgataatgtttgcgctgagaaccttgacgtgaccaaggggccgatcatgattgaatggtttaaggggggaaagaccaacatatgctacaatgcagtggaccgcaatgtggaggcagggaatggggacaagatcgccatgtactgggaggggaatgagcccagtcaggatgggaagctcacctactctgaactgctggaaaaggtttgccagctgtcaaattacttgaaaagcgtcggcgtacgaaaaggtgatgccgtggtgatctacctaccaatgttgatggagctgccgattgcaatgcttgcttgtgcccgcattggtgctgttcactcggttgtgtttgctggcttctcagcagatgcactggcccaacgagtcattgattgcaagcctaaggttgttattacctgcaatgctgtgaaaagggggatgaaaatcatccatctcaaagatatagtagatgcatctctggatcaaagtgcaaagaatggagttgatgcatttgcttgacatatgaaaatcagtccgctctgaataaagtagacactcgatggaaaacaggaagagatgtctggtggcaggatgttgtgcctgatttcccaactaaatgcgatgtggaatgggttgatgcagaggatccactgtttcttttgtacacaagtggcagcacaggaaagccaaagggtgtgttgcatacaactgggggatatatggtctactctgctacaacatttaagcatgcatttgactacaaaccaacagacatatactggtgcactgcagattgtggctggattactggacatagttatgtgacatatggtccactattgaatggagccacagttcttgttttcgaaggggccccaaattaccctgatcctggccgctgttgggacattgttgataaatatggagtgacaatattttatacagcaccaacacttatacgctcacttatgcgtgatggtactgagtatgttgctcggtactctcgcaagtctctccgagtacttggaagtgtgggtgagccaatcaaccccaccgcatggaggtggttgtatgatgttattggtgactcacgatgccccatatcagatacttggtggcagactgaaaccgggggattcatgatcactcctttacctggtgcttggcctcaaaagccaggatcagcaacgtttcctttcttcggtgtgcagccagtcattgttgacgagaaaggtcgggaaatggaaggagaatgcagtggatatctttgcataaagaaatcatggcctggggctttccggactctgtatggagataaagagagatatgagacgacatacttcaaaccatttgctggatattatttctcgggcgatggctgcagcagggataaagatggctaccactggctgactggaagagttgatgatgttatcaatgttagtggacaccggattgggacagcggaagttgagtctgctctggtttcacatccaaaatgtgctgaggctgctgttgttggtattgatcatgaggttaaaggccagggaatatatgcttttgtgactttggtggatggtgttccctacagcgatgatctacggaaaagcctcgttacgacggtccgcagtcagattggtgcgtttgctgctcctgacaagatccattgggcacctgggctccctaagacacgaagtgggaagatcatgcgaagaatcttaagaaaaatcgcatccaggcaactagatgagctcggcgacacgagcacgcttgctgaccctggtgttgtggaccagctgattgcactcagtgacagctaatctatcggctatgtgggagggggtgagacatgatcactgcctgcactatacttatgcaaaattcagctttatgatgcgaggtctgttgggcccagcgttctcttaattgcttcggtgtcatggggatgccaacaaaagagagatgctgcgaacttggggagatgcggacatatgcggggtgcgtctgtaaattgttggatcgcagtcactgatagttattgtacattggtaaataaggagatgaagtgtatatgcgagttttggctaaaatgtttaatgatagatctcgcattttatggttacgtacaggattcagccatggacattgaaggacaacgtgtttactacacctctttgttcgctgttcaaagcatgagcaccatcttagaaacattggaatttagggatctacatgagaattgagctgcttcggtcgaatttctgcggaggcagctgggatgtgtcccaaactagacacggtcggtaccaatactccttgaaccaatggggcacgggaatttggcagagttccgctcccaacttcggagcggattctacgtatctctaccaaacacgatacaattgtattttggtaggtgataaatcgcttcttcatttatactattgagttctgacttctgaggaaaaatatatgctcctcgtttcttccttttcaatcgtcactaacaccatttcataatcgattcacacctatttccattccaaaatcacttcatcg

SEQ ID NO: 212311 - DNA, 3298 bp, Zea Mays
cacagacacagcacaacccccgtccgccgatcgagtcctcgaaccctcatcgcgcacgtataaaccggggcaaccggccagccacagacacagcacaacccccgtccgccgatcgagtcctcgaaccctcgtcgcgcacgtataaaccggggcaaccggggacgcggacctcttcatctccgttcccgtcgccggcgacgctggtctctaggtgtcaggccgcgcgagccctagcatagcagctgtagtagtgctagactgctagtagtttagcagggcgctccgcgcgtcagttccaccagaaacagaaaggcaaattcggcttcgcttttacgcccgcttgatttgcctcttccaccctcttccaccagaaggcgggcggccgagcgaccaaaagtcaaaaggaggattggcccacggccacggccgagagcggcaggcgggcagggtgaggtgaggagaggccatcagggccgagagaccatggcacagcatatatacgccaccggctgcggccgctgcgggtgcgcccgccccatcatccggacactactgcccgcgctgacccaccatctcgcctcctcgtctctgttgcggcgccggaaggctcccatgggcgccagcgatcacctgggcctggcggcggtggccgccgccaagccgcggaatggcaggacgtgcatggccgtgctgggcgagccactgccggctcttgacgaccccggcatcctcgtccaccccagcgccgacttcgccgcccaggcgctcgtctcgtccacgaaacagtaccgagatatgtaccaaaagtcgatcgacgacccagctggtttctggtcagaaatcgcagatgagttctactggaagcagaagtggagccctgataatgtttgcgctgagaaccttgacgtgaccaaggggccgatcatgattgaatggtttaaggggggaaagaccaacatatgctacaatgcagtggaccgcaatgtggaggcagggaatggggacaagatcgccatgtactgggaggggaatgagcccagtcaggatgggaagctcacctactctgaactgctggaaaaggtttgccagctgtcaaattacttgaaaagcgtcggcgtacgaaaaggtgatgccgtggtgatctacctaccaatgttgatggagctgccgattgcaatgcttgcttgtgcccgcattggtgctgttcactcggttgtgtttgctggcttctcagcagatgcactggcccaacgagtcattgattgcaagcctaaggttgttattacctgcaatgctgtgaaaagggggatgaaaatcatccatctcaaagatatagtagatgcatctctggatcaaagtgcaaagaatggagttgatgtaggcatttgcttgacatatgaaaatcagtccgctctgaataaagtagacactcgatggaaaacaggaagagatgtctggtggcaggatgttgtgcctgatttcccaactaaatgcgatgtggaatgggttgatgcagaggatccactgtttcttttgtacacaagtggcagcacaggaaagccaaagggtgtgttgcatacaactgggggatatatggtctactctgctacaacatttaagcatgcatttgactacaaaccaacagacatatactggtgcactgcagattgtggctggattactggacatagttatgtgacatatggtccactattgaatggagccacagttcttgttttcgaaggggccccaaattaccctgatcctggccgctgttgggacattgttgataaatatggagtgacaatattttatacagcaccaacacttatacgctcacttatgcgtgatggtactgagtatgttgctcggtactctcgcaagtctctccgagtacttggaagtgtgggtgagccaatcaaccccaccgcatggaggtggttgtatgatgttattggtgactcacgatgccccatatcagatacttggtggcagactgaaaccgggggattcatgatcactcctttacctggtgcttggcctcaaaagccaggatcagcaacgtttcctttcttcggtgtgcagtcattgttgacgagaaaggtcgggaaatggaaggagaatgcagtggatatctttgcataaagaaatcatggcctggggctttccggactctgtatggagataaagagagatatgagacgacatacttcaaaccatttgctggatattatttctcgggcgatggctgcagcagggataaagatggctaccactggctgactggaagagttgatgatgttatcaatgttagtggacaccggattgggacagcggaagttgagtctgctctggtttcacatccaaaatgtgctgaggctgctgttgttggtattgatcatgaggttaaaggccagggaatatatgcttttgtgactttggtggatggtgttccctacagcgatgatctacggaaaagcctcgttacgacggtccgcagtcagattggtgcgtttgctgctcctgacaagatccattgggcacctgggctccctaagacacgaagtgggaagatcatgcgaagaatcttaagaaaaatcgcatccaggcaactagatgagctcggcgacacgagcacgcttgctgaccctggtgttgtggaccagctgattgcactcagtgacagctaatctatcggctatgtgggagggggtgagacatgatcactgcctgcactatacttatgcaaaattcagctttatgatgcgaggtctgttgggcccagcgttctcttaattgcttcggtgtcatggggatgccaacaaaagagagatgctgcgaacttggggagatgcggacatatgcggggattcagccatggacattgaaggacaacgtgtttactacacctctttgttcgctgttcaaagcatgagcaccatcttagaaacattggaatttagggatctacatgagaattgagctgcttcggtcgaatttctgcggaggcagctgggatgtgtcccaaactagacacggtcggtaccaatactccttgaaccaatggggcacgggaatttggcagagttccgctcccaacttcggagcggattctacgtatctctaccaaacacgatacaattgtattttggtaggtgataaatcgcttcttcatttatactattgagttctgacttctgaggaaaaatatatgctcctcgtttcttccttttcaatcgtcactaacaccatttcataatcgattcacacctatttccattccaaaatcacttcatcg

SEQ ID NO: 212312 - DNA, 2166 bp, Zea Mays
ccgatcgagtcctcgaaccctcgtcgcgcacgtataaaccggggcaaccggggacgcggacctcttcatctccgttcccgtcgccggcgacgctggtctctaggtgtcaggccgcgcgagccctagcatagcagctgtagtagtgctagactgctagtagtttagcagggcgctccgcgcgtcagttccaccagaaacagaaaggcaaattcggcttcgcttttacgcccgcttgatttgcctcttccaccctcttccaccagaaggcgggcggccgagcgaccaaaagtcaaaaggaggattggcccacggccacggccgagagcggcaggcgggcagggtgaggtgaggagaggccatcagggccgagagaccatggcacagcatatatacgccaccggctgcggccgctgcgggtgcgcccgccccatcatccggacactactgcccgcgctgacccaccatctcgcctcctcgtctctgttgcggcgccggaaggctcccatgggcgccagcgatcacctgggcctggcggcggtggccgccgccaagccgcggaatggcaggacgtgcatggccgtgctgggcgagccactgccggctcttgacgaccccggcatcctcgtccaccccagcgccgacttcgccgcccaggcgctcgtctcgtccacgaaacagtaccgagatatgtaccaaaagtcgatcgacgacccagctggtttctggtcagaaatcgcagatgagttctactggaagcagaagtggagccctgataatgtttgcgctgagaaccttgacgtgaccaaggggccgatcatgattgaatggtttaaggggggaaagaccaacatatgctacaatgcagtggaccgcaatgtggaggcagggaatggggacaagatcgccatgtactgggaggggaatgagcccagtcaggatgggaagctcacctactctgaactgctggaaaaggtttgccagctgtcaaattacttgaaaagcgtcggcgtacgaaaaggtgatgccgtggtgatctacctaccaatgttgatggagctgccgattgcaatgcttgcttgtgcccgcattggtgctgttcactcggttgtgtttgctggcttctcagcagatgcactggcccaacgagtcattgattgcaagcctaaggttgttattacctgcaatgctgtgaaaagggggatgaaaatcatccatctcaaagatatagtagatgcatctctggatcaaagtgcaaagaatggagttgatgtaggcatttgcttgacatatgaaaatcagtccgctctgaataaagtagacactcgatggaaaacaggaagagatgtctggtggcaggatgttgtgcctgatttcccaactaaatgcgatgtggaatgggttgatgcagaggatccactgtttcttttgtacacaagtggcagcacaggaaagccaaagggtgtgttgcatacaactgggggatatatggtctactctgctacaacatttaagcatgcatttgactacaaaccaacagacatatactggtgcactgcagattgtggctggattactggacatagttatgtgacatatggtccactattgaatggagccacagttcttgttttcgaaggggccccaaattaccctgatcctggccgctgttgggacattgttgataaatatggagtgacaatattttatacagcaccaacacttatacgctcacttatgcgtgatggtactgagtatgttgctcggtactctcgcaagtctctccgagtacttggaagtgtgggtgagccaatcaaccccaccgcatggaggtggttgtatgatgttattggtgactcacgatgccccatatcagatacttggtggcagactgaaaccgggggattcatgatcactcctttacctggtgcttggcctcaaaagccaggatcagcaacgtttcctttcttcggtgtgcagccagtcattgttgacgagaaaggtcgggaaatggaaggagaatgcagtggatatctttgcataaagaaatcatggcctggggctttccggactctgtatggagataaagagagatatgagacgacatacttcaaaccatttgctggatattatttctcgggcgatggctgcagcagatgtgcttatcag

SEQ ID NO: 212313 - DNA, 770 bp, Zea Mays
atttagaatcaagactctagaatccagattctttgaatcccctaaattgtgtttggttattgttataaatgaacttcatctaccaaacaggattcgaataggcatttctttaccatgtttcgtgcaactatgcactgctaacatatcagtagcatggtttgcgctgctagaatatcagtttattaccattttcgtgcaatggtgactgaggtggatggggttattgaacaacatatttgaatatttgatgttttagctgcatggaagtattcattccaatccatctgttgaattgcaaagaattgcttaaatttgagatatgtatagttcagttttagttatgccttttcattggagcctgaattggacttcaattgtttgcatagttatagttataaatatagaatagccttgcttgtccatcaattttgaattgttacagtactgaatgagtcctcagagtgcatagtgttgttctctttttatgtgcctgatagttggtcctcttgtatttcagttgctcttgtggtagttcccccaactgtcaccatgcagaatgaggagggtaagactgtggacctctatgtccccaggaagtgctcggccacaaacaggatcatcactgccaaggaccatgcctctgtccagatcaacattggccacttggatgcgaatggcttgtatgatggtcacttcacaacatttgctctctctaggtttgtccgtgctcagacagctccttggacaggctgtggcagaagaaggctgat

SEQ ID NO: 212314 - DNA, 972 bp, Zea Mays
atgggaaaaagcttgaagatattgttccttcatcacacaactgtgacattccgcatgtgaaccgtactgagtatcagctgattgatatttctgaggatggatttgtgagccttcttacttcagatggcaacactaaggatgatcttagactcccaactgatgagactcttgtggcccaggtctgtatggaaatgttttccatcctaaacgctgcttcttattacgatgttatttttataacgatgttatttttcagtctatctctacatccctctccccatcttgttatcactactaatccttaagaggctaacgagggcgtccaccagcttcaccgtggaattttttttcttaataagtttgtcccaaaaaactctgtatcagcctctaaagtacttcatgcagtctgtaaatgttgactacctacgatagttatttgattatttcaggcctacctcctcgccatgctcgctctcgtcattgtcctcttctacttcactatcttcgcctttatcgtcacccacagggggtaccaggaactgggacaggattaggagctgccttcaggactccaaggtctgtaggagcctgcagaacaagaatgagaagatcgcacacctctcccagaatgaatgcagattgatgggaagttgcattcacaaagtaacttattcagttcggcagctctgctaacactcttcacgaatatcacaacttggttgaaatcaagagcgtccaagagatcattcagtttccagttcttctctacctcgctaagttttatatagtgctgcaaaaatatacgattccaattatttagagaaaacaaataaaaaaaatgtgcacgactcaaatgcagagtattattgtattacctgtacaagaccatggagggtcaactttgcctcatcatcaacatatatttccatcggatcagaagaattctttctccacccgcacgagatagttgga

SEQ ID NO: 212315 - DNA, 776 bp, Zea Mays
atgggaaaaagcttgaagatattgttccttcatcacacaactgtgacattccgcatgtgaaccgtactgagtatcagctgattgatatttctgaggatggatttgtgagccttcttacttcagatggcaacactaaggatgatcttagactcccaactgatgagactcttgtggcccagttatttgattatttcaggcctacctcctcgccatgctcgctctcgtcattgtcctcttctacttcactatcttcgcctttatcgtcacccacagggggtaccaggaactgggacaggattaggagctgccttcaggactccaaggtctgtaggagcctgcagaacaagaatgagaagatcgcacacctctcccagaatgaatgcagattgatgggaagttgcattcacaaagtaacttattcagttcggcagctctgctaacactcttcacgaatatcacaacttggttgaaatcaagagcgtccaagagatcattcagtttccagttcttctctacctcgctaagttttatatagtgctgcaaaaatatacgattccaattatttagagaaaacaaataaaaaaaatgtgcacgactcaaatgcagagtattattgtattacctgtacaagaccatggagggtcaactttgcctcatcatcaacatatatttccatcggattacatgcagcctccatacagaagttcagttatgcactgttcaacactagattctctccaaatatgcttaagttttgcaacagtgcttccaaatac

SEQ ID NO: 212316 - DNA, 1181 bp, Zea Mays
gtgtttttttgaagtttgaacagagggttatccaatttccattgttccaagataacgggaataagatacgaaacaggttgtggaggtttctacctccaagactggtaagcatggccatgccaaatgccactttgtcgccatagacattttcaatgggaaaaagcttgaagatattgttccttcatcacacaactgtgacattccgcatgtgaaccgtactgagtatcagctgattgatatttctgaggatggatttgtgagccttcttacttcagatggcaacactaaggatgatcttagactcccaactgatgagactcttgtggcccaggtctgtatggaaatgttttccatcctaaacgctgcttcttattacgatgttatttttataacgatgttatttttcagtctatctctacatccctctccccatcttgttatcactactaatccttaagaggctaacgagggcgtccaccagcttcaccgtggaattttttttcttaataagtttgtcccaaaaaactctgtatcagcctctaaagtacttcatgcagtctgtaaatgttgactacctacgatagttatttgattatttcaggcctacctcctcgccatgctcgctctcgtcattgtcctcttctacttcactatcttcgcctttatcgtcacccacagggggtaccaggaactgggacaggattaggagctgccttcaggactccaaggtctgtaggagcctgcagaacaagaatgagaagatcgcacacctctcccagaatgaatgcagattgatgggaagttgcattcacaaagtaacttattcagttcggcagctctgctaacactcttcacgaatatcacaacttggttgaaatcaagagcgtccaagagatcattcagtttccagttcttctctacctcgctaagttttatatagtgctgcaaaaatatacgattccaattatttagagaaaacaaataaaaaaaatgtgcacgactcaaatgcagagtattattgtattacctgtacaagaccatggagggtcaactttgcctcatcatcaacatatatttccatcggattacatgcagcctccatacagaagttcagttatgcactgttcaacactagattctctccaaatatgcttaagttttgcaacagtgcttccaaatac

SEQ ID NO: 212317 - DNA, 858 bp, Zea Mays
aaaaaagacatgataaaaaagaaccgtgcccgataaataagaagcgctgcctccgttcagggcctccgacacctcccaataaaaacgttcctccccgtcccactcgccggagcctggccgacgggatgcctcgagattcgcgcccagccgggatgcgcctcttcggcgtcaccatcgcgccggcgccggaggcggatccaccggtacgggatccgagccccaacccgcccgtggcggccagggaggacgtgatgcgtaagtgcaagagcatgggcaacctcgccgcccttggcgctgtcgtggacggtggaggaggtggtgcggacggcggaggcgccggcgacggctacctctccgatggcgggctgatgcagtcgtccgggaagcggcggagggcgcaggagaggaagaaagctgttccctggactgaagaagagcataggacatttcttgctggtcttgaaaagctagggaagggagactggaggggcatagcaaaaaattttgttaccaccagaacaccaactcaagttgcaagtcatgctcagaaatattttcttaggcaaactaatccaaacaagaagaagcgcagatctagtctttttgacatgatgccaagagagctgtcaccagcaccaaattgccccatattaccaccatcgatggcaaaagtacacgatgtggtagctatgacgaaacaacttcagaatagcaacttggaaggaacctcctcttcaaatgcagcatctcaagttggaagagatctccccccagttccatcttttaaggcaacaaatatggatccaagtttcagcaaatttagccacatgtcacagaagatgtgttacccactggtat

SEQ ID NO: 212318 - DNA, 1150 bp, Zea Mays
agacatgataaaaaagaaccgtgcccgataaataagaagcgctgcctccgttcagggcctccgacacctcccaataaaaacgttcctccccgtcccactcgccggagcctggccgacgggatgcctcgagattcgcgcccagccgggatgcgcctcttcggcgtcaccatcgcgccggcgccggaggcggatccaccggtacgggatccgagccccaacccgcccgtggcggccagggaggacgtgatgcgtaagtgcaagagcatgggcaacctcgccgcccttggcgctgtcgtggacggtggaggaggtggtgcggacggcggaggcgccggcgacggctacctctccgatggcgggctgatgcagtcgtccgggaagcggcggagggcgcaggagaggaagaaagctgttccctggactgaagaagagcataggacatttcttgctggtcttgaaaagctagggaagggagactggaggggcatagcaaaaaattttgttaccaccagaacaccaactcaagttgcaagtcatgctcagaaatattttcttaggcaaactaatccaaacaagaagaagcgcagatctagtctttttgacatgatgccaagagagctgtcaccagcaccaaattgccccatattaccaccatcgatggcaaaagtacacgatgtggtagctatgacgaaacaacttcagaatagcaacttggaaggaacctcctcttcaaatgcagcatctcaagttggaagagatctccccccagttccatcttttaaggcaacaaatatggatccaagtttcagcaaatttagccacatggagcgcgtctggagaactccctacccattcggaccagttcccagagcccctgaagggacgccttcaccaactcctgctgctgctgctgctgctgctgctgcggctgccaatgcagctgttccggtctctcaagctaacctgacgactgcctgtactagtaacacattcttgagccagccaaagccaagtgatactccgtcactgcctccgaagggaggtcctccatcagaggaggacggtttggaactgactgttgccccaccctcccaacagaacatgacgaacatgtcttcccagaatgcggaaatattaaacttatatacag

SEQ ID NO: 212319 - DNA, 1347 bp, Zea Mays
ggcgctgggcatctgtcgtttccatcggcgccacctcacatgctcacatttagaaatgtttgacatcttggggaaaattgaatgttaactcttgattataagtggcaactagcaaggacactataacgaattttcgtttatggaagatattcccatctgtatttgcttttcagtcaacaccagagttaatgtttggactgtaccttctgtattacttccgtgtgtttgagaggcagataggctctaacaaatactcggttttttgtctcttcactatcacagcatcatcgctcctcgagatcctgtcattggttatcttgaaagatacaaattacatcagcacgcttgcatcagggccttatggtctcatatttgcctcttttgttcccttctttcttgacattccaatcacatcacggttccgtatttttggtctgaatttcagtgacaaatcattcatttacttagctggttttcagcttcttttatcttcttggaagcgctcccttattcctggtatatttggtctggttgctggttctctctatcgtctaaatgtgctcggcatccgcaagatgaagcttccacaggttatttcatcattttttgcaagatatttcgccccttccccaggaagcacatctcgcccctccaggagtcttgttggaaacacaccgtcccatagaggccgtgctgttcagaatcagccatcaactggatttgcacctatcgtggagcctccagagtcctccgttgctatgctggtctcaatgggctttgatggcaataacgcaaggcaggcactcgtgagggctagaaatgacatcaacgtggcaacgaacatcctactggaagcacagtctcattgaactaacgcactgcaactttctggtggtaaattagagggaagaactggttatattccaagatgaacaaacaatatgagcacattggactacagatcggtagattagtgcctcatttcatctaccttgaactgcaggccgacagtttagtaaatcagcgtatacatttgcggcagttagttttatcgtgtcaatacttagatgccttacatacagagaatgtaatattccaatttcagcttgtaggatagatgatataagcattcatagtgtacaattcatccgatgttttacagctttagaacttgttccagcacgatatgtggatcgtgctgagttccttgatgttgcaaagaaaacgaggaaggacatcagggatcggtaaaatttaagcttgttttagggcgaacaagaaacagaacgggtacgaaggcgaaacatgctcgggcatggcttgggtgcaatattttcctaaatgcag

SEQ ID NO: 212320 - DNA, 1851 bp, Zea Mays
tgataattgggaagaaatttgattaattctattattgaattgctgaaaatagatttttgtcatatccgatggatatccgaaacccaatggacatgagcatggatatgaatttctacccgcgggtatagtcctcccaccaaaaagatctccaattccccaccccaaagagctaccctgaccagatttggccgcttcctcctctgcctcccgctaaccctagtccagcaccccgagatctgctccgcgcgagcagccatggcggagacgctcgacatgaccctcgatgacatcatcaagaacaacaagaagagtaacccctcctccggcggggcccgccgcagccgcggcggatccgcccctggcggcggcagcggcggggtcgggccgaccaggcgctccttcaagagggctgggaacaggcaggcgccctaccagccgccgaaggcccctgacgctgcgtggcagcacgacatgtaccctgcggtcgccgcaggaggcggcggcggcgggagggtctcggcgctcgagacgggcaccaagctctacatctccaacctggactttggggtttcgaacgacgatatcaaggagctgttctctgagctaggtgatctgaagcgtttttcgataatatatgatcgaagtgggaggtctaagggaacagctgaagttgtatttgcaaggcgttctgatgctgtagcggcggtgaagaaatataacaatgtccaacttgatggtaagcccatgaagatagagatagttgggaccaatactccaactgcatctgctgctcttccagtctccaatggtggccatgctaggaatgctgtgaggagtgcaccgaggggtgctgccccagcaggtgtgccgcagcgaagacctcatcagaggggtgggaggcgtagtggtggatctgggggtggtcgtcgtggcaaggagcgcagcaagccaaagtcggctgaagaactcgacgctgacttggagaagtatcatgctgatgcgatgcagaccaactaaatgtgttcacaaatttgatattcaacatcaaatatcaagcacattagtccttccattccagctgtttgtgctactatgttcaggggacaacaaaccttatgtttgtgggggtattgctttactgaattttgtgggttttgtttacaatagaactagagttggatgatgctgagtacttccatggaaattacttgcttgcctttagtttctgtacctaatgccgaggagacaagaatcatccaagttactcgacatgtgaaagttgatgatgtatgaaggtacccacatttcctttgaccccccaccgtataatatatcttggaggtaaaagagactgggcttcagatgttccttggtgatctagttgtgcgctttcgatctggtattgctcagatgtttctccgctgtaggctggttcaagatcaagccatctaaggaggaggtggcctgttcatattgtgaaacatcatgatgcttattttgggcatcttaagctatcttctctggcacatcaatgatttcatgagcttcaaggcccctttattttaaaagttgattctttgcataatcctctctgtgggtgcctacaaagtttaaatgtggacatggctgtcactagtctcattgaagcatcatggtgcaaatcctgcttcaagggctcttcgaccgttgcacggtagacgcgtggccacaaacactgctcgtgagcaatccagctatacgtcttcgctgcggaccagaaatctcaattcaatccagctaagtcgtgactcgtgacgtcctccagccctgactcacgattctgcatctgctcgcgtcgcatccgcctcaacg

SEQ ID NO: 212321 - DNA, 1446 bp, Zea Mays
gcgaagaaagaagtatgaataaaacaaaatttgaagacgcctaacagcccgactgcttcgtttccacgcgcacgaaaccctagactagataaaaagttcccatttccctcaattccccaacttccctcgccgcaatctctcgccgcctccagtccagagccaccgtgagatctgcccgattccgccgcccggacccggggactccctcccctcctcgatccgttcgggcggccggccggcctagcttcaagtgcggggatggtgttctacttcaaggcgcggcccgaggccggcgactataccatcttcatgggtcttgacaagtacgagaacgaggacctcatcaaatacggcttccccgaggacatctggttccatgtagataagatgtcctctgcacatgtgtatgtgagattgaataaaggtcaatcaatggatgacatgagtgagggtttgctggaagactgtgcgcagcttgtcaaagctaattccattcaaggtaataaagtcaataacattgatgtagtttatactccatggtacaatttgaagaagaccccttcaatggatgtaggccaagttggttttcacaaccctaaattgctgcagaaggacgagcttgagttgcagtgcaccaccatgctgctccctgtgcacaaccatagctcctgtgcgctgccaggagtacaagccctggctatcgttctcctacttgtacaacctatgcaatcgcggttcgcactattaaagtggaaaagaggatcaatgagattgtgaaccgcttgaataagacaaaggtggaacggaaacctgatttaaaggctgaaagagaggctattagtgctgctgaaaaggcagaaagaaaggcacagcttagagacaagaaacgtagggaagagatggagaggcttgagaaagagaagcaggctgatatcaggagctacaagggtctaatggtccaagagaagatgacttccaacaagcaaatcgcttctggcagcaagaccctgcaggaacttgaagaagactttatgtgagaggcggacattataaatgccatgctgaagatttccttgaactgcttctgtcgaagacagaaggggtaccacaggcttgtgagatactggatgactcatgggcaggccatggtctgttattatctcctcttgctgttgtggtctatgtaaaccttgtttacttgctgaaaaaacaacggtgcatgctctaactgtggttgatgtaatggtctgttgcccatcaagttgaaatggtaatggaattatggtttcctggatttttttcaaacaataaagacatggcagcagataacttacatattccattctttgcatggagaacggctcaggaacttctttgtttgtgtaagagtgttatagaaatgaaccacacttagcttacatttggagattctttaattgaaggacg

SEQ ID NO: 212322 - DNA, 343 bp, Zea Mays
aacatgcctaaaacgatatatgatcatgacttgtttcagaaggaatgtagggctaggtgatctcaactataggatcaacttaccatatgagaagacacacgaactcatatccaagcaggactggaacgaattgtttgggaaagaccaggtgattaggaaccatccaagtgtgtttgagatttatcaaagaaagttgttagagcctggaaagatctcaaagaaatatattgataagttaaacaagaaggtcagcactgtacttaatgagtatttcgagaatagcaaggactatgttccgaacaagagggactagattttagcttattggcagggttcaagtcac

SEQ ID NO: 212323 - DNA, 701 bp, Zea Mays
ccagatgctgcgcgcacggtgcacagaatgatttgttcattgaatttggaaatgacggtggacctgcagcgaagaccttgaagccaaagttcaatttgttcgtcaagctagtgtccaagaatactggattgggggtgccgcatattgatataaaaactgtcattgcagctaccatgtttcttaaaggctttggtggtcttctgttcatagtcagcagctcatttggagcattcctcctgctcatttacttggcgtttataacccctattgtgtatgacttctacaaccatgaaatggagtcaacactgtttgtcgatctttttttcaagttcatacagaacttggcgtttatgggtgccctgcttttcttccttgggatgaagaactcaattccaaaacgtcgctccaagggaaggacaacaaaaaccaagacaaactgatgtcagtggttgtaggaggggaagcaattgggctcattatgtttgcatactatacaggaatagatgtcccacttttgttcttggtgcgccaattgaattgtgaattgggacttacagaacttagcatgtaggatatttaagttatcttgcgcaattttattttcttatgttgcgatgtgttcttatgtcacatttcattttgctacaagaactgctttgacagtaaaaaaatattaagtcgcatagtctattttctgtgca

SEQ ID NO: 212324 - DNA, 705 bp, Zea Mays
atccttcctctgcggtgcggagatgcgagttgagatcggttcattgaatttggaaatgacggtggacctgcagcgaagaccttgaagccaaagttcaatttgttcgtcaagctagtgtccaagaatactggattgggggtgccgcatattgatataaaaactgtcattgcagctaccatgtttcttaaaggctttggtggtcttctgttcatagtcagcagctcatttggagcattcctcctgctcatttacttggcgtttataacccctattgtgtatgacttctacaaccatgaaatggagtcaacactgtttgtcgatctttttttcaagttcatacagaacttggcgtttatgggtgccctgcttttcttccttgggatgaagaactcaattccaaaacgtcgctccaagggaaggacaacaaaaaccaagacaaactgatgtcagtggttgtaggaggggaagcaattgggctcattatgtttgcatactatacaggaatagatgtcccacttttgttcttggtgcgccaattgaattgtgaattgggacttacagaacttagcatgtaggatatttaagttatcttgcgcaattttattttcttatgttgcgatgtgttcttatgtcacatttcattttgctacaagaactgctttgacagtaaaaaaatattaagtcgcatagtctattttctgtgca

SEQ ID NO: 212325 - DNA, 3465 bp, Zea Mays
ggtgctctcacctgacctgacattctccgctctcacggtggggtcgtcgtcgtcgacggcgacgactgttctgccaccgtccacccgttctttgtccagcgcggtgcccgcctccgcgccgtccgtgtgctagtgccgcactcgcggcgcacgcgggagggcgcgcggcaccacaagcgcggctcacggcactcgtggccacgcgcgcgccaccccggtgacctgagtggcctgctattgaccatccccccgcccccaattcctcttctctcccaaccactgaaccaccaccaacttcacgtctgtccagccggccagtcagttgccttctcacatcgcaacccccgctgcccgcccgctccacgcttgccacgccggcctcgcttcccacctcccaccagagacgctgctgcgggccgagtccacaccacagccggcatggaggctgcggcggcggcgccgcatctactgcactgcggcggcttcggccgcgtagcgcacctcccagcgctccaccgccgaggacagttcccacgcgtccgcgccgtcgccacggagcccaagctgtccacctccacctcctcctcctcccgcggcaggaccaggagccgtaatgacctctctgacaccaggttcggagaggtgtccaaggagatccagcgcgtgcgtaagcagatggagcaggacgagcagcttgccacgctcatgcgcggtctccgcggccagaacctccgcgacgagcagttcgccgacgacaacgtccgcctccgcctcgtcgaggtagaatccgcggacaacaatgagggcctgcctcttgtgtatagccctgaaatcatatcagcctactggggcaagcgtcctagggccgtcgccacccgggttgtgcagctgctgtctgtcgctggtggtttcatctcccatctcgtatccgatcttattaacaagaagctcaaggagaatgaagtggctcgcgcaattgaactgagagaaatcgtgacgtctctgggtcctgcttacatcaagcttgggcaggcgctaagtatacgtccagatattctgtcccctgcagcaatgaccgagttgcagaaattatgtgataaggttccttcattcccagatgatatagcaatggctcttcttgaagaagagcttggtcagccttggcaagcaatctactcagagttatccccctccccaatcgctgcaggtagacaatgatgcagtctctgcttgccacactccacagtaatcgaattccttgactatacatattcaatgcattgtattgcagcatctctgggacaggtttataagggccgcttgaaagaaacgggagaactagtagctgtcaaagttcagaggccatttgtacttgagactgttaccatcgatttattcatcattagaaacttgggtttggtactcaggagatttccacaggtgtccatcgatgttgttggcctggtagatgagtgggctgctcgattttttgaagaacttgattatgtaaatgaaggggaaaatggcacttactttgctgacgtgatgaaagaagatcttccacaggttgttgtaccaaagacttaccataaatacacgtctagaaaagttcttaccacacaatggatagagggagagaagttgtcacagagcacagaggacgatgttggatcattggtcagtgtaggagtcatttgctatctgaaacaggttagtttgaaaagcatttgtttacatcttataaatactatccacatcttacatgattgaacatatgcatgcactcacttgctgaagttgcttgatactgggttcttccacgctgatccacatcctggcaatatgattagaacacctgatggaaagctggctattcttgattttgggcttgtaacaaaactgacagatgatcaaaagtatggaatgatcgaagcaatagctcaccttattcatcgtgattatgatgcaattgttaaggactttgtgaagcttggttttattcctgaaggggttaacttggatcctatcttgcctgtactggccaaggtttttgatcaggcactagaaggaggcggtgccaagaatattaacttccaagaattggcagcagatctagcacagataacttttgattatccattcaggatacctccgtattttgctttgattattagagccatcggagtattagaaggcatagctttggtgggagatcctgaatttgccattgtggatgaagcatacccatacatcgcacagaggctactaacggacgaatcgcctcggctaaggagcgccttgcgttacaccatatatggcaaaaccggtgttttcgacgcggaaaggttcattgatgttatgcaagctttcgagaattttatccgtgcagcgaagagcggtggtggggagaacttgaagggaaacatggctgagctggctgagttgggaggtcaacctagcaccagtctggttcctgtatttgcaatggccgtagcgcagcctgagcagccagttaaagcccgtgcggctcttgcttttctactctctgagagggggaacttctttcgggagtttattcttgacgagattgtgaaagccatcgatgcgatttcaagggagcagttgatccagatcgccgcgtcttttgggataggaaacgcggccccagtttttagcatggttcctgtcagggccagggcattgcttccgacgatcacagaggaagacagggtcatcctgaacaacgtcgagaaggttgtgaagttcctgacatccgggactgcaactccaacagtgggcggggacgtgaacgtggtgtctgtggtgcaagagcttctacctgtgttgccaggcatctcgtcgaagatcctacctgatgtcttgagccggttgtcgtcacgggtatttgcacggataatccgggagacatttttgtagagtgttctctttttgtttgccccttgctaacaggaaaactacaagtagcaatatctgcccaaacaacacgcaaatgaatggtgatagaagattgtacagcaatacaatgtatagaatttgcatctaagtaagttaacaaaagcagcaaagcttaaccaacacgtactgtctgtagtgagcacacgagggctcaacacgataaaactggagaggttgtgttggcttgacaagtgcttcgacctctgcgattgtactctcggcttctccaatctcagcaacttgctcattcgactcctccacctcagcctgcaacgttgaaatggcctaagaaaacaaaacaacgcacagcatctaaaatccttttttttatgtcgtaccagcgttgttttcaagtcagacagtgtttaaaaatgttgtgttgtgttggcttgacaagtcgcttgtggcagtctgggtccatcatccttgactcagctataaaacgttctcctgcacaaggcgaagttcaagtttcgttttgacttctga

SEQ ID NO: 212326 - DNA, 3290 bp, Zea Mays
ggtgctctcacctgacctgacattctccgctctcacggtggggtcgtcgtcgtcgacggcgacgactgttctgccaccgtccacccgttctttgtccagcgcggtgcccgcctccgcgccgtccgtgtgctagtgccgcactcgcggcgcacgcgggagggcgcgcggcaccacaagcgcggctcacggcactcgtggccacgcgcgcgccaccccggtgacctgagtggcctgctattgaccatccccccgcccccaattcctcttctctcccaaccactgaaccaccaccaacttcacgtctgtccagccggccagtcagttgccttctcacatcgcaacccccgctgcccgcccgctccacgcttgccacgccggcctcgcttcccacctcccaccagagacgctgctgcgggccgagtccacaccacagccggcatggaggctgcggcggcggcgccgcatctactgcactgcggcggcttcggccgcgtagcgcacctcccagcgctccaccgccgaggacagttcccacgcgtccgcgccgtcgccacggagcccaagctgtccacctccacctcctcctcctcccgcggcaggaccaggagccgtaatgacctctctgacaccaggttcggagaggtgtccaaggagatccagcgcgtgcgtaagcagatggagcaggacgagcagcttgccacgctcatgcgcggtctccgcggccagaacctccgcgacgagcagttcgccgacgacaacgtccgcctccgcctcgtcgagaatccgcggacaacaatgagggcctgcctcttgtgtatagccctgaaatcatatcagcctactggggcaagcgtcctagggccgtcgccacccgggttgtgcagctgctgtctgtcgctggtggtttcatctcccatctcgtatccgatcttattaacaagaagctcaaggagaatgaagtggctcgcgcaattgaactgagagaaatcgtgacgtctctgggtcctgcttacatcaagcttgggcaggcgctaagtatacgtccagatattctgtcccctgcagcaatgaccgagttgcagaaattatgtgataaggttccttcattcccagatgatatagcaatggctcttcttgaagaagagcttggtcagccttggcaagcaatctactcagagttatccccctccccaatcgctgcagcatctctgggacaggtttataagggccgcttgaaagaaacgggagaactagtagctgtcaaagttcagaggccatttgtacttgagactgttaccatcgatttattcatcattagaaacttgggtttggtactcaggagatttccacaggtgtccatcgatgttgttggcctggtagatgagtgggctgctcgattttttgaagaacttgattatgtaaatgaaggggaaaatggcacttactttgctgacgtgatgaaagaagatcttccacaggttgttgtaccaaagacttaccataaatacacgtctagaaaagttcttaccacacaatggatagagggagagaagttgtcacagagcacagaggacgatgttggatcattggtcagtgtaggagtcatttgctatctgaaacagttgcttgatactgggttcttccacgctgatccacatcctggcaatatgattagaacacctgatggaaagctggctattcttgattttgggcttgtaacaaaactgacagatgatcaaaagtatggaatgatcgaagcaatagctcaccttattcatcgtgattatgatgcaattgttaaggactttgtgaagcttggttttattcctgaaggggttaacttggatcctatcttgcctgtactggccaaggtttttgatcaggcactagaaggaggcggtgccaagaatattaacttccaagaattggcagcagatctagcacagataacttttgattatccattcaggatacctccgtattttgctttgattattagagccatcggagtattagaaggcatagctttggtgggagatcctgaatttgccattgtggatgaagcatacccatacatcgcacagaggctactaacggacgaatcgcctcggctaaggagcgccttgcgttacaccatatatggcaaaaccggtgttttcgacgcggaaaggttcattgatgttatgcaagctttcgagaattttatccgtgcagcgaagagcggtggtggggagaacttgaagggaaacatggctgagctggctgagttgggaggtcaacctagcaccagtctggttcctgtatttgcaatggccgtagcgcagcctgagcagccagttaaagcccgtgcggctcttgcttttctactctctgagagggggaacttctttcgggagtttattcttgacgagattgtgaaagccatcgatgcgatttcaagggagcagttgatccagatcgccgcgtcttttgggataggaaacgcggccccagtttttagcatggttcctgtcagggccagggcattgcttccgacgatcacagaggaagacagggtcatcctgaacaacgtcgagaaggttgtgaagttcctgacatccgggactgcaactccaacagtgggcggggacgtgaacgtggtgtctgtggtgcaagagcttctacctgtgttgccaggcatctcgtcgaagatcctacctgatgtcttgagccggttgtcgtcacgggtatttgcacggataatccgggagacatttttgtagagtgttctctttttgtttgccccttgctaacaggaaaactacaagtagcaatatctgcccaaacaacacgcaaatgaatggtgatagaagattgtacagcaatacaatgtatagaatttgcatctaagtaagttaacaaaagcagcaaagcttaaccaacacgtactgtctgtagtgagcacacgagggctcaacacgataaaactggagaggttgtgttggcttgacaagtgcttcgacctctgcgattgtactctcggcttctccaatctcagcaacttgctcattcgactcctccacctcagcctgcaacgttgaaatggcctaagaaaacaaaacaacgcacagcatctaaaatccttttttttatgtcgtaccagcgttgttttcaagtcagacagtgtttaaaaatgttgtgttgtgttggcttgacaagtcgcttgtggcagtctgggtccatcatccttgactcagctataaaacgttctcctgcacaaggcgaagttcaagtttcgttttgacttctga

SEQ ID NO: 212327 - DNA, 4122 bp, Zea Mays
ggtgctctcacctgacctgacattctccgctctcacggtggggtcgtcgtcgtcgacggcgacgactgttctgccaccgtccacccgttctttgtccagcgcggtgcccgcctccgcgccgtccgtgtgctagtgccgcactcgcggcgcacgcgggagggcgcgcggcaccacaagcgcggctcacggcactcgtggccacgcgcgcgccaccccggtgacctgagtggcctgctattgaccatccccccgcccccaattcctcttctctcccaaccactgaaccaccaccaacttcacgtctgtccagccggccagtcagttgccttctcacatcgcaacccccgctgcccgcccgctccacgcttgccacgccggcctcgcttcccacctcccaccagagacgctgctgcgggccgagtccacaccacagccggcatggaggctgcggcggcggcgccgcatctactgcactgcggcggcttcggccgcgtagcgcacctcccagcgctccaccgccgaggacagttcccacgcgtccgcgccgtcgccacggagcccaagctgtccacctccacctcctcctcctcccgcggcaggaccaggagccgtaatgacctctctgacaccaggttcggagaggtgtccaaggagatccagcgcgtgcgtaagcagatggagcaggacgagcagcttgccacgctcatgcgcggtctccgcggccagaacctccgcgacgagcagttcgccgacgacaacgtccgcctccgcctcgtcgaggtagaatccgcggacaacaatgagggcctgcctcttgtgtatagccctgaaatcatatcagcctactggggcaagcgtcctagggccgtcgccacccgggttgtgcagctgctgtctgtcgctggtggtttcatctcccatctcgtatccgatcttattaacaagaagctcaaggaggtacctatcatattccttcctgcagctgcgttgccttccctaaaaccatgtaaacgcgcttgctgatcgctgtcttctggtgttggaacatgttcgtcgatagaatgaagtggctcgcgcaattgaactgagagaaatcgtgacgtctctgggtcctgcttacatcaagcttgggcaggcgctaagtatacgtccagatattctgtcccctgcagcaatgaccgagttgcagaaattatgtgataaggtagtgctgcctgcaatagttcttttgttaagtttcccttgttaccgcatgtatatagcacatacctacttgctgattggggattttttactgcgacgtcaaggttccttcattcccagatgatatagcaatggctcttcttgaagaagagcttggtcagccttggcaagcaatctactcagagttatccccctccccaatcgctgcaggtagacaatgatgcagtctctgcttgccacactccacagtaatcgaattccttgactatacatattcaatgcattgtattgcagcatctctgggacaggtttataagggccgcttgaaagaaacgggagaactagtagctgtcaaagttcagaggccatttgtacttgagactgttaccatcgatttattcatcattagaaacttgggtttggtactcaggagatttccacaggtgtccatcgatgttgttggcctggtagatgagtgggctgctcgattttttgaagaacttgattatgtaaatgaaggggaaaatggcacttactttgctgacgtgatgaaagaagatcttccacaggttgttgtaccaaagacttaccataaatacacgtctagaaaagttcttaccacacaatggatagagggagagaagttgtcacagagcacagaggacgatgttggatcattggtcagtgtaggagtcatttgctatctgaaacagttgcttgatactgggttcttccacgctgatccacatcctggcaatatgattagaacacctgatggaaagctggctattcttgattttggtatgtcaactagtagtttgaaaatccacaaataactattttgtccaactatggtattttgttttgcttctcataaaattatatataaacattatattagattttttttggcacataagactgctttactattattactacaatgacacagtgacatccatttaagaattttctttcactctgcattactaactagtaactgcaactgtgcatactcgtactagactaaagcatgaaagtgcaggccttttcagtagcatctgatagcctgtttgcattgcctttagcaagaattctgctgactaagtttgcacaaaattatttgtgtctttagctttttgttcagcctactttttgctatcttttttttcatttttaagcacatggaaaaaacaataaaaaagggggtagacccgtgtcggaagcttccacatgagtggggtatgggaaagggaaccatcccccagcagatgcggagagactacttcgaaccttctacctggaaaaaacaataaaaatgtgtaattttactttgcagggcttgtaacaaaactgacagatgatcaaaagtatggaatgatcgaagcaatagctcaccttattcatcgtgattatgatgcaattgttaaggactttgtgaagcttggttttattcctgaaggggttaacttggatcctatcttgcctgtactggccaaggtttttgatcaggcactagaaggaggcggtgccaagaatattaacttccaagaattggcagcagatctagcacagataacttttgattatccattcaggatacctccgtattttgctttgattattagagccatcggagtattagaaggcatagctttggtgggagatcctgaatttgccattgtggatgaagcatacccatacatcgcacagaggctactaacggacgaatcgcctcggctaaggagcgccttgcgttacaccatatatggcaaaaccggtgttttcgacgcggaaaggttcattgatgttatgcaagctttcgagaattttatccgtgcagcgaagagcggtggtggggagaacttgaagggaaacatggctgagctggctgagttgggaggtcaacctagcaccagtctggttcctgtatttgcaatggccgtagcgcagcctgagcagccagttaaagcccgtgcggctcttgcttttctactctctgagagggggaacttctttcgggagtttattcttgacgagattgtgaaagccatcgatgcgatttcaagggagcagttgatccagatcgccgcgtcttttgggataggaaacgcggccccagtttttagcatggttcctgtcagggccagggcattgcttccgacgatcacagaggaagacagggtcatcctgaacaacgtcgagaaggttgtgaagttcctgacatccgggactgcaactccaacagtgggcggggacgtgaacgtggtgtctgtggtgcaagagcttctacctgtgttgccaggcatctcgtcgaagatcctacctgatgtcttgagccggttgtcgtcacgggtatttgcacggataatccgggagacatttttgtagagtgttctctttttgtttgccccttgctaacaggaaaactacaagtagcaatatctgcccaaacaacacgcaaatgaatggtgatagaagattgtacagcaatacaatgtatagaatttgcatctaagtaagttaacaaaagcagcaaagcttaaccaacacgtactgtctgtagtgagcacacgagggctcaacacgataaaactggagaggttgtgttggcttgacaagtgcttcgacctctgcgattgtactctcggcttctccaatctcagcaacttgctcattcgactcctccacctcagcctgcaacgttgaaatggcctaagaaaacaaaacaacgcacagcatctaaaatccttttttttatgtcgtaccagcgttgttttcaagtcagacagtgtttaaaaatgttgtgttgtgttggcttgacaagtcgcttgtggcagtctgggtccatcatccttgactcagctataaaacgttctcctgcacaaggcgaagttcaagtttcgttttgacttctga

SEQ ID NO: 212328 - DNA, 3513 bp, Zea Mays
cacaccatgctcgtcttgcttgttgcggaagacccatttggttcctacaacattttgattaggacgtgaaactaaatgccatacctcattcctagtgaagttgttgagctcctcttgcatcaccaccacccaatccgaatcttgcagtgcttcctctatcctgtgtggctcaatagaggaaataaacgagtaatgttcacaaaaatgtgcaacacgagatctagtggttaccccctatgaatgtcgccgaggatggtgtcgacaggggtgatctcgttggattgcttggtggactcttgggtgtggcggcctttgttcttcatcctccttgtcttgatcatttgcatctcccccttgatcattgtcgtcatcttgaggtggctcatttgattgatcttctccttcatcaacttgagcctcatcctcattttgagttggtggggatgcttgcgtggaggagaatggttgatcttgtgcatttggaggctattcggattctttaggacacacatccccaatggacatgttccttagcgcgatgcatggagcctcttcaatacctatctcatcaagatcaacttgctctacttgagagccgttagtctcatcaaacacaacgtcacaagaaacttcaacttgtccagaggacttgttaaagactctatatgcccatgtgtttgaatcataccctagtaaaaagccttctacagtcttaggagcaaacttagattttctacctcttttaacaagtataaagcatttgctaccaaagactctaaaatatgaaatattgggctttttaccggttaggagttcatacgatgtcttcttgaggattcggtgaagatataatcggttgatggcgtagcaggcggtgttgaccgcctcggcccaaaaccgatccgaagtcttgtactcatcaagcatggttcttgccatgtccaatagagttctattcttcctctccactataccattttgttgtggggtgtagggagaagagaactcatgcttgatgccctcctcctcaaggaagccttcgatttgtgagttcttgaactccgtctcgttgtcgcttctaattttcttgatcctcaagccgaactcattttgagcccgtctcaagaatccctttaaggtctcttgggtatgagatttttcctgcaaaaagaacacccaagtgaagcgagaataatcatccacaataactagacagtacttactaccgccgatacttatgtaagcgatcgggccgaataggtccatgtgtaggagatccagtggcatgtcggtcgtcatgatgttcttgtgtggatgatgggcgccaacttgctttcctgcttggcatgcgctacatatcctgtctttctcaaaatgaacatttgttaatcctaaaatgtgttctccctttagaagcttatgaagattcttcatcccaacatgtgctagtcggtggtgccagagccagcccatgttagtcttagcaattaagcaagtgtcgagttcagctctatcaaaatttactaagtatagctgaccctctaacacttccttaaatgctattgaatcatcacttcttctaaagacagtgacacctacatcagtgaatagacagttgtagcccatttcgcataattgagatacagaaagcaaattgtaatctaatgaatctacaagaaaaacattggaaatagaatggtcatgagatatagcaattttacccaaccccttgaccaaaccttggtttccatccccgaatgtgatagctcgttggggatcctgttttttctcgtaggaggagaacatcttctcccctgtcatgtggtttgtgcacccgctgtcgattacccagcttgagcccccggatgcataaacctacaaaacatgtttagttcttgactttaggtacccaaatggttttgggtcctttggcattagaaacaagaactttgggtacccaaacacaagtctttgaccccttgtgcttgcccccaacatatttggcaactactttgccggatttgttagttaaaacataggatacatcaaaagttttaaatgagatgtcatggtcatttgatgcactaggagttttcttcttaggcaacttaacatgggattgttgcctgaaactagatgtctcactcttatacataaaagcatgactaggttagtgcccgtgcgttgcaacggtaacatataatatcatgataacttatatataaatatgttatattgttatgagaaaagttttttgtaatccattggtgatcctgtctatacatataaattttgttatgagaaaagtataattgctatccttgacaaatatatgtattatgcagacatgcggagagatgttcaggagatcttcaaaatgactcctcatgataagcaagtcatgatgttttcagcaacgctcagcaaggagatccgtcctgtatgcaagaaatttatgcaagatgtaatgccctgcagccttctccagctctcctttccaaagtcgtcgtattttattcccattgctcctgtggtggtcctcctgtagctgttagtcatctaccagctttggagttgtagttgtgtcttctgctctttctaggtgggaggattctattcctcagtgtctccatttgtagtacataagtaagttctctttgcttttttcgttatcccacaccttctgtcctgaagatgcggtctccgagctcctggtcgacatctccagtttgctgcacactcaatgttcacttggtttcacttaattggacttcactggtgttggttctccaactatctcgtgcgggtggagaaagaattcttctgctggagttgtatttggaagcactgttgcaaaacttaagcatatttggagagaatctagtgttgaacagtgcataactgaacttctgtatggaggctgcatccgatggaaatatatgttgatgatgaggcaaagttgaccctccatggtcttgtacagcactatataaaacttagcgaggtagagaagaactggaaactgaatgatctcttggacgctcttgatttcaaccaagttgtgatattcgtgaagagtgttagcagagctgccgaactgaataagttactttgtgaatgcaacttcccatcaatctgcattcattctggaatgacccaggaagaaaggtaaatttgctcagaaatatcagcctatgcccttgaatatatcagcttataaataaggcatgactctaaattaccatgctctgaatacatattggacggcatatctaaaactacctacattattctatcattcctttttaggtgtatttgctggttaatattaattgagtttgtagaaatagtataaatataactaaatgtgtttgatattagagaaatagtagcctgtaacatgataacattttaggtttacctgggagaggtgtgcgatcttctcattcttgttctgcaggctcctacagaccttggagtcctgaaggcagctcctaatcctgtcccagttcc

SEQ ID NO: 212329 - DNA, 1998 bp, Zea Mays
acacgcataagcaaaaaaatgttttcattacaacatgtacccctgcactaggaaaataaggcactcggcactcgtgagccgtcgcatttccccccgtgtgaccaattcctctccgggccgagcagccgttccaatccgctcacgccgcctctctcgctgccccgcttgaccgcctgctagcgctgcagtttgatgctgatgacctgatccctccgttgggtaggttcttgggcgcggaaagaacaaagaactcgtggtgggtccgggtccgcaagaccctaggtgttcgtcagcagcgaggatgcccggcctgcctctgcctcaatcgttaaatcagaatattggatgtgaatatgcctatcctgggtctacaggccaggccttccgtcagcagctaagaactgcattgtctccagatgagaaacttaccgctgaaaaagatttggctctgtattgcaagccagtcgagctctacaatattattcaacggcgagccatgaaaaatcccctttttattcaaagatgccttctttataatatacatgcgaggaggaaaaagaggattcagataaccatatcactttctggaagtacaaatactgagttgcaaacacattatgtctttcctctttatgttctgttagctagacccactagtaacctttcacttgaagggcattctccaatttatcgattcagtcgggtttgcttgcttacttcctttagtgaacatggaaataaggacaacagtgaagctacattcatcattcctgacgtgaagagtttgtcaacctcccgtgcttgcaaccatgatattatctttattagctgtgggcaagttggacaaagtaatggtgaagataactgctctgggaaccatgtggaagattcttctctccaaatgcttgaagggaaatgctcctggggtaaaataccaactaatttacttgcttcatctttggagagttgtgtcaatttaagtttgggacatattgtggagttggcatctaaagttacaatgagaccaagcttcttagagccaaaatttctggagcaagacagttgcttgacattttgctctcataaggttgatgctgtgggttcatataaactacaactatgcatgtccgcacaagaggctggtgcaagagatatgtctttgtctccatatagtagttactcatataatgatgtcccaccttcgtcattatcagatatcataaggttaagatctggcaatgtactttttaattacaagtactacaataatacaatgcaagagactgaagtcactgaagatttctcttgtccattttgctatgtacgatgtggaagcttcaagggtctaggatgccatttaaactcatcacatgatctattccactatgagttttggatatctgaagagtaccaggttgttaatgttagtctgaaggctgatgcttggagaacagagctttttgcggagggcgttgatccaaggcatcaaacattttcttatcgctcaaggtttaagaagcgtagacgatcaaagaacacaatggagaaaatcaggcatgtacactcacatattatggaatcaggttcacctgaagatgaggcaggatctgaggacaactttgtgcaaggggagaatgggacttctgtagcaaatgcttcgattgatcctgctcaatctttacatggcagcaatctttcaccaccaacagtactacagtttgggaagacaaggaagctatctgagagatctgaccctagaaatcggcaactcctgcaaaaacgacagttcttccattctcacagggcgcagccaatgcaactggagcaagtgttctcggaccgtgatagtgaagatgaagttgatgatgatattgctgacttcgaggatagaagaatgcttgatgattttgttgatgttacgaaagatgaaaaacttattatgcatatgtggaattcatttgttcgaaaacaaagatgcaccaggttaataggatgata

SEQ ID NO: 212330 - DNA, 2817 bp, Zea Mays
acacgcataagcaaaaaaatgttttcattacaacatgtacccctgcactaggaaaataaggcactcggcactcgtgagccgtcgcatttccccccgtgtgaccaattcctctccgggccgagcagccgttccaatccgctcacgccgcctctctcgctgccccgcttgaccgcctgctagcgctgcagtttgatgctgatgacctgatccctccgttgggtaggttcttgggcgcggaaagaacaaagaactcgtggtgggtccgggtccgcaagaccctaggtgttcgtcagcagcgaggatgcccggcctgcctctgcctcaatcgttaaatcagaatattggatgtgaatatgcctatcctgggtctacaggccaggccttccgtcagcagctaagaactgcattgtctccagatgagaaacttaccgctgaaaaagatttggctctgtattgcaagccagtcgagctctacaatattattcaacggcgagccatgaaaaatcccctttttattcaaagatgccttctttataatatacatgcgaggaggaaaaagaggattcagataaccatatcactttctggaagtacaaatactgagttgcaaacacattatgtctttcctctttatgttctgttagctagacccactagtaacctttcacttgaagggcattctccaatttatcgattcagtcgggtttgcttgcttacttcctttagtgaacatggaaataaggacaacagtgaagctacattcatcattcctgacgtgaagagtttgtcaacctcccgtgcttgcaaccatgatattatctttattagctgtgggcaagttggacaaagtaatggtgaagataactgctctgggaaccatgtggaagattcttctctccaaatgcttgaagggaaatgctcctggggtaaaataccaactaatttacttgcttcatctttggagagttgtgtcaatttaagtttgggacatattgtggagttggcatctaaagttacaatgagaccaagcttcttagagccaaaatttctggagcaagacagttgcttgacattttgctctcataaggttgatgctgtgggttcatataaactacaactatgcatgtccgcacaagaggctggtgcaagagatatgtctttgtctccatatagtagttactcatataatgatgtcccaccttcgtcattatcagatatcataaggttaagatctggcaatgtactttttaattacaagtactacaataatacaatgcaagagactgaaggttgtctctcctgtttctagtcactgaagatttctcttgtccattttgctatgtacgatgtggaagcttcaagggtctaggatgccatttaaactcatcacatgatctattccactatgagttttgggttgatatctgaagagtaccaggttgttaatgttagtctgaaggctgatgcttggagaacagagtgttcttccaaaggttcgtttaaatggaggctccacttagttgggcaaaccgaaggcattgcatgttccttagtccaggacgactccctgctttgtgatttccttcctttcttgagtgcagaagccaaggatgaaagagcattggctattctatatctccaatcaaattccttacatagtgtattgtgtacctcaatgattttttggtggataatgttttacatgcttaacaatgcatggttactatttctttaaatggaagcactcttaactgtatttggtaactaatgatcctaactggcagctttttgcggagggcgttgatccaaggcatcaaacattttcttatcgctcaaggtttaagaagcgtagacgatcaaagaacacaatggagaaaatcaggcatgtacactcacatattatggaatcaggttcacctgaagatgaggcaggatctgaggacaactttgtgcaaggggagaatgggacttctgtagcaaatgcttcgattgatcctgctcaatctttacatggcagcaatctttcaccaccaacagtactacagtttgggaagacaaggaagctatctgagagatctgaccctagaaatcggcaactcctgcaaaaacgacagttcttccattctcacagggcgcagccaatgcaactggagcaagtgttctcggaccgtgatagtgaagatgaagttgatgatgatattgctgacttcgaggatagaagaatgcttgatgattttgttgatgttacgaaagatgaaaaacttattatgcatatgtggaattcatttgttcgaaaacaaagagtgttagctgatggtcatataccttgggcctgcgaggcattctcccagttgcatggacgacaacttatacaaaatcctgctctgctgtggggttggcgtttcttcatgattaaactttggaaccataacattttagatgcccgcactatgaacacatgcaatacagtccttcaaattttacaagaagaaagcacaggactaaagtaattttgatgcttctgatgaaaattcaagggaagaagatttctttaccatttccaagaagaaagcatagaattggagtaactttttattgataatttcattcatatctattgtcaattgtattaatggtttttaaaagagacaaatcatgtctaactctcacgctgtaatattctaagtcgtacgtgaatttgatgaatattcattgttgttttacttaagagttatcgtattgagatccttaacatattattttatttttcatctaggttcttaaattataaaataatggattgagattagaaaatat

SEQ ID NO: 212331 - DNA, 1865 bp, Zea Mays
gctaggccctttacacaggggtgacaagtgcttgaagggaaatgctcctggggtaaaataccaactaatttacttgcttcatctttggagagttgtgtcaatttaagtttgggacatattgtggagttggcatctaaagttacaatgagaccaagcttcttagagccaaaatttctggagcaagacagttgcttgacattttgctctcataaggttgatgctgtgggttcatataaactacaactatgcatgtccgcacaagaggctggtgcaagagatatgtctttgtctccatatagtagttactcatataatgatgtcccaccttcgtcattatcagatatcataaggttaagatctggcaatgtactttttaattacaagtactacaataatacaatgcaagagactgaagtcactgaagatttctcttgtccattttgctatgtacgatgtggaagcttcaagatatctgaagagtaccaggttgttaatgttagtctgaaggctgatgcttggagaacagagtgttcttccaaaggttcgtttaaatggaggctccacttagttgggcaaaccgaaggcattgcatgttccttagtccaggacgactccctgctttgtgatttccttcctttcttgagtgcagaagccaaggatgaaagagcattggctattctatatctccaatcaaattccttacatagtgtattgtgtacctcaatgattttttggtggataatgttttacatgcttaacaatgcatggttactatttctttaaatggaagcactcttaactgtatttggtaactaatgatcctaactggcagctttttgcggagggcgttgatccaaggcatcaaacattttcttatcgctcaaggtttaagaagcgtagacgatcaaagaacacaatggagaaaatcaggcatgtacactcacatattatggaatcaggttcacctgaagatgaggcaggatctgaggacaactttgtgcaaggggagaatgggacttctgtagcaaatgcttcgattgatcctgctcaatctttacatggcagcaatctttcaccaccaacagtactacagtttgggaagacaaggaagctatctgagagatctgaccctagaaatcggcaactcctgcaaaaacgacagttcttccattctcacagggcgcagccaatgcaactggagcaagtgttctcggaccgtgatagtgaagatgaagttgatgatgatattgctgacttcgaggatagaagaatgcttgatgattttgttgatgttacgaaagatgaaaaacttattatgcatatgtggaattcatttgttcgaaaacaaagagtgttagctgatggtcatataccttgggcctgcgaggcattctcccagttgcatggacgacaacttatacaaaatcctgctctgctgtggggttggcgtttcttcatgattaaactttggaaccataacattttagatgcccgcactatgaacacatgcaatacagtccttcaaattttacaagaagaaagcacaggactaaagtaattttgatgcttctgatgaaaattcaagggaagaagatttctttaccatttccaagaagaaagcatagaattggagtaactttttattgataatttcattcatatctattgtcaattgtattaatggtttttaaaagagacaaatcatgtctaactctcacgctgtaatattctaagtcgtacgtgaatttgatgaatattcattgttgttttacttaagagttatcgtattgagatccttaacatattattttatttttcatctaggttcttaaattataaaataatggattgagattagaaaatat

SEQ ID NO: 212332 - DNA, 1671 bp, Zea Mays
ccaccgtttagttccttgtgccagataggaaaatcaagcatttgctagcatgggtgatggtaaatatgagtggtttctttgatgataatgtctaacatgtgacttagcccttcacggctaaacttctcaacttcctgttaaatgctgatcatggccaagatttagaatcactgaagatttctcttgtccattttgctatgtacgatgtggaagcttcaagggtctaggatgccatttaaactcatcacatgatctattccactatgagttttggatatctgaagagtaccaggttgttaatgttagtctgaaggctgatgcttggagaacagagtgttcttccaaaggttcgtttaaatggaggctccacttagttgggcaaaccgaaggcattgcatgttccttagtccaggacgactccctgctttgtgatttccttcctttcttgagtgcagaagccaaggatgaaagagcattggctattctatatctccaatcaaattccttacatagtgtattgtgtacctcaatgattttttggtggataatgttttacatgcttaacaatgcatggttactatttctttaaatggaagcactcttaactgtatttggtaactaatgatcctaactggcagctttttgcggagggcgttgatccaaggcatcaaacattttcttatcgctcaaggtttaagaagcgtagacgatcaaagaacacaatggagaaaatcaggcatgtacactcacatattatggaatcaggttcacctgaagatgaggcaggatctgaggacaactttgtgcaaggggagaatgggacttctgtagcaaatgcttcgattgatcctgctcaatctttacatggcagcaatctttcaccaccaacagtactacagtttgggaagacaaggaagctatctgagagatctgaccctagaaatcggcaactcctgcaaaaacgacagttcttccattctcacagggcgcagccaatgcaactggagcaagtgttctcggaccgtgatagtgaagatgaagttgatgatgatattgctgacttcgaggatagaagaatgcttgatgattttgttgatgttacgaaagatgaaaaacttattatgcatatgtggaattcatttgttcgaaaacaaagagtgttagctgatggtcatataccttgggcctgcgaggcattctcccagttgcatggacgacaacttatacaaaatcctgctctgctgtggggttggcgtttcttcatgattaaactttggaaccataacattttagatgcccgcactatgaacacatgcaatacagtccttcaaattttacaagaagaaagcacaggactaaagtaattttgatgcttctgatgaaaattcaagggaagaagatttctttaccatttccaagaagaaagcatagaattggagtaactttttattgataatttcattcatatctattgtcaattgtattaatggtttttaaaagagacaaatcatgtctaactctcacgctgtaatattctaagtcgtacgtgaatttgatgaatattcattgttgttttacttaagagttatcgtattgagatccttaacatattattttatttttcatctaggttcttaaattataaaataatggattgagattagaaaatat

SEQ ID NO: 212333 - DNA, 1321 bp, Zea Mays
agcatgggtgatggtaaatatgagtggtttctttgatgataatgtctaacatgtgacttagcccttcacggctaaacttctcaacttcctgttaaatgctgatcatggccaagatttagaatcactgaagatttctcttgtccattttgctatgtacgatgtggaagcttcaagggtctaggatgccatttaaactcatcacatgatctattccactatgagttttggatatctgaagagtaccaggttgttaatgttagtctgaaggctgatgcttggagaacagagctttttgcggagggcgttgatccaaggcatcaaacattttcttatcgctcaaggtttaagaagcgtagacgatcaaagaacacaatggagaaaatcaggcatgtacactcacatattatggaatcaggttcacctgaagatgaggcaggatctgaggacaactttgtgcaaggggagaatgggacttctgtagcaaatgcttcgattgatcctgctcaatctttacatggcagcaatctttcaccaccaacagtactacagtttgggaagacaaggaagctatctgagagatctgaccctagaaatcggcaactcctgcaaaaacgacagttcttccattctcacagggcgcagccaatgcaactggagcaagtgttctcggaccgtgatagtgaagatgaagttgatgatgatattgctgacttcgaggatagaagaatgcttgatgattttgttgatgttacgaaagatgaaaaacttattatgcatatgtggaattcatttgttcgaaaacaaagagtgttagctgatggtcatataccttgggcctgcgaggcattctcccagttgcatggacgacaacttatacaaaatcctgctctgctgtggggttggcgtttcttcatgattaaactttggaaccataacattttagatgcccgcactatgaacacatgcaatacagtccttcaaattttacaagaagaaagcacaggactaaagtaattttgatgcttctgatgaaaattcaagggaagaagatttctttaccatttccaagaagaaagcatagaattggagtaactttttattgataatttcattcatatctattgtcaattgtattaatggtttttaaaagagacaaatcatgtctaactctcacgctgtaatattctaagtcgtacgtgaatttgatgaatattcattgttgttttacttaagagttatcgtattgagatccttaacatattattttatttttcatctaggttcttaaattataaaataatggattgagattagaaaatat

SEQ ID NO: 212334 - DNA, 879 bp, Zea Mays
attttcatcacatggtcactttaattgggacttctgtagcaaatgcttcgattgatcctgctcaatctttacatggcagcaatctttcaccaccaacagtactacagtttgggaagacaaggaagctatctgagagatctgaccctagaaatcggcaactcctgcaaaaacgacagttcttccattctcacagggcgcagccaatgcaactggagcaagtgttctcggaccgtgatagtgaagatgaagttgatgatgatattgctgacttcgaggatagaagaatgcttgatgattttgttgatgttacgaaagatgaaaaacttattatgcatatgtggaattcatttgttcgaaaacaaagagtgttagctgatggtcatataccttgggcctgcgaggcattctcccagttgcatggacgacaacttatacaaaatcctgctctgctgtggggttggcgtttcttcatgattaaactttggaaccataacattttagatgcccgcactatgaacacatgcaatacagtccttcaaattttacaagaagaaagcacaggactaaagtaattttgatgcttctgatgaaaattcaagggaagaagatttctttaccatttccaagaagaaagcatagaattggagtaactttttattgataatttcattcatatctattgtcaattgtattaatggtttttaaaagagacaaatcatgtctaactctcacgctgtaatattctaagtcgtacgtgaatttgatgaatattcattgttgttttacttaagagttatcgtattgagatccttaacatattattttatttttcatctaggttcttaaattataaaataatggattgagattagaaaatat

SEQ ID NO: 212335 - DNA, 4245 bp, Zea Mays
atcgaacaactacttcccctccctatcagatctccttcttcctctagaatctcccttctcctactctcgtcattcctagattatgttgcttggagcggacgctcacaaattgatatcggagacactgatctaagcgctagcacacacctactacacgcgtcgcgcgaaggaatccggatccatggagcccaacctgaagatggcgatcgaggaacaatccaagcttcttcgcgacatctgtgaccacctctttgctcaggagacgcgttggtgcacgctcgagacaaccgtcgcgtggaacaccgcgtcaccgcaacatctggaagccaacatcgccatcgagagtctgacatcgatccacgtggaactcgacgcccaggtcaccgcagcgatcgagcgcctcgatgaagtcgaggccgctttcgtaatgcgcctcggtgccctcgtgtcggcttacgcggccttcgagtcgtggcggcccgacgtggaggcttcggtcgacgagatccacacctccgtgcatcttctgcgtgacgaggtgtccaagtgggctgcccaagcgccgccgccacagctcgataccgccgcgggtattctcggcccgtaccagtcggtggcggagcgctcgcctgctgccgcgtacaacaccgacagcccagatgggaattgcttcgacaaaaatcgctgggggcatggttttgggcatctccttgcccaaaaccatctcccgatcaatggaggagattgtggaggcatcaagaattcgggagtacaagaaatttgattccagtacagccagcaagactccatctcgtggtccttttccgctacctccaccgcccaagtctgctcctggcaagctagtggactctaaagccctagaacatcttgatgcaccagttatggcggattgtctctactccgtctatgctttttgtaaggcctagggcctctgctacaaatgtggattgtcatatttccgaggccatcaatgtccggatactgttccgcttcacttggtagaagaattatggcatcagtttcaacctccatctaaagataatcaatcagtgttggggatcaaagccgagctcagggtgctccatctatgtcagtcggttgtaaccactggagcaaacctgaaaaccatgagatttgtcagctagctagcaagattttcattgctcatttttattagaatcgggtggttcagtttcctttgtcagctccaccataacaaggcactgtccaaatattgttccactctcgactcctttatggatccaagtagcgaatggtgctagtgtgtcttgtgtttcagaggtgctcacagctgattagtctattcaaggataccatttcacctctgacctcaagatattggatctcccaacctatgatatgattgtggggatggattggttgtctacacatagtcctatggtcgtgcattgggcagataagtggctatctctatcaactagtggcatttcagttaagctttttggcgtgcaggcatcacaaacacacggtgctctggtgtagctatgtagcctggataccttgcccgcatctgaacaagaactagtcaaagagcttcccacagatcttcaactgttattggacaagtactcatcagtgttttagttacctactagtcttcctcctgtcagggactgtgatcaccagatccctctgctacccggagctaatcctatgcaaatgtgtccgtatagatatgctccttctttcaaatctgagattgagaaataggtgaatgagatgttggattctgacataatccagcatagcaaaagtcccttcgcatcatcggtaattttggtaaaaaagaaggatgggactcatcggttttgtgtggattatcgccatctaaatgccatcatggctaaggccaagtttcatgtacccataattgatgagtttcttgatgaactccatggggcagcatggttctccactttggatctccgcgctaggtttcatcagatcagaatggcacctcctgatctgtacaaaacaacgttccaaacgtaccatgggcattttgagtttcgttttatggcatttggtctcacgggggcactggctacatttcaaggagcaatgaactgcaccctgaagccattattgcggcagcgcgccctgttattgcttcaagaccactggcaagtcaagcttactaagtgcacatttgcaaaacaagaaatagcttacttggaccatattattagtaaagttggcgtggccactggtccggccaaagtggaggcagttgtatcctggcctacaccaactaactctaaggagttgcgaggttttcttgggttgacaggttattaccgcaaattcgttcaaaacttcggtgtcattgccaagccccttactgctctcctgaagaagcatgttgtgtttttttatgaacatcggatcatgctactgcttttgccttgttgaaatcagcctttgtcttcagcacccgtgttgggcctcctagattttaccaaacaatttgccattgaaacaaatgcttctagagcaggtgtgggggcagtcctgctacaaaacaaccatcctctcgcttacgtaagcaagcctttgggtgtcaagaatatgggtctttctgcttatgaaaaggagaacctcgccatcttgcttgcagtgaatcactggagatcatacttgcagcatggaacattcctcatcttcacgaatcagtgaagcttaactcatctcaatgaacagcgtctgaagactccttggcagtagtgtgtcttcactaaattgttgggactccaataccaggtggtatacaagcagggatcggccaacagggctgtggatgccctctctcggtgtcctcattcgcctctttcactcaatgcaatatcagtgggcactcttcaatggctatcgaatgtggtggtaggatatcatcaagattctcacgccttaaactgttggcagatctgtctaattcctctacaacagatggtccttacaagttgtaggaaggcattattcggtacaaaggccgcatttggattgtccacaatcccacactacaacaacagataatcttctcattgcacgacagttcggttggccactctggttttccagtaacgtacagtcgcctgaaacatctgtttgcctagccagcaatgaagtatgttgtccgacaatacgtctactcctgtgacatctgctcgcgtgccaaatcggatagatctcagtaccctaggttgttacagctgttgcaagttccttcacatgcttggcaggtgttgtctttggatttcatcgaaggcctccccaaatctggcaagtttgactgcattgtcatcgtggtggataaattttcgaaatttgcccatttcattgtcctcgctcatccttttactgcctacaagatagctcaggtgttcttggacagtatctaccgcttacatggtatgcactcggctattatctcggatcgcgatcggatattcacaagtgccttttggcaaggcttgttcaagctttcaggaactgagttacgcatgagcacatcttaccattcgcaaacagatggccagatggccagacagagcgagtaaatcaatgccttgaaaccttcttgcgttgttttgtcagttctcaaccgagccaatggagcaagtggctgcctcttgcagagtattggtacaactcctcattcaattcctccttgggtaaatctccgtttgaggtgttgtatggctatcatccacaccacctgggtatatctacagtagatgcaattcccttgtcagacttgcaatcatggttatagcagagggagcttatgacccatgatgtccgtcatcatctgctatgtgcacagcaacgtatgaagcctcaagcggacaaacgcctatcggaacgtgtctttgctgtcggcgacatggtgtatcttaagcttcagccttatatccagaattcagtggctactcgcgccaaccataagctctcctacatatattttggtccttacaaggtactccaacgtgtcggcagtgtggcatacaggctgcagttaccatcatctccgtcaatccatcccgtattccatgtgtcccagctgaagcccagtgtcaaatcttctattctggtcagcacttctttaccttatacatgtgctcgaccgacgatccttttcttggggcggccacaacgtcgaccaataagttcgagtgcgctggt

SEQ ID NO: 212336 - DNA, 2428 bp, Zea Mays
ctccagtcccaccttctccgctgtatgtgagtctgtccctctcgtgtgtcgcccaaatccatcaccccccacgtctctcccatcccatccccgtgtagatttcaaatccgcgtcagagctcaggtctgggtctcctccttcgccgccagttgcctcctccagtcgagatccgccgtcggggagaccactgaccatggaggccatggaggagctatcggagctcgccgagtcgatgcgccaggcggcgtcactcctcgccgacgacgacccctccgacgacgccgcgccgcgtcgccccaccaccttcctcaacgccgtcgccctcggcaacgtcggcgctggcaagtcggccgtgctgaacagcctcatcggccacccggtcttgccgacgggggagaacggggcgacgcgggcgccgatagtggttgacctgcagagggagccggggctcagcagcaagtccatcgtgctgcagatcgacagcaagtcgcagcaggtttccgcaagtgctctccggcattcactgcaggacagactcagcaggggagcatctggtggatcagggaggggccgtgttgatgagatttacctcaaactgcggaccagtacagctccctcattaaagctgattgatttacctgggatagaccagcgagctgttgatgattccatgatcaatgagtatgctgggcacaatgatgcaatactgctcattgtcatacccgcaatgcaagctgctgatgttgcatcatctcgagctctgaggttggccaaggatatcgatgcagatgggacaagaacagttggtgttataagcaaagttgatcaagcaaatggagatgcaaaaactatagcctgtgttcaggccctactgtcaaacaagggcccaaaaaaccttcctgacattgagtgggttgctctaattggacaatctgttgcaattgcgtcagcacaatcagttgggtctgaaaactcactagaaacagcctggagagctgaagctgaaagcctgaaaaacatcttaactggatctcctcagaataagcttggtagaattgctttggttgacacaattgctaagcaaatccgtaaaagaatgaaagtgcgggttcctaacctattgagtggacttcagggtaagtctcaaatggtgcaagatgaactggcaaggctgggagaatctatggtacaaagtgccgaaggaacccgagcagttgctttggagctgtgccgagaatttgaggacaagtttcttgctcacataacatctggtgagggatctggatggaaaattgttgcaagttttgaaggcaagtttccagacagaattaaacagctaccgttggaccgacatttcgatctcaacaacgtcaaaaggattgtcttggaagcagatggttatcaaccatatttgatatctccagagaaagggttgagatccttaataaaaatagtactggaaatggcaaaggagccatcacgactatgtgttgaagaggttcatcgtgtattgttagacatagtcaatgcttccgcaaatgccacaccaggacttgggagatatcctccattcaagcgtgaggttgttgcaatagcatcaaatgcattggagaccttcaaaaacgacgccaaaaagatggtcgttgcgcttgttgatatggaacgtgcttttgttcctccccaacatttcatccgcttagtacaaagaagaatggaaagacagcgtcgggaggatgaattgagaaatcgatcttctaagaaaacacaagaagctgaacagccaacatctaagagggcctcaagtccccaaacagatgctgagcaaggtggtggcagcttaaaatcaatgaaagacaaatctggccagcaagataaagacacaaaagagggatcaaatttgcaagttgctggtcctgctggtgaaattactgcaggttaccttttaaagaaaagcgcaaaaactaatgggtggagcaaaagatggtttgttcttaatgagaagagtggaaagcttgggtacacaaagaaacaagaggagagacattttcgtggtgtcatcactcttgaggagtgcaaccttgaggaggtagaggaggaagagccttctaaaagttcaaaggactcaaaaaaggcaaatggatcagaaaaaatctcaagtcttgtatttaagattactaatagggttgcatacaaaacggtcctcaaagctcacagtgctgttgtgttaaaggctgagagcatggccgacaaggttgagtgggtaaataagatcaaagctgttattcagagcaaagggggttctttcaagggtccaagtactgagggtagttcaatgaggcaaagcaattcggatggcgctttagtccccttgtatattttggatgtgccaatataaatatttttccattaaaatacacaaactaacatc

SEQ ID NO: 212337 - DNA, 2018 bp, Zea Mays
gtccatttaggttttggtctatcaagtgttttctatgtgctagtatatgttcatcgtgtattgttagacatagtcaatgcttccgcaaatgccacaccaggacttgggagatatcctccattcaagcgtgaggttgttgcaatagcatcaaatgcattggagaccttcaaaaacgacgccaaaaagatggtcgttgcgcttgttgatatggaacgtgcttttgttcctccccaacatttcatccgcttagtacaaagaagaatggaaagacagcgtcgggaggatgaattgagaaatcgatcttctaagaaaacacaagaagctgaacagccaacatctaagagggcctcaagtccccaaacagatgctgagcaaggtggtggcagcttaaaatcaatgaaagacaaatctggccagcaagataaagacacaaaagagggatcaaatttgcaagttgctggtcctgctggtgaaattactgcaggttaccttttaaagaaaagcgcaaaaactaatgggtggagcaaaagatggtttgttcttaatgagaagagtggaaagcttgggtacacaaagaaacaagaggagagacattttcgtggtgtcatcactcttgaggagtgcaaccttgaggaggtagaggaggaagagccttctaaaagttcaaaggactcaaaaaaggcaaatggatcagaaaaaatctcaagtcttgtatttaagattactaatagggttgcatacaaaacggtcctcaaagctcacagtgctgttgtgttaaaggctgagagcatggccgacaaggttgagtgggtaaataagatcaaagctgttattcagagcaaagggggttctttcaagggtccaagtactgagggtagttcaatgaggcaaagcaattcggatggcgctttagatactatggcacgtagacctgctgatcctgaagaagaacttagatggatgtctcaagaagttcgtggttatgtcgaggctgttttgaatagtctggcagcaaatgttccaaaggctattgtgctttgtcaagtggagaaagcaaaggaagacatgcttaaccagctatacagctcgataagcgggcaaagcaatgctaagattgaagagctgcttcaagaggaccataatgctaagcgcagaagggagaagtaccaaaaacaatcatctctcctgtcaaaacttactcgtcaactcagtatccatgataacagggcatctgtttcctcttattctaatgacaccactgaagccgagagccctcgaacaccaacccgctcaggtgaggactggaggtcagcttttgattccgcttcaaatggtcctgttgctggaagcacaaacagtcaatcaaggtccaaaagtgctgacggtcgcagtcggcgctatgagaacggggacgtgagctcaggtgccaactctggcagccggcgcacaccaaaccggttgccaccagcaccgccaaaatactaatcgtgctgattggtattcatgaacatttatgtattcttgcctggcacatgcgcccagatcggctgctagagattgtggtgtagtggatggagtatcgggtgattgcgtgaacattgtgttcgcaggtcgctgcgtctcagatgagctgtttatagaaaaatatacaggtaaccgtggtttctactgtttattatctctgtatatttatgacgtccctgccttttgattttgttggggcattcgatctgcttccgcacttggtcgatctaggacaacggctgtcagactaagatttatcttgtcctgccccgcatattgttcgttgccactgacgattcttatttagtcgtggtttatctctactacttattaaggtagtaagggtagtctgtcattttctgttctgtcttttttcattttctgttttgccctcatccctgttatggcttaaaaaataaaatctacaagaattgtgaattgaacttaagacctgctgctagataagagacaacatatccaccacaccacgtctt

SEQ ID NO: 212338 - DNA, 1560 bp, Zea Mays
cttcaaccactttgcatgtgttcatggttaccttttaaagaaaagcgcaaaaactaatgggtggagcaaaagatggtttgttcttaatgagaagagtggaaagcttgggtacacaaagaaacaagaggagagacattttcgtggtgtcatcactcttgaggagtgcaaccttgaggaggtagaggaggaagagccttctaaaagttcaaaggactcaaaaaaggcaaatggatcagaaaaaatctcaagtcttgtatttaagattactaatagggttgcatacaaaacggtcctcaaagctcacagtgctgttgtgttaaaggctgagagcatggccgacaaggttgagtgggtaaataagatcaaagctgttattcagagcaaagggggttctttcaagggtccaagtactgagggtagttcaatgaggcaaagcaattcggatggcgctttagatactatggcacgtagacctgctgatcctgaagaagaacttagatggatgtctcaagaagttcgtggttatgtcgaggctgttttgaatagtctggcagcaaatgttccaaaggctattgtgctttgtcaagtggagaaagcaaaggaagacatgcttaaccagctatacagctcgataagcgggcaaagcaatgctaagattgaagagctgcttcaagaggaccataatgctaagcgcagaagggagaagtaccaaaaacaatcatctctcctgtcaaaacttactcgtcaactcagtatccatgataacagggcatctgtttcctcttattctaatgacaccactgaagccgagagccctcgaacaccaacccgctcaggtgaggactggaggtcagcttttgattccgcttcaaatggtcctgttgctggaagcacaaacagtcaatcaaggtccaaaagtgctgacggtcgcagtcggcgctatgagaacggggacgtgagctcaggtgccaactctggcagccggcgcacaccaaaccggttgccaccagcaccgccaaaatactaatcgtgctgattggtattcatgaacatttatgtattcttgcctggcacatgcgcccagatcggctgctagagattgtggtgtagtggatggagtatcgggtgattgcgtgaacattgtgttcgcaggtcgctgcgtctcagatgagctgtttatagaaaaatatacaggtaaccgtggtttctactgtttattatctctgtatatttatgacgtccctgccttttgattttgttggggcattcgatctgcttccgcacttggtcgatctaggacaacggctgtcagactaagatttatcttgtcctgccccgcatattgttcgttgccactgacgattcttatttagtcgtggtttatctctactacttattaaggtagtaagggtagtctgtcattttctgttctgtcttttttcattttctgttttgccctcatccctgttatggcttaaaaaataaaatctacaagaattgtgaattgaacttaagacctgctgctagataagagacaacatatccaccacaccacgtctt

SEQ ID NO: 212339 - DNA, 1504 bp, Zea Mays
atcagttcttcagaacatttcttttgaactcttgatttgtttgatatcttgggtacacaaagaaacaagaggagagacattttcgtggtgtcatcactcttgaggagtgcaaccttgaggaggtagaggaggaagagccttctaaaagttcaaaggactcaaaaaaggcaaatggatcagaaaaaatctcaagtcttgtatttaagattactaatagggttgcatacaaaacggtcctcaaagctcacagtgctgttgtgttaaaggctgagagcatggccgacaaggttgagtgggtaaataagatcaaagctgttattcagagcaaagggggttctttcaagggtccaagtactgagggtagttcaatgaggcaaagcaattcggatggcgctttagatactatggcacgtagacctgctgatcctgaagaagaacttagatggatgtctcaagaagttcgtggttatgtcgaggctgttttgaatagtctggcagcaaatgttccaaaggctattgtgctttgtcaagtggagaaagcaaaggaagacatgcttaaccagctatacagctcgataagcgggcaaagcaatgctaagattgaagagctgcttcaagaggaccataatgctaagcgcagaagggagaagtaccaaaaacaatcatctctcctgtcaaaacttactcgtcaactcagtatccatgataacagggcatctgtttcctcttattctaatgacaccactgaagccgagagccctcgaacaccaacccgctcaggtgaggactggaggtcagcttttgattccgcttcaaatggtcctgttgctggaagcacaaacagtcaatcaaggtccaaaagtgctgacggtcgcagtcggcgctatgagaacggggacgtgagctcaggtgccaactctggcagccggcgcacaccaaaccggttgccaccagcaccgccaaaatactaatcgtgctgattggtattcatgaacatttatgtattcttgcctggcacatgcgcccagatcggctgctagagattgtggtgtagtggatggagtatcgggtgattgcgtgaacattgtgttcgcaggtcgctgcgtctcagatgagctgtttatagaaaaatatacaggtaaccgtggtttctactgtttattatctctgtatatttatgacgtccctgccttttgattttgttggggcattcgatctgcttccgcacttggtcgatctaggacaacggctgtcagactaagatttatcttgtcctgccccgcatattgttcgttgccactgacgattcttatttagtcgtggtttatctctactacttattaaggtagtaagggtagtctgtcattttctgttctgtcttttttcattttctgttttgccctcatccctgttatggcttaaaaaataaaatctacaagaattgtgaattgaacttaagacctgctgctagataagagacaacatatccaccacaccacgtctt

SEQ ID NO: 212340 - DNA, 1431 bp, Zea Mays
ggcttatgggcgacacagctctagtgcttgttgctccaactcgaggtggacgatttgaggttatttttgtttccccaactggtgaggaagttaagagcaagagacagctaacccagtacctgaaagctcatcctggaggccctgcatcctcagagttcgattggggaaccagtgatactcccagacgctcagcacgcttgagcgagaaggtcaaggcaactgagagcccagagggtgagaagacccctaaacggggaagatcaagttctaagagaggcaaaaaggaggaaaaagaagacacagaggctgcaaatgaggctggagaagatggtgcttcggaggaaggtaaaggtacagatgtggagatgaaagatgctgaaaacgctgaagacgagaagaaagaggtcccaaatgcagatgctgcagagaagactgaggaaggtgaagataagaaagaggaggcccctgctgtagatgcagcagagaagactgaggaaggtgaagataagagagaggaggaggcccctgctgtagatgcagcagagaagactggtgagaaagaggtggcccctgctgtagatgcaacagaggagacagaaaaaagcaccgaaggccaagcacagcctaattatgttgctgccccagaatctgagtataaaggagacggaaagccaggtgaatccgaagcagctccccttgcatttgttgatgaaacagctccccatgtaattattggtgaagagaagaaagaggaaaatactgagaatgagaacagtcaggcagccgaatctgccgtgccttccctggcatctttagagggagagaagaaagagaatggtggtgcccctgaacaaccagccctgcctgtagctgagacgaaggcagatgctcctccggcagaggcagaaaagggggctgaaaattcaggccagccgaataccggctctcaagaaccgaaggcagcaaactgcgacgaggggcagattcaacctggtgcctctgctgtgaggtgcacataagggagcttgatctcagatgggactctgttgcgttatgtctttaggacgatacctcgcatttgctttgagaattgtaatcgtggttaacctgacagcgctgtgtagcactaggctgcccagcacgtagttatcctttcgtttcttttataacggtggtgttgcagcatgggtaatgggccggcctgtgctgcctcagccaccactgcatacccagtgtaagtgtaactcgttattagcgtggtcgacattgatctgtggagaggactgcaggacagtactgtcctcgacagctgtaacgttacgttttgtgtgttcccttgtgttattgaacttatattatgatccataaataaagccataagcgtggcagggtcattccctgaccaccttcaggcatcaccatttgttggcc

SEQ ID NO: 212341 - DNA, 1542 bp, Zea Mays
ctttttccctgcatgcaaggcgaccgccgccgtctccatggcaatgccctggatgcctaacacgaaaggtggacgcctaggaaggcaaggcagggacaccatatctaggcgatcctggcatctaaagttttttctcgcctgttgctccaactcgaggtggacgatttgaggttatttttgtttccccaactggtgaggaagttaagagcaagagacagctaacccagtacctgaaagctcatcctggaggccctgcatcctcagagttcgattggggaaccagtgatactcccagacgctcagcacgcttgagcgagaaggtcaaggcaactgagagcccagagggtgagaagacccctaaacggggaagatcaagttctaagagaggcaaaaaggaggaaaaagaagacacagaggctgcaaatgaggctggagaagatggtgcttcggaggaaggtaaaggtacagatgtggagatgaaagatgctgaaaacgctgaagacgagaagaaagaggtcccaaatgcagatgctgcagagaagactgaggaaggtgaagataagaaagaggaggcccctgctgtagatgcagcagagaagactgaggaaggtgaagataagagagaggaggaggcccctgctgtagatgcagcagagaagactggtgagaaagaggtggcccctgctgtagatgcaacagaggagacagaaaaaagcaccgaaggccaagcacagcctaattatgttgctgccccagaatctgagtataaaggagacggaaagccaggtgaatccgaagcagctccccttgcatttgttgatgaaacagctccccatgtaattattggtgaagagaagaaagaggaaaatactgagaatgagaacagtcaggcagccgaatctgccgtgccttccctggcatctttagagggagagaagaaagagaatggtggtgcccctgaacaaccagccctgcctgtagctgagacgaaggcagatgctcctccggcagaggcagaaaagggggctgaaaattcaggccagccgaataccggctctcaagaaccgaaggcagcaaactgcgacgaggggcagattcaacctggtgcctctgctgtgaggtgcacataagggagcttgatctcagatgggactctgttgcgttatgtctttaggacgatacctcgcatttgctttgagaattgtaatcgtggttaacctgacagcgctgtgtagcactaggctgcccagcacgtagttatcctttcgtttcttttataacggtggtgttgcagcatgggtaatgggccggcctgtgctgcctcagccaccactgcatacccagtgtaagtgtaactcgttattagcgtggtcgacattgatctgtggagaggactgcaggacagtactgtcctcgacagctgtaacgttacgttttgtgtgttcccttgtgttattgaacttatattatgatccataaataaagccataagcgtggcagggtcattccctgaccaccttcaggcatcaccatttgttggcc

SEQ ID NO: 212342 - DNA, 759 bp, Zea Mays
gctgtgtttacaaattacacctgcttgctgttgatcttcgtttcccgtccagccgtttttcgcatccacgtgggccagccggccaggcgaccgccgccaccgccgccctactcctggtcccagctctgctgcacccttcgccggcgacgagcgtccaccgcggcagccgaagctcccagcgtcctcctgcaggccgagctgaaggttcagcgcgccggtggagttcgacgacgaaactccgtcacgtcatacctctccgcctcccgtctccaatcggggctcccagcgtctcggagaagaggagcagcacggcacggcggctgtggcgaggaaggctcctgtcccatcccaacccagttagcagccgcccaaggaggaggagatccaatcggcgtgcgggcgtccgcggtccatccatcgatccaattccaatctgcagctcagcttcggtatatatgggaatctgaggagctgcgtcgtgctatggagcctgtggatttgattagaagagtgaaggaaattgagcaagaagcttatggtgagcatggcatggcgacagatgaagatcctaagcaaactgccgctgttgatttatcaaaacggcttaaggatttgagggcaggcaatgatggcagtagccaaaaagctctcgaagaatggcgtaaacggaagatggagcgtgcaaggcagcgagccatcgaaaagaatgggacttctagtgtgaaaactaaatgaggatggccacgctgaggaacctga

SEQ ID NO: 212343 - DNA, 926 bp, Zea Mays
gctgtgtttacaaattacacctgcttgctgttgatcttcgtttcccgtccagccgtttttcgcatccacgtgggccagccggccaggcgaccgccgccaccgccgccctactcctggtcccagctctgctgcacccttcgccggcgacgagcgtccaccgcggcagcttcggtatatatgggaatctgaggagctgcgtcgtgctatggagcctgtggatttgattagaagagtgaaggaaattgagcaagaagcttatggtgagcatggcatggcgacagatgaagatcctaagcaaactgccgctgttgatttatcaaaacggcttaaggatttgagggcaggcaatgatggcagtagccaaaaagctctcgaagaatggcgtaaacggaagatggagcgtgcaaggcagcgagccatcgaaaagaatgggacttctagtgtgaaaactaaatgaggtgaggagtgtaatgcagcacaagggattttgttttcatgtgtctcggagctgctccatgatgcattcaagtcaatccgtccatcgtaagcgagtgtagctgtgatgacccatgtttttaaagccacaggcagcggtgttcttgtagaaacgtgaagttttaatatttgtgattgtccatgttgccgtgttttttaaccgtcatgtatcagtatcaactttgtttgttcatggaatcatccctgcaaatactttatgcttttgcttgagtcctcatagtgtttggtttgacgagaagggtgaatgggatggggtcatctgtggatttggaaatatgaatatgtatgatatctgtttggttgaatggatgaggcaagttcttttggtttggttagatggatgagagtgaacaaaatgagaataattgactatttgtatctacattatttttttaaaaaataaaaattaa

SEQ ID NO: 212344 - DNA, 3241 bp, Zea Mays
cggcgcctttcctcctccgctcccccaacctgctgctccggccgtcgcagctttcttggcgcatctgcgggtacacaggcctcggtttgttgggacggtgtgaatgaaaggggctcaggatacaaggcacaggaagaagctggacctccaggttctcgcgcccttcccaggatgcctggggaggatgatcgacatgttcgacctcagcaatggcgtggttgccaccaagatgctaactgagaaggcacatagagatgtttctccggccggaaaagaccgaagtaacactttcaagatggcaattatccccccagctcagacagaagataaacaaatagccagacgagaaggaattcccctactaaaagatcaaactcgcctactaaaaggagcggtgcagcgcctgttaagatgatcatggagcagggcatgtggaaagaagggatgcctgatgaggagccactgaatgttgttgcaagattaatgggactacatgatgctccagttcagcaatctaatttccatttagcgagacaattggataaggaatatcaacgtggtggttttgaagagaactaccggaatctcaagccaaataaggaaagcaaatgccatcaaaaccaaaaggcagggcacacttggaatggttctggtgaccaaccttcaagaatcaatagcagccggagcaagcatcaaggaaatgagccttgctgtgagaagaggatgtcgcttgtccgcgagaagtttgctgaagcgaagcgtctagccacggacgagaagcttcttcattcgaaggagttccaagatgcactacagtttttaagctcaaatagggacctattcttggagttccttgatgagccaaatcctctgttatcaagcaaccgttatgagttccaacctgtcgcgccaccttctcaagcgaagcagataaccatactgaagccatcagaactagcaaagagaaaaggcagcattcttgtggggagacaactgttttcagatggagatgaaaggggacttaacagatacaggcgccatcagagtttagatgtttgcccggcaaattcaaatttgtccgagccaacaaaaattgtgttactgaagccaggacgactgtcaaaacctcatgattccaggattgcaaggtcttcattatcatcagcagaaaacagtgaagatgaaagtatgacgacggttgatgaaaccgtgtgctcaagaaggttggcaaaggaggtcacttggcagacgaggatgcggctaaaagacaagcaagacgaaaagagcacgctctcatgtgaataccttgacttctatatcggagatgactccttcagtaaatcagaagttgagatttcaaaagagatgcctggtgaaacaagtgaggagttggagtttggcactccgacttctggccgttcctgggattttctgagcagaagtggaagtccttactctgcgtcatgctctagccaggcatcccatagaagggaaccgtcggtagttagggaaggcaagaagaagattttggagagatggtctatggtatcgtcaacagtcagtagcgaggaggaaatggaaggtcgcagaagtacaggcacgcttggtgacatactcacaataccgaaagtcaaggaccaggaaggaattggggcggaaacactggggagcccagcacctgagctggaacctgaggagcctttctcatgcttgccaagatctcggtctcttccactttctctgtcctgtggagtcgccgagtctaatggaggagtagcctctggtagtactcaggaagctgaaagggagaggatcaggaagtcatcatcgtttagggaaaaggtttcaagcctgttctctaaaaacaagaaaccagttagggagaaggcagatctatccgtgagcaatagactcgaggtctatggaggggctgaaactactgctgatgtgaagaagggcttgaaccgtcttgcgttagacaatcttcagaaacaaagtactagtcgtgtaaacacagacgggaagaagaacgctgcgcaaggactcgtcactagttcttgtggtactaatgatacagctaataccacccctgccaaggacaacattgcctccattccaagtcttggcgccccaggaatccttggtgaccctcaggaccagcctagtcctgtatctgtgctagatggaccgtttattatacgtgataacagcaggaatgtactgtactcatctccatccccacaggctttgtcgaggtctcccttgatcggatcgtttccacggtccctgccagtgtcgtgggaggaccccccgccggaagccacgtcgccgaattccctgagactctcgaggcttttctccaaggccgacgaggatctagactcgctgacgttcatccagaagctggtccgctcctgtggcatggaccgagcaagctgcgtgttggctggccctctggacccggacctgctcgagaaggtttcagagcacgaagacgacggaaccaggttcgggagaaggcggcttcttttcgacgccgtaaacgaagcgctcgccgagctcgcctggacggcggaactggccgcgtacccctggggcggcggcagatcacgcctggactgcaactgcaagaacggttccggtggtgactcggcggccgaggagatctggcgcgttatcaggaactggtcgacacttgacaagtaccctccctgcgaaactatcgaaggaaacgtcttgctggagatgatactcaggcgggaggcggacagcggcgagacggctcggttggaggtgtttggtctcggcgcctcggtctgcgccgtggtgttggaggagctggttgaagagacggttgtggatctcctgactgactgctagtgagtgatacttgctgctgctgttaacactgctccgttaatccacccctcaagatggaatgggtctctttgccttgttcacatctttgttttgaccggcatttgctctagccgttgactggtaatggatcatgccatttgtttcgccgtttaattacacacacgagaccaaaaaaaaaaactgtaagtagttgcatctcggagcctgtccctaccctgtccacaagatgatcttgttttaatccaagcttagagcctagtcccatgcatgccacaagtatgaaacataatacatttttttattattctgagatccagactaaaaactgccgccttgtcgtcgcctcgagattggaactaag

SEQ ID NO: 212345 - DNA, 3298 bp, Zea Mays
cttttccctgcgtccgtcaccgtccgttcgggcaggcgagaaaaggaaaaggccggcgcctttcctcctccgctcccccaacctgctgctccggccgtcgcagctttcttggcgcatctgcgggtacacaggcctcggtttgttgggacggtgtgaatgaaaggggctcaggatacaaggcacaggaagaagctggacctccaggttctcgcgcccttcccaggatgcctggggaggatgatcgacatgttcgacctcagcaatggcgtggttgccaccaagatgctaactgagaaggcacatagagatgtttctccggccggaaaagaccgaagtaacactttcaagatggcaattatccccccagctcagacagaagataaacaaatagatagccagacgagaaggaattcccctactaaaagatcaaactcgcctactaaaaggagcggtgcagcgcctgttaagatgatcatggagcagggcatgtggaaagaagggatgcctgatgaggagccactgaatgttgttgcaagattaatgggactacatgatgctccagttcagcaatctaatttccatttagcgagacaattggataaggaatatcaacgtggtggttttgaagagaactaccggaatctcaagccaaataaggaaagcaaatgccatcaaaaccaaaaggcagggcacacttggaatggttctggtgaccaaccttcaagaatcaatagcagccggagcaagcatcaaggaaatgagccttgctgtgagaagaggatgtcgcttgtccgcgagaagtttgctgaagcgaagcgtctagccacggacgagaagcttcttcattcgaaggagttccaagatgcactacagtttttaagctcaaatagggacctattcttggagttccttgatgagccaaatcctctgttatcaagcaaccgttatgagttccaacctgtcgcgccaccttctcaagcgaagcagataaccatactgaagccatcagaactagcaaagagaaaaggcagcattcttgtggggagacaactgttttcagatggagatgaaaggggacttaacagatacaggcgccatcagagtttagatgtttgcccggcaaattcaaatttgtccgagccaacaaaaattgtgttactgaagccaggacgactgtcaaaacctcatgattccaggattgcaaggtcttcattatcatcagcagaaaacagtgaagatgaaagtatgacgacggttgatgaaaccgtgtgctcaagaaggttggcaaaggaggtcacttggcagacgaggatgcggctaaaagacaagcaagacgaaaagagcacgctctcatgtgaataccttgacttctatatcggagatgactccttcagtaaatcagaagttgagatttcaaaagagatgcctggtgaaacaagtgaggagttggagtttggcactccgacttctggccgttcctgggattttctgagcagaagtggaagtccttactctgcgtcatgctctagccaggcatcccatagaagggaaccgtcggtagttagggaaggcaagaagaagattttggagagatggtctatggtatcgtcaacagtcagtagcgaggaggaaatggaaggtcgcagaagtacaggcacgcttggtgacatactcacaataccgaaagtcaaggaccaggaaggaattggggcggaaacactggggagcccagcacctgagctggaacctgaggagcctttctcatgcttgccaagatctcggtctcttccactttctctgtcctgtggagtcgccgagtctaatggaggagtagcctctggtagtactcaggaagctgaaagggagaggatcaggaagtcatcatcgtttagggaaaaggtttcaagcctgttctctaaaaacaagaaaccagttagggagaaggcagatctatccgtgagcaatagactcgaggtctatggaggggctgaaactactgctgatgtgaagaagggcttgaaccgtcttgcgttagacaatcttcagaaacaaagtactagtcgtgtaaacacagacgggaagaagaacgctgcgcaaggactcgtcactagttcttgtggtactaatgatacagctaataccacccctgccaaggacaacattgcctccattccaagtcttggcgccccaggaatccttggtgaccctcaggaccagcctagtcctgtatctgtgctagatggaccgtttattatacgtgataacagcaggaatgtactgtactcatctccatccccacaggctttgtcgaggtctcccttgatcggatcgtttccacggtccctgccagtgtcgtgggaggaccccccgccggaagccacgtcgccgaattccctgagactctcgaggcttttctccaaggccgacgaggatctagactcgctgacgttcatccagaagctggtccgctcctgtggcatggaccgagcaagctgcgtgttggctggccctctggacccggacctgctcgagaaggtttcagagcacgaagacgacggaaccaggttcgggagaaggcggcttcttttcgacgccgtaaacgaagcgctcgccgagctcgcctggacggcggaactggccgcgtacccctggggcggcggcagatcacgcctggactgcaactgcaagaacggttccggtggtgactcggcggccgaggagatctggcgcgttatcaggaactggtcgacacttgacaagtaccctccctgcgaaactatcgaaggaaacgtcttgctggagatgatactcaggcgggaggcggacagcggcgagacggctcggttggaggtgtttggtctcggcgcctcggtctgcgccgtggtgttggaggagctggttgaagagacggttgtggatctcctgactgactgctagtgagtgatacttgctgctgctgttaacactgctccgttaatccacccctcaagatggaatgggtctctttgccttgttcacatctttgttttgaccggcatttgctctagccgttgactggtaatggatcatgccatttgtttcgccgtttaattacacacacgagaccaaaaaaaaaaactgtaagtagttgcatctcggagcctgtccctaccctgtccacaagatgatcttgttttaatccaagcttagagcctagtcccatgcatgccacaagtatgaaacataatacatttttttattattctgagatccagactaaaaactgccgccttgtcgtcgcctcgagattggaactaag

SEQ ID NO: 212346 - DNA, 2813 bp, Zea Mays
cacggattgaaacagctgcagccgagcctccctccctccctcctctcacactagctcgttcatcacagagacggacagatagaaagaggaggagatgcatgaagcccaatctacgctcccacagtagggatccctcctccattaatagggggggatgcgtgtcgcggctagccaagcgacgacgcgagctgcctcgctcctctggccagccactccaggtccagggcgaggcgccagagctgcatcgcgctggctagctagctaactagcctgggcgcctagcgctagaagaaacagagctgagtggcggggtacaagcgagcgcggtggacaaaaggctagccagagagacgatggacggcggcagcggaggaggggaggcgtggcgcggcgcggtgtcgccggcagcgcggtacgcggagtccggcggcgccagcctcacgtgggagaacctcacggcggtgctgccgggcggcggcggccgggccaccaagaagctggtgcaggggctgtacggctacgccgtgcccggccgcgtcgtcgccatcatggggccttccggctccggcaagtccacactcctcgactccctctccgggaggctggcaaggaacgtggtcctcaccgggaaggtgctgctcaacggcaagaagaggcggctggattacggcatcgtggcatacgtgacccaagagaacgtgctgctgggcacgctgacggtgcgcgagacggtgacctactcggccctcctccggctgccgtcgagcacgcgcaaggcggaggtgcggcgcatagtggacgagacgctggacgagatgggcctccgggagtgcgccgaccgccacatcgggacgtggcacctccgcggcatcagcggcggcgagaagaagcgactgagcatcgcgctggagatcctcacccgcccgcgcctcctcttcctggacgagcccaccagcggcctcgacagcgccgccgccttctccgtcgtccagacgctgcggcagctcgccgtcgacggcggccgcaccgtcgtctcctccgtgcaccagcccagcagcgaggtgttcgcgctcttcgacgacctctgcctcctctccagcggggagtgcgtctacttcggtgacgccaagctagcgacacaggttttgttgttttagctgtgccatgccaactgactgatgatcatcgatattcagcttcgaatgcgtttttttgagtctgatcacgcgtgcgtgcagttcttcgcggaaacggggttcccctgtcccagccggaggaacccgtccgaccatttcctccggtgtgtcaactcggacttcgatgatgtcgccgccaccatgaaaggctccatgaagctgcgagcaagctcgatcccctgttgaagtactctacctcagagatcagggaacggctagtggacaagtacaggatctcagattacgccatgatggttaggagcacgatacacgagataaccaagattgagggtgtgatggaggatgtgatccgtggcagccaggcgagctggttgaagcagctccgcacgctgacaagccggtccttcaccaacatgtcccgcgatctgaactactactggctgcgcatcatcatctacatcgtgatggccatctgcctgggaaccatctactacgacgtgggcaccagctacacggccatccaggcgcgcgcctcgtgcggcggcttcgtgtcgggcttcatgaccttcatgtccatcggcggcttcccgtccttcatcgaggagatgaaggtgttcaccctcgagcgccagaacggacactacggcgtcgccgcctacatcatctccaacttcctctcctccatgccgttcctgctcgccgtgtcctgggccagcgcgtccatcacgtactggatggtcaagttccggccgggcttcagctacttcgccttcttcgccctcaacctctacggcggcgtctccgtcatcgagagcctcatgatgatcatctccgccctcgtgccaaacttcctcatgggcctcatccttggcgccggtgtcatagggatcatgatgttgacctctgggttcttccgactgcttccggagctcccaaagatcttctggcggtatccagtgtcctacattgtctatgggtcatgggggttgaagggcgggtacaagaacgacttgatcgggctggagttcgagccgatgatgccagggcagccgaagctgaccggcgagtacatcatcaccgagatgatggggctgagcctgaaccactccaagtggctggacctcgccatgatcttcgtcctcctcttcgcctaccgcctcaccttcttcgtcgtgctcaaggtgaaggaggccgctgcgccatacatccgcgtcgcctacacacgattcaccgtcaagcgtctcgagcggcgcgcctccttcaggaagacgctggccatggcgtccatgtccaagcggcacaacccgccgcaccccatggccatccaggaaggactcagctcgcctatgccgtactgagctgagccgaggcgaaggagagagcggagggagacggaagtggtggtcgatatcacagttacttgtggatgtgcttacagatttgtccgttccattgtttagtttgtcagagagcgttgtcaaagataccccacgcgatagtcggtcttcagagcattcgtttcactgtaataactctgaacaccatacacatacaagatagtgctgctgtgcgtacttgtttttttttgtaaacatgaaaccaggcaatgatccttatattaagaaagtcacgcagtcaaaacttacttattattaa

SEQ ID NO: 212347 - DNA, 1131 bp, Zea Mays
ctcacctgcaacgcttactgtaagtcaaggaggctgatggaggcactccagatgagacagttttgcaggattatatggtcccagtaaacttgattgagcggtggggcaatgctatggatattgtataccctgaatttaagcggtgctgctgtttcactaaaagctactatcgttatgtgaaggggacaggctctttgttggctacatctaaaaacctcaatgttcctgaagagaagctccaaatttcttccctgaaggagttgggcctacgatttttcacccctcgtgaggttgccaatttccattccttcccttcaaatttctgcttcccggatcacataagccttaggcaacagtgagtttaagttccattatacacttctggttatctttagtaagcgacaagggcatttgaattgcagtacatataagaaacatgagagatgaggctatgctgggtaactatctgaatagtgtttatagttataggttaccatatatcttttgaaaccctcttgttgcaggtatgctatgctgggtaacagtctgagtatagcagttgtgggtcctttgctgcattatctctttgctgaggcctgagtcatagagaagtccagtcagccctggtgacattagcatggcacaaacactgtggctgcgatctgccaaaatttcttcatacgtgatttaagcaaggttttggggactacagtttggccatttgatgagcacaccgtgtaggcacaacctcacaatgtatcaacaaaagtgtaccatacagtagagaagctgtttctgcgcatacttcctccccctcatgcctatgctgtcatggtgaatgaattttggaattgtgatccgttgatgtgtgcatggatgaggctgtcgtaacgattgttgatctgagctttaagtaacttggaacctacttactccgagcaattccaattctattcttagctaacccatttaaagtttgacaatatttatgatgtaaaatatgtatagcaagtataaaatatactcaatgaagaatctatatcataaatattgacactttttttatataaacatcgtgaaactcaagattctttgacttggtattatgtttgaattgtattttgttttcgg

SEQ ID NO: 212348 - DNA, 1108 bp, Zea Mays
aaaatttgttaaattcatatttaaggacctttacataactgctctaagttccattgatacgtttcatcgattttcggaggaatttattcgaggaatctagtgtttgaccggctccgctcgattctgcttcgttaccacgcgggtgctatcgaatcttggcggagatggggctcacgttcacgaagctgttcaggcggctattcgccaagaaggagatgaggattctcatggtcggtctcgatgcagctggtaagaccaccatcctctacaagctcaagctcggcgagatcgtcaccaccatccccaccattggatttaacgttgaaactgtcgagtacaagaacattagtttcactgtttgggatgtcggtggtcaggacaagatccggcccctgtggaggcactacttccagaacacccagggcctcatttttgttgtagacagcaacgacagagagcgtgttgttgaggccagagatgagctccaccggatgctgaatgagggtttgtatgaggggcttgactggctttcgaacaacatcgctaacaaggtataccatgtctgactgtgtgctcgccactgtctgagtcgttgtactatcccgggccggcctgtccggctgtctcttggcatagcaaaatgatcgcctaatttgttagcacatgctcggtaatatcacgagggcttcggtggtcttattgctcacgctgaattctcaactttgctcttcttttctgcggttgaggttgcatcttgtattgttggctgatttcgagcaatcagaggattgtgctacgtcgtcggaggcatcatgggatagcagctagctttcgtctttgaactgggcttcggttctaaattcgacttcacttttatccttcattaaactttttaactttgatatcgctatataaactggttgtacctttaacactatattttatctttgtaattgatggttagtgattcaagagagcattgtttttttttttgttgatcacacatgttgcgtgtgcgacgtcagctatgaactccacaaataatgtaatttttagctttggaaatcatacattttttatttatattctataaagtatacagttttta

SEQ ID NO: 212349 - DNA, 2254 bp, Zea Mays
ccagttgttcaacacgcgcgcgctccgtctctgttttctttttccgaataacctgcgcgctccctccgacttccagcggtgcgcagtggcctttctttgtggcttccagcggctgtgactgggcgagcgccgacgctgctctactacagctgcccaggtcttcgtcgggcactttgccagcgacgtgcaccaaccagggtagaattttctgcaaaaccacaaaatggctcaggccgcaaggctgaatctgagaatgcagaaagagattaagcttctattggatgatccaccccatggggtttctcttaatctttctgaagacaaaaatgtcttgtcatcgttatcaagtatcgaagccaaaattgaaggacccgagggaacagtttatgccaagggagttttcattttgaagatacaaattcctgaaaggtacccttttcaaccaccgaatgtgacttttgttactcccatttatcatcccaatattgacaatggaggacgcatttgccttgatattctcaatttgcccccaaagggagcctggcaaccatcactcaacattgctactgtgttgacaagcattggcttgctgctaagtgagccaaacccggatgatgggttgatggctgaaataagccgagaatacaaatacaatagacaagtatttgacacaactgctcagttatggacagataagtatgctagttctgctgctgttggtgctagcggttggtgttctgtagatgctgatgtcctggcacagaatacacagatggaggacacaaataacctgggatcactgccaaatgtttctaaaaaagtttgtgaagggaatcaaaggaagatgcggttactgggacaaaagttatcactaaaatgtttcaggcagaaagaatgatacttcagagaacatgtctatcagtactgatagtggagtggtttcaaagcaagatcaccaaggccataaaaaggaattgcagttacctggccagagtctttttgttacctcagaagccccttgcaaaagcagcgatgccagtgatatgctatctaatcatcttccaatagatgcatctgatgctaaagatcatgtcatgcaatcttctgatggcattttagagaataattcggcaaggagaattggcggatcatcagctagcgcatataaagcaccggaaggaaaccgaaggaatatcagggcactgaagttgtcactgaaatcagtaaagcctgaaaagaaaaacaacgatcaaaatgaaaatatggctccaaaccatctgccttcacagtcaagctttagctatttgcagaaaaggcccttagatgctgtttcaaggaaaaaattcgacggaggtcctgcactggttcaacagaatcctaacactgagcagaaaccatcgaacactaacatggtatcaaatgaagagcgcaaccaaggtctaaagatgctgtgttcacaacgcaggaggctgtcactgaaatcggagccgcggctgcctagagtagaaaatgcctgtgaaaaggagactaagcgacccaataattttcctctaagcgatgagaaactcaatgaactgccatcatctgaaccaatccccaaaggtgaacccgtggcacccagtgaactcccattttcggcgccagcagtcctcaaaagtcaaaccagggcccttggctctgctggtggacagaaagactccagctcaggcaattcctgtgtcaatgaaaacacgcttgccatcgagaatgctgttgtttcagacagtgaagatagcgcagacgagcgtgaaaggcccccaagatcaaggctatcattgatgcggagacgactgggtggaaagctgaggacttagtgtcaccgcagaactatttctatgctgcgttgtaaattcttggaaggcgagtattccaatttgctcaaacaaattgtgcctgcgtttgtggtagatcaggccctataggttagtatatgtgttagagaactctgtcgtcctacaacgtcgtggagggtgctctgttggtggtactccttttgttggtaacgaaatttgaagaactagatttttcttatgcaattcagttttagcagctgcgtattgagcaagtattggtggttctacttttttttaaccagatgtttccggagggcatgtacagtgtaggaatgctaagagaacagtggaagtcttgtacatgatggcaagatcctttgatatttggttctactaaagttctttgttctcctgactaaagt

SEQ ID NO: 212350 - DNA, 2353 bp, Zea Mays
ccagttgttcaacacgcgcgcgctccgtctctgttttctttttccgaataacctgcgcgctccctccgacttccagcggtgcgcagtggcctttctttgtggcttccagcggctgtgactgggcgagcgccgacgctgctctactacagctgcccaggtcttcgtcgggcactttgccagcgacgtgcaccaaccagaattttctgcaaaaccacaaaatggctcaggccgcaaggctgaatctgagaatgcagaaagagattaagcttctattggatgatccaccccatggggtttctcttaatctttctgaagacaaaaatgtcttgtcatcgttatcaagtatcgaagccaaaattgaaggacccgagggaacagtttatgccaagggagttttcattttgaagatacaaattcctgaaaggtacccttttcaaccaccgaatgtgacttttgttactcccatttatcatcccaatattgacaatggaggacgcatttgccttgatattctcaatttgcccccaaagggagcctggcaaccatcactcaacattgctactgtgttgacaagcattggcttgctgctaagtgagccaaacccggatgatgggttgatggctgaaataagccgagaatacaaatacaatagacaagtatttgacacaactgctcagttatggacagataagtatgctagttctgctgctgttggtgctagcggttggtgttctgtagatgctgatgtcctggcacagaatacacagatggaggacacaaataacctgggatcactgccaaatgtttctaaaaaagtttgtgaagggaatcaaaggaagatgcggttactgggacaaaagttatcactaaagtatgaaagatctgaagagagtatgaaaactgtcaagcaagacccagttgctagctacctaccatccatggcaggatccacttatcctactgcttgtttttcagatgtttcaggcagaaagaatgatacttcagagaacatgtctatcagtactgatagtggagtggtttcaaagcaagatcaccaaggccataaaaaggaattgcagttacctggccagagtctttttgttacctcagaagccccttgcaaaagcagcgatgccagtgatatgctatctaatcatcttccaatagatgcatctgatgctaaagatcatgtcatgcaatcttctgatggcattttagagaataattcggcaaggagaattggcggatcatcagctagcgcatataaagcaccggaaggaaaccgaaggaatatcagggcactgaagttgtcactgaaatcagtaaagcctgaaaagaaaaacaacgatcaaaatgaaaatatggctccaaaccatctgccttcacagtcaagctttagctatttgcagaaaaggcccttagatgctgtttcaaggaaaaaattcgacggaggtcctgcactggttcaacagaatcctaacactgagcagaaaccatcgaacactaacatggtatcaaatgaagagcgcaaccaaggtctaaagatgctgtgttcacaacgcaggaggctgtcactgaaatcggagccgcggctgcctagagtagaaaatgcctgtgaaaaggagactaagcgacccaataattttcctctaagcgatgagaaactcaatgaactgccatcatctgaaccaatccccaaaggtgaacccgtggcacccagtgaactcccattttcggcgccagcagtcctcaaaagtcaaaccagggcccttggctctgctggtggacagaaagactccagctcaggcaattcctgtgtcaatgaaaacacgcttgccatcgagaatgctgttgtttcagacagtgaagatagcgcagacgagcgtgaaaggcccccaagatcaaggctatcattgatgcggagacgactgggtggaaagctgaggacttagtgtcaccgcagaactatttctatgctgcgttgtaaattcttggaaggcgagtattccaatttgctcaaacaaattgtgcctgcgtttgtggtagatcaggccctataggttagtatatgtgttagagaactctgtcgtcctacaacgtcgtggagggtgctctgttggtggtactccttttgttggtaacgaaatttgaagaactagatttttcttatgcaattcagttttagcagctgcgtattgagcaagtattggtggttctacttttttttaaccagatgtttccggagggcatgtacagtgtaggaatgctaagagaacagtggaagtcttgtacatgatggcaagatcctttgatatttggttctactaaagttctttgttctcctgactaaagt

SEQ ID NO: 212351 - DNA, 2390 bp, Zea Mays
ccagttgttcaacacgcgcgcgctccgtctctgttttctttttccgaataacctgcgcgctccctccgacttccagcggtgcgcagtggcctttctttgtggcttccagcggctgtgactgggcgagcgccgacgctgctctactacagctgcccaggtcttcgtcgggcactttgccagcgacgtgcaccaaccagggtagaattttctgcaaaaccacaaaatggctcaggccgcaaggctgaatctgagaatgcagaaagagattaagcttctattggatgatccaccccatggggtttctcttaatctttctgaagacaaaaatgtcttgtcatcgttatcaagtatcgaagccaaaattgaaggacccgagggaacagtttatgccaagggagttttcattttgaagatacaaattcctgaaaggtacccttttcaaccaccgaatgtgacttttgttactcccatttatcatcccaatattgacaatggaggacgcatttgccttgatattctcaatttgcccccaaagtttttgttgttgatgatgatattgttgcacagggagcctggcaaccatcactcaacattgctactgtgttgacaagcattggcttgctgctaagtgagccaaacccggatgatgggttgatggctgaaataagccgagaatacaaatacaatagacaagtatttgacacaactgctcagttatggacagataagtatgctagttctgctgctgttggtgctagcggttggtgttctgtagatgctgatgtcctggcacagaatacacagatggaggacacaaataacctgggatcactgccaaatgtttctaaaaaagtttgtgaagggaatcaaaggaagatgcggttactgggacaaaagttatcactaaagtatgaaagatctgaagagagtatgaaaactgtcaagcaagacccagttgctagctacctaccatccatggcaggatccacttatcctactgcttgtttttcagatgtttcaggcagaaagaatgatacttcagagaacatgtctatcagtactgatagtggagtggtttcaaagcaagatcaccaaggccataaaaaggaattgcagttacctggccagagtctttttgttacctcagaagccccttgcaaaagcagcgatgccagtgatatgctatctaatcatcttccaatagatgcatctgatgctaaagatcatgtcatgcaatcttctgatggcattttagagaataattcggcaaggagaattggcggatcatcagctagcgcatataaagcaccggaaggaaaccgaaggaatatcagggcactgaagttgtcactgaaatcagtaaagcctgaaaagaaaaacaacgatcaaaatgaaaatatggctccaaaccatctgccttcacagtcaagctttagctatttgcagaaaaggcccttagatgctgtttcaaggaaaaaattcgacggaggtcctgcactggttcaacagaatcctaacactgagcagaaaccatcgaacactaacatggtatcaaatgaagagcgcaaccaaggtctaaagatgctgtgttcacaacgcaggaggctgtcactgaaatcggagccgcggctgcctagagtagaaaatgcctgtgaaaaggagactaagcgacccaataattttcctctaagcgatgagaaactcaatgaactgccatcatctgaaccaatccccaaaggtgaacccgtggcacccagtgaactcccattttcggcgccagcagtcctcaaaagtcaaaccagggcccttggctctgctggtggacagaaagactccagctcaggcaattcctgtgtcaatgaaaacacgcttgccatcgagaatgctgttgtttcagacagtgaagatagcgcagacgagcgtgaaaggcccccaagatcaaggctatcattgatgcggagacgactgggtggaaagctgaggacttagtgtcaccgcagaactatttctatgctgcgttgtaaattcttggaaggcgagtattccaatttgctcaaacaaattgtgcctgcgtttgtggtagatcaggccctataggttagtatatgtgttagagaactctgtcgtcctacaacgtcgtggagggtgctctgttggtggtactccttttgttggtaacgaaatttgaagaactagatttttcttatgcaattcagttttagcagctgcgtattgagcaagtattggtggttctacttttttttaaccagatgtttccggagggcatgtacagtgtaggaatgctaagagaacagtggaagtcttgtacatgatggcaagatcctttgatatttggttctactaaagttctttgttctcctgactaaagt

SEQ ID NO: 212352 - DNA, 3712 bp, Zea Mays
atggcgctcggcggaccgggacaaatcccatcgacgacgggcaactccggtagcacaggcagtgatctctcgagcacccagggaatagacaagggagacacagagaggacccgaggaaattggcacgccgacgagctcgcgcggattccgcgacgcgcccttcgcggatttgtttcagtgtattcacaaggtggtttcgaggtgggggagaaccctgacaacgtgacccctccagtcggtgtctgggcgcgtgacgagggaagagtccgactccatgccccattcgtccgagtttcggttaaaggagagctaactgtgatggacactgatgacaagtcacaaatcaaatcgctatcattttcaaatcacacgtcaatgatcaaattacctgctgctaatcctccgcgccatcttgaaattattaagaccgacattacaagtctatctgtacatgagcacacctgggccccccttgccagggggcgcttgtcgaccgttgcagcctgggcaggagcaggaccaggtctacgggcaggcgagaactacgcagccgaccgttggagcccgatccctccctgggatttcaaactcgccgtccgtcctcgcccgagtaccgatccgacggtcctggagacctcctctcgctacccagctacccgattatcaccagtcactctacctacaaccgacgaaagtctccccagaacccagatcaagaaccccgaaatcccagcgagcgagtcttttttgctcctcagcgttgaggaactcgtcgacgtttcggcgcgctggttcgagcatcttgtttgggatcccaggaagttcgttacttggaacttctgtcccgaggaagggcgcgcggttcgatgctggggcggagcagcggcttgcgacactcagatctggtgtgaggaggagatccggatcctcgtgttcgtgaggctgcgccccatgtcgaggaaggagaaggaggccgggtcgaggagttgcgtcaagatcgtcaacaggaaggaggtgttcctcacggagtccgcctcagagaacgactacctccggctgaagcgtggccgcgattcccatttctgcttcgactcggttttccctgattctacgacacaggcagaagtctacagcacctcaacagcagaccttgtggagggtgttctgcaaggtaggaatgggacagtgttctgctatggagctacaggggctggcaagacctacaccatgcttgggacaatggaaaaccccggggtaatggtgcttgcaataaatgatttgttctccaaggtgacgcagaagtaccactcaattaagctgtcatacctcgagatatacaatgagacggtgagggatttgctgtctcctggtagcccccttaacctgagagaagataagcagggaattgttgctgctggtcttacccaaagaagtgtatactccacggatgaggtcatggagttacttcagaaaggcaacaagaatcgaacaactgaaccgactcgagtaaacgagacctcatcgcgttctcatgcggtactgcaggttgtcgtagaatacagatccttggatggagttaacgtaaaacgagccgggaaactatctctcatcgatcttgctggatccgaaagagctctggcaacagatcaacgcacacagaggtcgatcgaaggagcaaacattaaccgctctcttcttgcactcagcagctgcattaacgcccttgtggagggcaagaagcacataccgtatcgcaattccaagctgacccaactcctcaaggactcgcttggaggagcctgcaacaccgtcatgatcgccaacattagcccctctaacctttccttcggcgagacacagaacacgcttcactgggctgatcgtgccaaggagataaaaacaaagacgcaacaaaccactgtgaatgaggaggttctggaccaaccagactctgaaactatgcttgtactggagcttcagaaggaaaaccgcgtgctgagggagcagttggcgaagcaacaacagaaattactgactgccgaggctcagctactcgcttcaaaaacctcgccacaacgatctcctgctccctcgtctcacgtctcaactccaggatcaactcaaaggaagaccagacgatctatcttggctgctggtggggggaactacttcagcacactggactcaaagaggcatgcagccgacaacgcacaggtcagggagctgcagaggaaagtgagcacgttggagtccgagatcgagaagatgaaaaaggagcacctattgcagctgaagcggaaggacgagttcatccgtgacttgatcaacaggaaggatcctaataacaacagtgaagaaacagcaacagttgatagaagagttgtcacgagggcgagcgtgcgaaaggcacagagagacgcatcagccgcagtcgagctgaaaagccccagccgggtgttcacatcaccggcgccaactgcaaagaagcgtactttctgggacatcggaggcaacagcccttcagttcttgctgccaacggaagaaagactcgaagccatgtggcaacagagacaccgaagaaagcatcctccaagctgcttcagccaggatttgcacggcaaacatcgacccatcaaagattcacatgaaagactgcctacaactcattcattactaattggagtttaatcgaagtacattgtaatgttttttagtttttttatccatattgagttattggaactgtttttttaaaattaacttgaggcagagttttccttttcttcggaacatataagcttttttccccatcttactggtattaatcagaaaggcagcaataattttgtgcagcttagggacttggtgtcttctatgtgtgcagtacccattcttatcatttctgaaggttgtccaagtggagatcataaatgttttccgcaccagcctgtacactaaagtgaccaagataaaaaagaaggaaaagttaaaaagtaatattgtttcaattgttccatgtacaagtactttttcccccctccatgtacaagttgaattttatgttgggatagcagcagacctcagcttatatgttaaaaaagtttatattatgaccaggctttgcatgctgctgctttgcgataaccaccatattatgcaccaacatttgaaactatatgtaactcccaatgtctgctacaagcaatatgttgtccttccagcaacaagggtacgaggtgttgcaatgctggtgctgtttttctagttcatgttggactttcctcctcaacatttgcagtgttggaatgcccagcttcttctgctgacctagaaggccacacatccagttccatttctccagagctcgtaccactgcaactctcgtagtcgctatcatcagaagaacagctactggtaccatcacccgaagtagaagtgtcacttagcacgttgaaaaccgtaatgctctctttctgtgagctgtggaacgaatggctgctgtacttgccatggtacagtggcaaggagccttgctgctgcaagctgggctcgtccctgccaaggctgtatgatccggacagttttctctccacgctttccttggctttcaccatttcacccagcttccccaaagcttcattcgacgagacatcttcagctgccttctgctcgagctccgagatcttctttcctaagattcttctcttgctg

SEQ ID NO: 212353 - DNA, 3691 bp, Zea Mays
gccgatccgaggccaaagggagggaggagacccctttccctctcgccgccgcacgatggtcgacaccaggcggagctccgcggccaagcgccggggcccgtccgaggactcctccccgtcgccgccgacgacgcaggcggacccgacgacggcgggcttgccggtggagcccgcgtcgcccccgccgtcgtccgggagccgatcgggcaagcgcgccaaggtcgcggttgcgcgggcggaggaccccggtgcgccgcgcggcaaggcggtggaccccgccgcggtcgacgtgctcgacagctccgtggcgaacctgcagggcgtggcgaggccgccggccgccaacgtggccgcgtcctccgccgtgtccaattccgtagggaggaggaagaggaatcagtctgtgagggcgatcccgacgggcgaggggacgctctggaagccgaggcccgccggtggccgcgctgaggcctggggcagattgatttcccagtcttccgagtatccctcaattccaatttatactactcatttcactattggcaatggcggaaagtgtgacttgaaactcactgagacatctcctgggccacttatttgcaaactgaagcatgttaagaggggtgctgcccttgagatctacatgaacaaagttgtccatgtcaatgggaaggccttggacaaagctgctaaagtcaccttgatcggtggtgatgaagtcatgtttgtttctcttgggacacatgcttatatatttcagcaacttctagaggaaaaagcaagcacaccatctttgtgttcaaaatgtgtcattcaacaagaacaatatccagttgtcaaagataaggagatagtcagcagtttatgtaagactgtgggggagcaaagctaccacccttctgaggaaaatatgacatttggtcgacaccaacttttgaaggatgatttgaagaaagcagctataagtgcaagtgatatatcagaatcatttgataattttccatattatcttagtgaaaataccaaaaatgttcttttgtcatcatcgtatgtaaatctatgctgcaaggaatccactaagtggacaaaggatatatcttctctttgtaaaagggtactattatctggcccaccagggtctgagatctaccaagaattactggttaaggcacttaccaaatcctttggtgctaagctgcttgtcatagattattcgctgctgtctggtccttcaaagtcaaaggaatcaaaaccatacaaaaaaggtgatagggtgaggtacattggtcctattcaatcatcagggtttatgtttgagggacagagagctcctgattatggttcacagggtgaagtgaggcttacttttgcggaaaatggatcctcaaaagttggagtcagatttgataaacagatccccgggggcattgatcttggaggcagttgtgagcttgatcatggcctattctgttcagttgattctctatgcctcgatggtccaggatgggaagatagagccaaacattcatttgatgttgtgtttgagtttgcctctgaagaaagtcaacaggtgcctgtaatcctatttctgaaggatgttgagaaaatatgtggaaataattacacctaccatggtctaaagaataagcttgaaagtttcccagctggagtttttattgttgggtcccagattcagacagatgctcggaaagataagtcaaacaatgggtctccttggctcaagttctcatatagccaagcagcaatacttgaccttgcatttcaggatagctttggtcgggcgggtgaaaaaaataaagaagcactcaagatgtcaaagcatataactaaacttttcccaaataaagtgacaattgaatcacctgaggatgaaacggaactctcccagtggaaacagctattgggtcgtgacattgaaattcttaaggcaaaggctaattttttgaaaatacaatcttttctaacccgccatggtatggaatgtactgatttagaatcagtggtttgtgttaaagatcgtaatctgacaagcgaatgtgtcgataaaatagttggttatgctttgagttatcaactcaaggatcaccctattcaaactcctggaaaggatgcgagagttgtcctttccggtgtaagccttaagtatggaattgatttgttggaaagtatccaaagtggccctaagaagaagagcacaaagaagtcactcaaggatgttgtcacagagaatgaatttgaaaaacgtcttcttccagatgtcatccctccagatgagattggtgttacctttgaggatattggagcattagaaaatgtcaaggaaactttgcaggagttagttatgcttcctttgcaaaggcctgagttgttctccaaaggacaacttatgaagccatgtaaagggatattgctttttggtccacctggcaccggtaagaccatgcttgccaaagctgttgcaacagaggctggtgctaattttatcaacatatcaatgtcaagcattgcttcaaagtggtttggagagggagaaaaatatgtgaaagctgttttttcacttgcaagcaaaatttctcctagtgttattttcgtggatgaggttgatggcatgctgggtagacgtgagaatccaggggaacatgaggccatgcgcaagatgaaaaatgagtttatggtgaactgggatggtcttaggacaaaagacaaagaacgtgttctggtacttgctgccactaataggccatttgatcttgacgaggctgttgtcaggaggctccccaggaggttgatggttaacttgccagatgcacccaacagaaagaagattcttagcgtgatactagcaaaagaagatttggcagatgatgtagatctggaggcgttagcaaacctgacagatgggtattcaggcagtgatctgaagaacctgtgtataactgcagcacatcgtcccataagggaaattcttgaaagagagaagaaggagagaaccttagctgaagcagaaaataggccagccccacctcagtgctgtagcggcgacgttcgctccctaaagtttagtgatttcaagcacgcacatgagcaggtttgtgcgagtatatcatcggattcaaaaaatatgaatgagctcgttcaatggaacgacctctacggagaaggcgggtcgaggcacaagacaccgttgagctactttatgtagcctaacgtttttttagatgatttgtacatacagaagcagcctttgtataggtgtgtttccagttaattttgctggaaacatttattcatgtcgggtttcgtttctataatcatatcagcttgtgtctgcatctagtgtagcctgagcttctgattagttattaatttatttcagtccgttggatcttgcgtcctggtatagtctgtgaaaggtctcgacggagattcatttggatttatttaatagtctggatgatatggtaatgtttgtgtgggtgtgtgcgtgacagagaaggttttacccttccctctgcactaggtatggcaaagaggaaattctccacaggtcctacgaacgcttgtggtggccatttcttttccatcttcgttattcgtggggataaatcctatcggaattccaattataattagatagtacttgatttgttattaatataaaacattgtta

SEQ ID NO: 212354 - DNA, 3691 bp, Zea Mays
gccgatccgaggccaaagggagggaggagacccctttccctctcgccgccgcacgatggtcgacaccaggcggagctccgcggccaagcgccggggcccgtccgaggactcctccccgtcgccgccgacgacgcaggcggacccgacgacggcgggcttgccggtggagcccgcgtcgcccccgccgtcgtccgggagccgatcgggcaagcgcgccaaggttgcgcgggcggaggaccccggtgcgccgcgcggcaaggcggtggaccccgccgcggtcgacgtgctcgacagctccgtggcgaacctgcagggcgtggcgaggccgccggccgccaacgtggccgcgtcctccgccgtgtccaattccgtagggaggaggaagaggaatcagtctgtgagggcgatcccgacgggcgaggggacgctctggaagccgaggcccgccggtggccgcgctgaggcctggggcagattgatttcccagtcttccgagtatccctcaattccaatttatactactcatttcactattggcaatggcggaaagtgtgacttgaaactcactgagacatctcctgggccacttatttgcaaactgaagcatgttaagaggggtgctgcccttgagatctacatgaacaaagttgtccatgtcaatgggaaggccttggacaaagctgctaaagtcaccttgatcggtggtgatgaagtcatgtttgtttctcttgggacacatgcttatatatttcagcaacttctagaggaaaaagcaagcacaccatctttgtgttcaaaatgtgtcattcaacaagaacaatatccagttgtcaaagataaggagatagtcagcagtttatgtaagactgtgggggagcaaagctaccacccttctgaggaaaatatgacatttggtcgacaccaacttttgaaggatgatttgaagaaagcagctataagtgcaagtgatatatcagaatcatttgataattttccatattatcttagtgaaaataccaaaaatgttcttttgtcatcatcgtatgtaaatctatgctgcaaggaatccactaagtggacaaaggatatatcttctctttgtaaaagggtactattatctggcccaccagggtctgagatctaccaagaattactggttaaggcacttaccaaatcctttggtgctaagctgcttgtcatagattattcgctgctgtctggtgggcagccttcaaagtcaaaggaatcaaaaccatacaaaaaaggtgatagggtgaggtacattggtcctattcaatcatcagggtttatgtttgagggacagagagctcctgattatggttcacagggtgaagtgaggcttacttttgcggaaaatggatcctcaaaagttggagtcagatttgataaacagatccccgggggcattgatcttggaggcagttgtgagcttgatcatggcctattctgttcagttgattctctatgcctcgatggtccaggatgggaagatagagccaaacattcatttgatgttgtgtttgagtttgcctctgaagaaagtcaacaggtgcctgtaatcctatttctgaaggatgttgagaaaatatgtggaaataattacacctaccatggtctaaagaataagcttgaaagtttcccagctggagtttttattgttgggtcccagattcagacagatgctcggaaagataagtcaaacaatgggtctccttggctcaagttctcatatagccaagcagcaatacttgaccttgcatttcaggatagctttggtcgggcgggtgaaaaaaataaagaagcactcaagatgtcaaagcatataactaaacttttcccaaataaagtgacaattgaatcacctgaggatgaaacggaactctcccagtggaaacagctattgggtcgtgacattgaaattcttaaggcaaaggctaattttttgaaaatacaatcttttctaacccgccatggtatggaatgtactgatttagaatcagtggtttgtgttaaagatcgtaatctgacaagcgaatgtgtcgataaaatagttggttatgctttgagttatcaactcaaggatcaccctattcaaactcctggaaaggatgcgagagttgtcctttccggtgtaagccttaagtatggaattgatttgttggaaagtatccaaagtggccctaagaagaagagcacaaagaagtcactcaaggatgttgtcacagagaatgaatttgaaaaacgtcttcttccagatgtcatccctccagatgagattggtgttacctttgaggatattggagcattagaaaatgtcaaggaaactttgcaggagttagttatgcttcctttgcaaaggcctgagttgttctccaaaggacaacttatgaagccatgtaaagggatattgctttttggtccacctggcaccggtaagaccatgcttgccaaagctgttgcaacagaggctggtgctaattttatcaacatatcaatgtcaagcattgcttcaaagtggtttggagagggagaaaaatatgtgaaagctgttttttcacttgcaagcaaaatttctcctagtgttattttcgtggatgaggttgatggcatgctgggtagacgtgagaatccaggggaacatgaggccatgcgcaagatgaaaaatgagtttatggtgaactgggatggtcttaggacaaaagacaaagaacgtgttctggtacttgctgccactaataggccatttgatcttgacgaggctgttgtcaggaggctccccaggaggttgatggttaacttgccagatgcacccaacagaaagaagattcttagcgtgatactagcaaaagaagatttggcagatgatgtagatctggaggcgttagcaaacctgacagatgggtattcaggcagtgatctgaagaacctgtgtataactgcagcacatcgtcccataagggaaattcttgaaagagagaagaaggagagaaccttagctgaagcagaaaataggccagccccacctcagtgctgtagcggcgacgttcgctccctaaagtttagtgatttcaagcacgcacatgagcaggtttgtgcgagtatatcatcggattcaaaaaatatgaatgagctcgttcaatggaacgacctctacggagaaggcgggtcgaggcacaagacaccgttgagctactttatgtagcctaacgtttttttagatgatttgtacatacagaagcagcctttgtataggtgtgtttccagttaattttgctggaaacatttattcatgtcgggtttcgtttctataatcatatcagcttgtgtctgcatctagtgtagcctgagcttctgattagttattaatttatttcagtccgttggatcttgcgtcctggtatagtctgtgaaaggtctcgacggagattcatttggatttatttaatagtctggatgatatggtaatgtttgtgtgggtgtgtgcgtgacagagaaggttttacccttccctctgcactaggtatggcaaagaggaaattctccacaggtcctacgaacgcttgtggtggccatttcttttccatcttcgttattcgtggggataaatcctatcggaattccaattataattagatagtacttgatttgttattaatataaaacattgtta

SEQ ID NO: 212355 - DNA, 3697 bp, Zea Mays
gccgatccgaggccaaagggagggaggagacccctttccctctcgccgccgcacgatggtcgacaccaggcggagctccgcggccaagcgccggggcccgtccgaggactcctccccgtcgccgccgacgacgcaggcggacccgacgacggcgggcttgccggtggagcccgcgtcgcccccgccgtcgtccgggagccgatcgggcaagcgcgccaaggtcgcggttgcgcgggcggaggaccccggtgcgccgcgcggcaaggcggtggaccccgccgcggtcgacgtgctcgacagctccgtggcgaacctgcagggcgtggcgaggccgccggccgccaacgtggccgcgtcctccgccgtgtccaattccgtagggaggaggaagaggaatcagtctgtgagggcgatcccgacgggcgaggggacgctctggaagccgaggcccgccggtggccgcgctgaggcctggggcagattgatttcccagtcttccgagtatccctcaattccaatttatactactcatttcactattggcaatggcggaaagtgtgacttgaaactcactgagacatctcctgggccacttatttgcaaactgaagcatgttaagaggggtgctgcccttgagatctacatgaacaaagttgtccatgtcaatgggaaggccttggacaaagctgctaaagtcaccttgatcggtggtgatgaagtcatgtttgtttctcttgggacacatgcttatatatttcagcaacttctagaggaaaaagcaagcacaccatctttgtgttcaaaatgtgtcattcaacaagaacaatatccagttgtcaaagataaggagatagtcagcagtttatgtaagactgtgggggagcaaagctaccacccttctgaggaaaatatgacatttggtcgacaccaacttttgaaggatgatttgaagaaagcagctataagtgcaagtgatatatcagaatcatttgataattttccatattatcttagtgaaaataccaaaaatgttcttttgtcatcatcgtatgtaaatctatgctgcaaggaatccactaagtggacaaaggatatatcttctctttgtaaaagggtactattatctggcccaccagggtctgagatctaccaagaattactggttaaggcacttaccaaatcctttggtgctaagctgcttgtcatagattattcgctgctgtctggtgggcagccttcaaagtcaaaggaatcaaaaccatacaaaaaaggtgatagggtgaggtacattggtcctattcaatcatcagggtttatgtttgagggacagagagctcctgattatggttcacagggtgaagtgaggcttacttttgcggaaaatggatcctcaaaagttggagtcagatttgataaacagatccccgggggcattgatcttggaggcagttgtgagcttgatcatggcctattctgttcagttgattctctatgcctcgatggtccaggatgggaagatagagccaaacattcatttgatgttgtgtttgagtttgcctctgaagaaagtcaacaggtgcctgtaatcctatttctgaaggatgttgagaaaatatgtggaaataattacacctaccatggtctaaagaataagcttgaaagtttcccagctggagtttttattgttgggtcccagattcagacagatgctcggaaagataagtcaaacaatgggtctccttggctcaagttctcatatagccaagcagcaatacttgaccttgcatttcaggatagctttggtcgggcgggtgaaaaaaataaagaagcactcaagatgtcaaagcatataactaaacttttcccaaataaagtgacaattgaatcacctgaggatgaaacggaactctcccagtggaaacagctattgggtcgtgacattgaaattcttaaggcaaaggctaattttttgaaaatacaatcttttctaacccgccatggtatggaatgtactgatttagaatcagtggtttgtgttaaagatcgtaatctgacaagcgaatgtgtcgataaaatagttggttatgctttgagttatcaactcaaggatcaccctattcaaactcctggaaaggatgcgagagttgtcctttccggtgtaagccttaagtatggaattgatttgttggaaagtatccaaagtggccctaagaagaagagcacaaagaagtcactcaaggatgttgtcacagagaatgaatttgaaaaacgtcttcttccagatgtcatccctccagatgagattggtgttacctttgaggatattggagcattagaaaatgtcaaggaaactttgcaggagttagttatgcttcctttgcaaaggcctgagttgttctccaaaggacaacttatgaagccatgtaaagggatattgctttttggtccacctggcaccggtaagaccatgcttgccaaagctgttgcaacagaggctggtgctaattttatcaacatatcaatgtcaagcattgcttcaaagtggtttggagagggagaaaaatatgtgaaagctgttttttcacttgcaagcaaaatttctcctagtgttattttcgtggatgaggttgatggcatgctgggtagacgtgagaatccaggggaacatgaggccatgcgcaagatgaaaaatgagtttatggtgaactgggatggtcttaggacaaaagacaaagaacgtgttctggtacttgctgccactaataggccatttgatcttgacgaggctgttgtcaggaggctccccaggaggttgatggttaacttgccagatgcacccaacagaaagaagattcttagcgtgatactagcaaaagaagatttggcagatgatgtagatctggaggcgttagcaaacctgacagatgggtattcaggcagtgatctgaagaacctgtgtataactgcagcacatcgtcccataagggaaattcttgaaagagagaagaaggagagaaccttagctgaagcagaaaataggccagccccacctcagtgctgtagcggcgacgttcgctccctaaagtttagtgatttcaagcacgcacatgagcaggtttgtgcgagtatatcatcggattcaaaaaatatgaatgagctcgttcaatggaacgacctctacggagaaggcgggtcgaggcacaagacaccgttgagctactttatgtagcctaacgtttttttagatgatttgtacatacagaagcagcctttgtataggtgtgtttccagttaattttgctggaaacatttattcatgtcgggtttcgtttctataatcatatcagcttgtgtctgcatctagtgtagcctgagcttctgattagttattaatttatttcagtccgttggatcttgcgtcctggtatagtctgtgaaaggtctcgacggagattcatttggatttatttaatagtctggatgatatggtaatgtttgtgtgggtgtgtgcgtgacagagaaggttttacccttccctctgcactaggtatggcaaagaggaaattctccacaggtcctacgaacgcttgtggtggccatttcttttccatcttcgttattcgtggggataaatcctatcggaattccaattataattagatagtacttgatttgttattaatataaaacattgtta

SEQ ID NO: 212356 - DNA, 3356 bp, Zea Mays
ttgcaatccattcctaacttgtttctgaatgagcaaaatgtctgaattggatactagagctaatgcggattggtgtgctgtatcacatcatgcatgagtatccctcaattccaatttatactactcatttcactattggcaatggcggaaagtgtgacttgaaactcactgagacatctcctgggccacttatttgcaaactgaagcatgttaagaggggtgctgcccttgagatctacatgaacaaagttgtccatgtcaatgggaaggccttggacaaagctgctaaagtcaccttgatcggtggtgatgaagtcatgtttgtttctcttgggacacatgcttatatatttcagcaacttctagaggaaaaagcaagcacaccatctttgtgttcaaaatgtgtcattcaacaagaacaatatccagttgtcaaagtgggtatgggaaacccgttgggtacccgaaacccgcttgggtatgagtttgggcaaaattttatacccgtcatggataaggagatagtcagcagtttatgtaagactgtgggggagcaaagctaccacccttctgaggaaaatatgacatttggtcgacaccaacttttgaaggatgatttgaagaaagcagctataagtgcaagtgatatatcagaatcatttgataattttccatattatcttagtgaaaataccaaaaatgttcttttgtcatcatcgtatgtaaatctatgctgcaaggaatccactaagtggacaaaggatatatcttctctttgtaaaagggtactattatctggcccaccagggtctgagatctaccaagaattactggttaaggcacttaccaaatcctttggtgctaagctgcttgtcatagattattcgctgctgtctggtgctgtactaatcctgctcatggtttcctcaggtgatagggtgaggtacattggtcctattcaatcatcagggtttatgtttgagggacagagagctcctgattatggttcacagggtgaagtgaggcttacttttgcggaaaatggatcctcaaaagttggagtcagatttgataaacagatccccgggggcattgatcttggaggcagttgtgagcttgatcatggcctattctgttcagttgattctctatgcctcgatggtccaggatgggaagatagagccaaacattcatttgatgttgtgtttgagtttgcctctgaagaaagtcaacaggtgcctgtaatcctatttctgaaggatgttgagaaaatatgtggaaataattacacctaccatggtctaaagaataagcttgaaagtttcccagctggagtttttattgttgggtcccagattcagacagatgctcggaaagataagtcaaacaatgggtctccttggctcaagttctcatatagccaagcagcaatacttgaccttgcatttcaggatagctttggtcgggcgggtgaaaaaaataaagaagcactcaagatgtcaaagcatataactaaacttttcccaaataaagtgacaattgaatcacctgaggatgaaacggaactctcccagtggaaacagctattgggtcgtgacattgaaattcttaaggcaaaggctaattttttgaaaatacaatcttttctaacccgccatggtatggaatgtactgatttagaatcagtggtttgtgttaaagatcgtaatctgacaagcgaatgtgtcgataaaatagttggttatgctttgagttatcaactcaaggatcaccctattcaaactcctggaaaggatgcgagagttgtcctttccggtgtaagccttaagtatggaattgatttgttggaaagtatccaaagtggccctaagaagaagagcacaaagaagtcactcaaggatgttgtcacagagaatgaatttgaaaaacgtcttcttccagatgtcatccctccagatgagattggtgttacctttgaggatattggagcattagaaaatgtcaaggaaactttgcaggagttagttatgcttcctttgcaaaggcctgagttgttctccaaaggacaacttatgaagccatgtaaagggatattgctttttggtccacctggcaccggtaagaccatgcttgccaaagctgttgcaacagaggctggtgctaattttatcaacatatcaatgtcaagcattgcttcaaagtggtttggagagggagaaaaatatgtgaaagctgttttttcacttgcaagcaaaatttctcctagtgttattttcgtggatgaggttgatggcatgctgggtagacgtgagaatccaggggaacatgaggccatgcgcaagatgaaaaatgagtttatggtgaactgggatggtcttaggacaaaagacaaagaacgtgttctggtacttgctgccactaataggccatttgatcttgacgaggctgttgtcaggaggctccccaggaggttgatggttaacttgccagatgcacccaacagaaagaagattcttagcgtgatactagcaaaagaagatttggcagatgatgtagatctggaggcgttagcaaacctgacagatgggtattcaggcagtgatctgaagaacctgtgtataactgcagcacatcgtcccataagggaaattcttgaaagagagaagaaggagagaaccttagctgaagcagaaaataggccagccccacctcagtgctgtagcggcgacgttcgctccctaaagtttagtgatttcaagcacgcacatgagcaggtttgtgcgagtatatcatcggattcaaaaaatatgaatgagctcgttcaatggaacgacctctacggagaaggcgggtcgaggcacaagacaccgttgagctactttatgtagcctaacgtttttttagatgatttgtacatacagaagcagcctttgtataggtgtgtttccagttaattttgctggaaacatttattcatgtcgggtttcgtttctataatcatatcagcttgtgtctgcatctagtgtagcctgagcttctgattagttattaatttatttcagtccgttggatcttgcgtcctggtatagtctgtgaaaggtctcgacggagattcatttggatttatttaatagtctggatgatatggtaatgtttgtgtgggtgtgtgcgtgacagagaaggttttacccttccctctgcactaggtatggcaaagaggaaattctccacaggtcctacgaacgcttgtggtggccatttcttttccatcttcgttattcgtggggataaatcctatcggaattccaattataattagatagtacttgatttgttattaatataaaacattgtta

SEQ ID NO: 212357 - DNA, 1745 bp, Zea Mays
aaaggctaattttttgaaaatacaatcttttctaacccgccatggtatggaatgtactgatttagaatcagtggtttgtgttaaagatcgtaatctgacaagcgaatgtaggtgtcgataaaatagttggttatgctttgagttatcaactcaaggatcaccctattcaaactcctggaaaggatgcgagagttgtcctttccggtgtaagccttaagtatggaattgatttgttggaaagtatccaaagtggccctaagaagaagagcacaaagaagtcactcaaggatgttgtcacagagaatgaatttgaaaaacgtcttcttccagatgtcatccctccagatgagattggtgttacctttgaggatattggagcattagaaaatgtcaaggaaactttgcaggagttagttatgcttcctttgcaaaggcctgagttgttctccaaaggacaacttatgaagccatgtaaagggatattgctttttggtccacctggcaccggtaagaccatgcttgccaaagctgttgcaacagaggctggtgctaattttatcaacatatcaatgtcaagcattgcttcaaagtggtttggagagggagaaaaatatgtgaaagctgttttttcacttgcaagcaaaatttctcctagtgttattttcgtggatgaggttgatggcatgctgggtagacgtgagaatccaggggaacatgaggccatgcgcaagatgaaaaatgagtttatggtgaactgggatggtcttaggacaaaagacaaagaacgtgttctggtacttgctgccactaataggccatttgatcttgacgaggctgttgtcaggaggctccccaggaggttgatggttaacttgccagatgcacccaacagaaagaagattcttagcgtgatactagcaaaagaagatttggcagatgatgtagatctggaggcgttagcaaacctgacagatgggtattcaggcagtgatctgaagaacctgtgtataactgcagcacatcgtcccataagggaaattcttgaaagagagaagaaggagagaaccttagctgaagcagaaaataggccagccccacctcagtgctgtagcggcgacgttcgctccctaaagtttagtgatttcaagcacgcacatgagcaggtttgtgcgagtatatcatcggattcaaaaaatatgaatgagctcgttcaatggaacgacctctacggagaaggcgggtcgaggcacaagacaccgttgagctactttatgtagcctaacgtttttttagatgatttgtacatacagaagcagcctttgtataggtgtgtttccagttaattttgctggaaacatttattcatgtcgggtttcgtttctataatcatatcagcttgtgtctgcatctagtgtagcctgagcttctgattagttattaatttatttcagtccgttggatcttgcgtcctggtatagtctgtgaaaggtctcgacggagattcatttggatttatttaatagtctggatgatatggtaatgtttgtgtgggtgtgtgcgtgacagagaaggttttacccttccctctgcactaggtatggcaaagaggaaattctccacaggtcctacgaacgcttgtggtggccatttcttttccatcttcgttattcgtggggataaatcctatcggaattccaattataattagatagtacttgatttgttattaatataaaacattgtta

SEQ ID NO: 212358 - DNA, 1647 bp, Zea Mays
gttaaagatcgtaatctgacaagcgaatttggttatgctttgagttatcaactcaaggatcaccctattcaaactcctggaaaggatgcgagagttgtcctttccggtgtaagccttaagtatggaattgatttgttggaaagtatccaaagtggccctaagaagaagagcacaaagaagtcactcaaggatgttgtcacagagaatgaatttgaaaaacgtcttcttccagatgtcatccctccagatgagattggtgttacctttgaggatattggagcattagaaaatgtcaaggaaactttgcaggagttagttatgcttcctttgcaaaggcctgagttgttctccaaaggacaacttatgaagccatgtaaagggatattgctttttggtccacctggcaccggtaagaccatgcttgccaaagctgttgcaacagaggctggtgctaattttatcaacatatcaatgtcaagcattgcttcaaagtggtttggagagggagaaaaatatgtgaaagctgttttttcacttgcaagcaaaatttctcctagtgttattttcgtggatgaggttgatggcatgctgggtagacgtgagaatccaggggaacatgaggccatgcgcaagatgaaaaatgagtttatggtgaactgggatggtcttaggacaaaagacaaagaacgtgttctggtacttgctgccactaataggccatttgatcttgacgaggctgttgtcaggaggctccccaggaggttgatggttaacttgccagatgcacccaacagaaagaagattcttagcgtgatactagcaaaagaagatttggcagatgatgtagatctggaggcgttagcaaacctgacagatgggtattcaggcagtgatctgaagaacctgtgtataactgcagcacatcgtcccataagggaaattcttgaaagagagaagaaggagagaaccttagctgaagcagaaaataggccagccccacctcagtgctgtagcggcgacgttcgctccctaaagtttagtgatttcaagcacgcacatgagcaggtttgtgcgagtatatcatcggattcaaaaaatatgaatgagctcgttcaatggaacgacctctacggagaaggcgggtcgaggcacaagacaccgttgagctactttatgtagcctaacgtttttttagatgatttgtacatacagaagcagcctttgtataggtgtgtttccagttaattttgctggaaacatttattcatgtcgggtttcgtttctataatcatatcagcttgtgtctgcatctagtgtagcctgagcttctgattagttattaatttatttcagtccgttggatcttgcgtcctggtatagtctgtgaaaggtctcgacggagattcatttggatttatttaatagtctggatgatatggtaatgtttgtgtgggtgtgtgcgtgacagagaaggttttacccttccctctgcactaggtatggcaaagaggaaattctccacaggtcctacgaacgcttgtggtggccatttcttttccatcttcgttattcgtggggataaatcctatcggaattccaattataattagatagtacttgatttgttattaatataaaacattgtta

SEQ ID NO: 212359 - DNA, 583 bp, Zea Mays
tggtcctggatggagtgagtacagagtcgagtgatcaagaccaagagcgttgagtacatgcccttcctcctgtcgctggtgagcttcctcaacggctgctgctggacggcctacgcgctcatccgcttcgacctctacgtcacgatcccgaacgccctgggcgcattcttcggcctcgtccagctgatcctctacttctgctactacaagtcgacccccaagaaggagaagaacgtggagctgcccaccgtctccagcaacgtcggcggcggcaacgtcaccgtcagcgttgagcgatagatgatgtagctgccgccgcccgtcgagaacgaactcgacgagacgtgctttacccacaagtagttttggccttgtctaattgctcttctcggatgatcgtttaagtgagtgttagttagttttgccctgcgtgtgatgtcaggaacaattaatatatccatgtggctgtgtttgccattctagataattaagaacaatcgtatctgattgctaccacttatcccttctttctgcatcattatcctagagtgaggatggatctagatattgcattgctaatttt

SEQ ID NO: 212360 - DNA, 2207 bp, Zea Mays
cctgcgcccacggacggtccccccaccacgtccaccccgctccgctcgccaccaccgcgttcgccgctgccgcacatcaacgcgtcgatgccacccgggcacccggccgagatagcctccttcctcccccgaaccgccacgtccgcttccaaagccgtcgccgtctccgcctcctccctggtgcccgcgcccgcaagatcccgccgttgtcgtctccgtctcctccccctgcccacaactcgcaggatcccaccgtcaccgtctttctgggattcaattctgctctcaatttcttaatatgttcgggcatgttttgtttcacctgatgcctgtgcctagttgagcgagtgcatggacctagacatcacagtggaattctggtcccttcaggcgctgcgcagtttcttctcctcctaccagacatctagcactggacctaaactagacgagcacttcgtcatgagcaacaaccacgccgcgcgcgcacaatattttttccagcaaatggaagtaaattttttgtgttgattcagtcacccatttgttgtgttttctccaaatactctaagttggactgattgatttcagatctgtttgtttaaagttcatctattccagctttataacctagtttgtataaactcatctggtcaacaaaaagaccaagttataatccagtcgcaagcacctacgcccgcccacccgcaacgctcaatattcctatgcctgcaggctgcaaatgaagaacgattacgtgaagagtttgtgagggaaagcagaaagcttcctccaaagcagcaatcacaaacatgtgattcaaatgttattactccaaggactgaatttatggctgttttatcagttgctttggagtgttacatccatcttagattgaattatgatcatgaatggaaacaaaacaaagttattttatccgatgccaatgttcctggtgaacgggatctgtctggttttaacccaaatccattgcctgtatggcctggacgtatatctgatcatgctagctttgcagacacatgaagtgggacatctagcagcaaaatgtgaaggaaaggtgaaaatgaaagctggggagttttgatgagaaggctgatgctattgttcccaagaagccatatcaggttatttgtctattgtacaacatgtggtagtgtgtgtgtgtgttgggggggttcgcgccctcactcacgatcaatgacccgactctttccctctcttcccctcctctgccacgagccctaacccacttgaagcacaacatgatccatgtgagttgtgctttggcctgcattagggatcagcaacttcgcacgcgacgaaatgaaccgccacgactgcgttgggatcaacttcgcacgcggcgatattatttcagtgtcgtgttttttacttcacatgaaaatcttattttgtagtatataaaatgttaggttgtagtataaaaaattatacagcaacaaacaatcacatatctagtaatttagttgtcatgtatagtaaattgtaattttcagcagattacagttttaaatcaataatagatactaggaatgtttagtagcagagattattattcaggcagtttgctgtcatagttccatgtagctcaatctcaaattgtagaggtgaaacatacagcagggttgccttgtatctatagaaatgaacttgcagcaattatgtaagcaacgtatcccaatgtacccgcacgcatatcagaatgaaagcccaatgtaccgtggaatggcagcaaagaaaaaaaatccagcaatggaccttgttgaggaacagaaatgtcctacaaattttgtcttcatttctttaaatgttgccagctactctccaatacatattacatggttacctcattacatataacatggttacctcatggtctatataaggaaccttaaacctaaatgcgcacagcttcagttgctctacttgtttttagaggattcacctttagatgagttgaatattatcataatacttgtctatatgtaagtaatatagaaatctgccacaacatatttccttacaacataaaagaaaagagggtcatatttgtgatctaaaagaattttgatagtcataactcaccgtccccttttcgatagacttaggatcttttttataatttttcaccatataatacaaaattgttcaatggaggctaaggtata

SEQ ID NO: 212361 - DNA, 2242 bp, Zea Mays
aatattgttaaaatggatacgcacgagggcaggagaggcgaaggtaaaggcatagagaccccaaacttaaatccaaaataaactacaggaagagaggaagggacgacaggagagtcattaagtaaatccacttgttgtctgattagggtaggaaatgatgtctgaaagtgacgagcacggctcgctcctagacaagatcaacgagaagatccacgagtacaagcactcatcgtcgtcttcctcgtcagactcagatgatgacaagaagtccaaaaagtctaagaagaagaagaagctctttgggaggaaacatccattgcatcacgttcttggaggaggcaaagccgccgatcttgtgctgtggaggaacaaacaggcatccgggagcatcttggcaggggtgactgtgatctggctgctgtttgagggcatcggctaccacctcctcaccttcctctgccacgcactgattgtgtttctcaccgtctggttcgtctggtctaatgttgcgtcctttgtcaacaggtctcctccaaagtttccagaggtgattctatctgaagcccaatgcctgaaggtagctcatattgcaaggaaagaaatcaacgaggctttctatacattgcgcaatgtcgcttctggaaaagatttgaaaacgtatctgatgtcaattgcagtgctttggttcatttcgataattggaagctgcttcagcttcttgactgtgtcttacactattttcctgatggcatacactctgccaatgttatatgaaaaatacgaagatcaagttgatgttgtgggtgagaaggcccttattgagataaaaaagcagtacaaagtgattgatgcgaagcttatctctaagatcccaatgttgtctgagaagaaacaacattgaaactgcgctacagaggatagttcaggctatgaatacacgtccatgaagaacctcaacgaggccaagtatggattctggggcacacttgcgcggaaggcaaagtcatttcttgacgaggactgctccccggagcagtacaaatcgccaagagatgatgtgcatgttggtgtccagcttccacattcaaaacaattgccaggagagacgtggaaacctgagacacctccatctcagaagagatctgagtctataacttcctcccttacctatattggaggcacaataaaaaatgcacttgaagaaggtcggaccattgtagagaataaaacggctgacattattcaggagacgcgtaaactgaacataagaagaaaaggagctggtctaaatacacaaggagaagctggccacaaaattgctcaaagacaccttcctcaaaatccacttgaccatgaaactcagttgaaggcatctcgcgacgttgcaaatgccatggctgcaaaagcaaagttgctattgcgggagctgaaaactgtgaaggcagatttagcttttgcaaaggaacgatgtgctcagcttgaagaagagaataaaatgttgcgtgagagttatgacaagggtgataatccagaagatgatgatctgatccgcctccagttggaaacactactagctgagaaagcacggcttgcgcatgagaactcagtatatgcacgagaaaacagattcctgcgggaaatagttgagtatcaccagctcactatgcaggatgtcatatatgtagacgaaggcatcgaagaggtcaccgaggtgtaccctacacaagtactacctcgcactgggtcgagcgtcagtcgtgcagccactgcagctacaccgaaatctgctccgacgtcaacataatcttgccctgtcgtacaagcttctacaaatacactttttcgcggtcatctctgagcaatagatcaaagcgcccacctccaaccttcacggaagagtaaggtggttgtttggttgtgacgggaccacatagtttatgctgctactgttcaatgtaaacaaggattcactgttgttatgcctgtttgttgtcgtgactgagctgtggcgaaatatgaatgaacagtagcttctgactttctatatatattgtctcttaaccgcatttatggtcagggactcatggttatattatatagtctcttaattgtctcttatacttggaaaaataatgtacatgctctaagaagtggtattggacgacaaatagtcatgggaatgcattgttgtcagctactaatgtgttaaaaagaatggaagtaaaatgatttcatgtttgac

SEQ ID NO: 212362 - DNA, 3651 bp, Zea Mays
ctcggcgctgctcactcgcgctccacgcccacgcccacgcccaccgccccccgctatttatgcgtacttgcttgccgggagagtcgccggagagctgggcgtcctcctcccgttccagagcctcactgcttcgctccacccacccttaagcaagagtggtatctggtggttttgtttttcaaaagaagacagaaatgtcttccttgaggcctgcccagtcttctagttcatccagcaggactcggcagagctcccaggcacggatactagcacaaacaacccttgatgctgaactcaatgcagagtatgaagaatctggtgattcctttgattactccaagttggttgaagcacaacggagcactccacctgagcagcaagggcgatcgggaaaggtcatagcctacttgcagcatattcaaagaggaaagctaatccaaccattcggttgcttgttggcccttgacgagaagagcttcagggtcattgcattcagtgagaatgcacctgaaatgcttacaacggtcagccatgctgtgccgaacgttgatgatcccccaaagctaggaattggtaccaatgtgcgctcccttttcactgaccctggtgctacagcactgcagaaggcactaggatttgctgatgtttctttgctgaatcctatcctagttcaatgcaagacctcaggcaagccattctatgccattgttcatagggcaactggttgtctggtggtagattttgagcctgtgaagcctacagaatttcctgccactgctgctggggctttgcagtcttacaagcttgctgccaaggcaatctctaagattcaatcgctaccaggtggaagcatgcaggccttatgcaataccgtggttaaggaagtcttcgaccttacaggttatgacagggttatggcttacaagttccatgaagatgagcatggggaggtctttgctgagatcaccaaacctggtattgagccctatctaggcctgcactatccggccactgatatccctcaagctgccaggtttctcttcatgaagaacaaagtcaggatgatctgtgattgccgtgcaagatcggtgaagattattgaagatgaggcgctctccattgatattagcttgtgtggttcaactcttagagcaccacatagctgtcaccttcagtatatggaaaacatgaactcgatcgcatcccttgtcatggctgttgtggttaatgaaaatgaagacgatgacgaacccgagtctgaacaaccaccacaacagcagaagaggaagaaactgtggggtctcattgtttgccaccacgagagccccagatatgtgccgtttccactgcggtatgcctgtgaattcttggcccaggtgtttgctgtccatgtaaataaggagtttgaattggagaagcagatacgagagaaaagcattctgcgaatgcagacaatgctctctgacatgctattcaaggaatcatctcccttgagtatcgtatccgggagtccaaatatcatggacctcgttaagtgtgatggtgctgctcttttgtatggggacaaagtatggcggcttcaaacggctccaactgagtctcagatacgtgatattgccttctggctttcagaagttcatggggattccactggcttgagcactgatagcctccaggatgctggatatccaggagccgcttcccttggtgacatgatctgtggaatggcagtggctaagatcacgtccaaggacattcttttctggttcaggtcacatacagctgctgaaatcaagtggggaggtgcaaagcatgatccatctgatgaggatgacagcagaaggatgcaccctaggctgtcctttaaggctttcctcgaggttgtcaagatgaagagtttgccatggagtgactacgagatggatgctattcactcgttgcaacttattcttagaggtacactgaacgatgccttgaagccggcccagtcatctggtttagataaccagattggtgatctcaaacttgatgggctcgccgaactgcaagcggtgacaagtgaaatggttcgcctgatggaaacggcaactgttccgatcttggcggtagatggcaacggattggtcaacggatggaaccaaaaggtggcggacttgtcggggttgcgagttgatgaagctataggaagacacatacttacacttgtggaggattcttctgtaccaattgttcagaggatgctatacttagctctgcagggcagagaagagaaggaggttcgatttgagttgaaaacccatggctccaagagggacgatggccctgttatcttggttgtaaatgcttgtgccagccgtgacatgcatgaccatgttgttggggtgtgctttgtagcccaggatatgactgttcataagttggtcatggacaaatttacccgggttgagggggactacagggccatcattcacaacccgaacccgctcattcctccgatatttggcgccgaccagttcggatggtgctctgagtggaacgcagccatgaccaagcttactgggtggcacagagatgaggtgatcgacaggatgctccttggcgaggttttcgacagcagcaatgcttcctgccttctgaagagcaaagacgctttcgtacgtctttgcattatcatcaacagcgcattagctggtgaagaggcagagaaggctccaatcggtttctttgaccgcgatggcaaatatattgagtgccttctgtcagtgaacagaaaagtgaatgcagatggcgtcgtcaccggagtgttctgtttcattcatgttcctagtgatgacctccagcatgcgctacatgtgcagcaagcctctgagcagacagcactgagaaggctgaaggctttctcgtacatgcgacatgccatcgacaaacctctctcaggtatgctctattctagggaaacactcaagggcacagacctggatgaagagcagatgaggcaggttcgtgtcgcggataattgccatcgccagctaaacaagatactcgccgacttagatcaagataacattactgacaagtcgagttgcttggatttggacatggctgagtttgtgctgcaagacgtggtggtgtctgctgtaagtcaagtactgataggttgccagggtaaaggcatcagagttgcttgcaacctgccggagagatccatgaagcaaaaggtttacggggatggtatacggctccagcagatcctctccgacttcttattcgtttcggtgaaattctctcctgctggtggctctgttgatatctcttccaaactgaccaagaacagcattggcgaaaaccttcatctcatagacttcgaacttaggatcaagcaccaaggagcaggagtcccagcagaaatactgtcacagatgtatggggaggacaatagagaacagtcggaggagggcttgagcctccttgtttctagaaaccttctgaggctcatgaatggcgacattcgtcacctcagggaagctggcatgtcaaccttcatcctcactgctgaactcgctgctgctccttcagcagctggacattgaagccgtcactgcaaacaagtgccaaatgagttctctgaacttcagtttgccgagaggcttc

SEQ ID NO: 212363 - DNA, 3883 bp, Zea Mays
cacctagccgtcgactcggcgctgctcactcgcgctccacgcccacgcccacgcccaccgccccccgctatttatgcgtacttgcttgccgggagagtcgccggagagctgggcgtcctcctcccgttccagagcctcactgcttcgctccacccacccgtatggaaagacgaaaaggaaaacaaatcatttcacggtgctaggatttggtattttctatatttcctcaagttaagcaagagtggtatctggtggttttgtttttcaaaagaagacagaaatgtcttccttgaggcctgcccagtcttctagttcatccagcaggactcggcagagctcccaggcacggatactagcacaaacaacccttgatgctgaactcaatgcagagtatgaagaatctggtgattcctttgattactccaagttggttgaagcacaacggagcactccacctgagcagcaagggcgatcgggaaaggtcatagcctacttgcagcatattcaaagaggaaagctaatccaaccattcggttgcttgttggcccttgacgagaagagcttcagggtcattgcattcagtgagaatgcacctgaaatgcttacaacggtcagccatgctgtgccgaacgttgatgatcccccaaagctaggaattggtaccaatgtgcgctcccttttcactgaccctggtgctacagcactgcagaaggcactaggatttgctgatgtttctttgctgaatcctatcctagttcaatgcaagacctcaggcaagccattctatgccattgttcatagggcaactggttgtctggtggtagattttgagcctgtgaagcctacagaatttcctgccactgctgctggggctttgcagtcttacaagcttgctgccaaggcaatctctaagattcaatcgctaccaggtggaagcatgcaggccttatgcaataccgtggttaaggaagtcttcgaccttacaggttatgacagggttatggcttacaagttccatgaagatgagcatggggaggtctttgctgagatcaccaaacctggtattgagccctatctaggcctgcactatccggccactgatatccctcaagctgccaggtttctcttcatgaagaacaaagtcaggatgatctgtgattgccgtgcaagatcggtgaagattattgaagatgaggcgctctccattgatattagcttgtgtggttcaactcttagagcaccacatagctgtcaccttcagtatatggaaaacatgaactcgatcgcatcccttgtcatggctgttgtggttaatgaaaatgaagacgatgacgaacccgagtctgaacaaccaccacaacagcagaagaggaagaaactgtggggtctcattgtttgccaccacgagagccccagatatgtgccgtttccactgcggtatgcctgtgaattcttggcccaggtgtttgctgtccatgtaaataaggagtttgaattggagaagcagatacgagagaaaagcattctgcgaatgcagacaatgctctctgacatgctattcaaggaatcatctcccttgagtatcgtatccgggagtccaaatatcatggacctcgttaagtgtgatggtgctgctcttttgtatggggacaaagtatggcggcttcaaacggctccaactgagtctcagatacgtgatattgccttctggctttcagaagttcatggggattccactggcttgagcactgatagcctccaggatgctggatatccaggagccgcttcccttggtgacatgatctgtggaatggcagtggctaagatcacgtccaaggacattcttttctggttcaggtcacatacagctgctgaaatcaagtggggaggtgcaaagcatgatccatctgatgaggatgacagcagaaggatgcaccctaggctgtcctttaaggctttcctcgaggttgtcaagatgaagagtttgccatggagtgactacgagatggatgctattcactcgttgcaacttattcttagaggtacactgaacgatgccttgaagccggcccagtcatctggtttagataaccagattggtgatctcaaacttgatgggctcgccgaactgcaagcggtgacaagtgaaatggttcgcctgatggaaacggcaactgttccgatcttggcggtagatggcaacggattggtcaacggatggaaccaaaaggtggcggacttgtcggggttgcgagttgatgaagctataggaagacacatacttacacttgtggaggattcttctgtaccaattgttcagaggatgctatacttagctctgcagggcagagaagagaaggaggttcgatttgagttgaaaacccatggctccaagagggacgatggccctgttatcttggttgtaaatgcttgtgccagccgtgacatgcatgaccatgttgttggggtgtgctttgtagcccaggatatgactgttcataagttggtcatggacaaatttacccgggttgagggggactacagggccatcattcacaacccgaacccgctcattcctccgatatttggcgccgaccagttcggatggtgctctgagtggaacgcagccatgaccaagcttactgggtggcacagagatgaggtgatcgacaggatgctccttggcgaggttttcgacagcagcaatgcttcctgccttctgaagagcaaagacgctttcgtacgtctttgcattatcatcaacagcgcattagctggtgaagaggcagagaaggctccaatcggtttctttgaccgcgatggcaaatatattgagtgccttctgtcagtgaacagaaaagtgaatgcagatggcgtcgtcaccggagtgttctgtttcattcatgttcctagtgatgacctccagcatgcgctacatgtgcagcaagcctctgagcagacagcactgagaaggctgaaggctttctcgtacatgcgacatgccatcgacaaacctctctcaggtatgctctattctagggaaacactcaagggcacagacctggatgaagagcagatgaggcaggttcgtgtcgcggataattgccatcgccagctaaacaagatactcgccgacttagatcaagataacattactgacaagtcgagttgcttggatttggacatggctgagtttgtgctgcaagacgtggtggtgtctgctgtaagtcaagtactgataggttgccagggtaaaggcatcagagttgcttgcaacctgccggagagatccatgaagcaaaaggtttacggggatggtatacggctccagcagatcctctccgacttcttattcgtttcggtgaaattctctcctgctggtggctctgttgatatctcttccaaactgaccaagaacagcattggcgaaaaccttcatctcatagacttcgaacttaggatcaagcaccaaggagcaggagtcccagcagaaatactgtcacagatgtatggggaggacaatagagaacagtcggaggagggcttgagcctccttgtttctagaaaccttctgaggctcatgaatggcgacattcgtcacctcagggaagctggcatgtcaaccttcatcctcactgctgaactcgctgctgctccttcagcagctggacattgaagccgtcactgcaaacaagtgccaaatgctgcccagctccctcagagttcattcggaaagcaacggtggttcgcggagaatgggaaatgctgcagcctgtaggatcaccgaatgcataagaaataagattgacttgtatggttgtttgttaggcggggaagttgtgcaggcataagttctctgaacttcagtttgccgagaggcttc

SEQ ID NO: 212364 - DNA, 3906 bp, Zea Mays
aacgaagtggcgcctcgaatcagcgctcgacacctcccgctgcgcccccatccgcgccgggcaggcatgggcaccgccgggtcggcgcgcgcccccacctagccgtcgactcggcgctgctcactcgcgctccacgcccacgcccacgcccaccgccccccgctatttatgcgtacttgcttgccgggagagtcgccggagagctgggcgtcctcctcccgttccagagcctcactgcttcgctccacccacccttaagcaagagtggtatctggtggttttgtttttcaaaagaagacagaaatgtcttccttgaggcctgcccagtcttctagttcatccagcaggactcggcagagctcccaggcacggatactagcacaaacaacccttgatgctgaactcaatgcagagtatgaagaatctggtgattcctttgattactccaagttggttgaagcacaacggagcactccacctgagcagcaagggcgatcgggaaaggtcatagcctacttgcagcatattcaaagaggaaagctaatccaaccattcggttgcttgttggcccttgacgagaagagcttcagggtcattgcattcagtgagaatgcacctgaaatgcttacaacggtcagccatgctgtgccgaacgttgatgatcccccaaagctaggaattggtaccaatgtgcgctcccttttcactgaccctggtgctacagcactgcagaaggcactaggatttgctgatgtttctttgctgaatcctatcctagttcaatgcaagacctcaggcaagccattctatgccattgttcatagggcaactggttgtctggtggtagattttgagcctgtgaagcctacagaatttcctgccactgctgctggggctttgcagtcttacaagcttgctgccaaggcaatctctaagattcaatcgctaccaggtggaagcatgcaggccttatgcaataccgtggttaaggaagtcttcgaccttacaggttatgacagggttatggcttacaagttccatgaagatgagcatggggaggtctttgctgagatcaccaaacctggtattgagccctatctaggcctgcactatccggccactgatatccctcaagctgccaggtttctcttcatgaagaacaaagtcaggatgatctgtgattgccgtgcaagatcggtgaagattattgaagatgaggcgctctccattgatattagcttgtgtggttcaactcttagagcaccacatagctgtcaccttcagtatatggaaaacatgaactcgatcgcatcccttgtcatggctgttgtggttaatgaaaatgaagacgatgacgaacccgagtctgaacaaccaccacaacagcagaagaggaagaaactgtggggtctcattgtttgccaccacgagagccccagatatgtgccgtttccactgcggtatgcctgtgaattcttggcccaggtgtttgctgtccatgtaaataaggagtttgaattggagaagcagatacgagagaaaagcattctgcgaatgcagacaatgctctctgacatgctattcaaggaatcatctcccttgagtatcgtatccgggagtccaaatatcatggacctcgttaagtgtgatggtgctgctcttttgtatggggacaaagtatggcggcttcaaacggctccaactgagtctcagatacgtgatattgccttctggctttcagaagttcatggggattccactggcttgagcactgatagcctccaggatgctggatatccaggagccgcttcccttggtgacatgatctgtggaatggcagtggctaagatcacgtccaaggacattcttttctggttcaggtcacatacagctgctgaaatcaagtggggaggtgcaaagcatgatccatctgatgaggatgacagcagaaggatgcaccctaggctgtcctttaaggctttcctcgaggttgtcaagatgaagagtttgccatggagtgactacgagatggatgctattcactcgttgcaacttattcttagaggtacactgaacgatgccttgaagccggcccagtcatctggtttagataaccagattggtgatctcaaacttgatgggctcgccgaactgcaagcggtgacaagtgaaatggttcgcctgatggaaacggcaactgttccgatcttggcggtagatggcaacggattggtcaacggatggaaccaaaaggtggcggacttgtcggggttgcgagttgatgaagctataggaagacacatacttacacttgtggaggattcttctgtaccaattgttcagaggatgctatacttagctctgcagggcagagaagagaaggaggttcgatttgagttgaaaacccatggctccaagagggacgatggccctgttatcttggttgtaaatgcttgtgccagccgtgacatgcatgaccatgttgttggggtgtgctttgtagcccaggatatgactgttcataagttggtcatggacaaatttacccgggttgagggggactacagggccatcattcacaacccgaacccgctcattcctccgatatttggcgccgaccagttcggatggtgctctgagtggaacgcagccatgaccaagcttactgggtggcacagagatgaggtgatcgacaggatgctccttggcgaggttttcgacagcagcaatgcttcctgccttctgaagagcaaagacgctttcgtacgtctttgcattatcatcaacagcgcattagctggtgaagaggcagagaaggctccaatcggtttctttgaccgcgatggcaaatatattgagtgccttctgtcagtgaacagaaaagtgaatgcagatggcgtcgtcaccggagtgttctgtttcattcatgttcctagtgatgacctccagcatgcgctacatgtgcagcaagcctctgagcagacagcactgagaaggctgaaggctttctcgtacatgcgacatgccatcgacaaacctctctcaggtatgctctattctagggaaacactcaagggcacagacctggatgaagagcagatgaggcaggttcgtgtcgcggataattgccatcgccagctaaacaagatactcgccgacttagatcaagataacattactgacaagtcgagttgcttggatttggacatggctgagtttgtgctgcaagacgtggtggtgtctgctgtaagtcaagtactgataggttgccagggtaaaggcatcagagttgcttgcaacctgccggagagatccatgaagcaaaaggtttacggggatggtatacggctccagcagatcctctccgacttcttattcgtttcggtgaaattctctcctgctggtggctctgttgatatctcttccaaactgaccaagaacagcattggcgaaaaccttcatctcatagacttcgaacttaggatcaagcaccaaggagcaggagtcccagcagaaatactgtcacagatgtatggggaggacaatagagaacagtcggaggagggcttgagcctccttgtttctagaaaccttctgaggctcatgaatggcgacattcgtcacctcagggaagctggcatgtcaaccttcatcctcactgctgaactcgctgctgctccttcagcagctggacattgaagccgtcactgcaaacaagtgccaaatgctgcccagctccctcagagttcattcggaaagcaacggtggttcgcggagaatgggaaatgctgcagcctgtaggatcaccgaatgcataagaaataagattgacttgtatggttgtttgttaggcggggaagttgtgcaggcataagttctctgaacttcagtttgccgagaggcttc

SEQ ID NO: 212365 - DNA, 3346 bp, Zea Mays
cgcgtgtgagggcgggagagcgcgcggggctagggtttccacgggtgatggaagcagaggctgccgcggcggtagtggcgtcgtccgcatctgcctcggcttccgcgggccggtctcgcccatctagcagcgccgcccaggtcaccagtaattcggctgtgcgagctggagaagaaaatgctgcctccctctatgttttatctgttattgactcgttaaaaaagaggattaccgcagatcgtttgacttacattaagaataggataggggagaacaagactaatatcagcagctatacacagaggacttacaatttatcaaaaaataggcaaattagtacatcaaagggtactgattcagcatcaaatttgctcacaaaaaggcaagatgatgcgctatgcaccctgcatagtcttgatattattccggttgacaaagatggtggtacttttcaagacgaaagtcctttctcttcatctaatgttatgtttggtggaaatcttggtcccaagaatgctattattagaccaattaaactaccagaagtgccaaagcttccaccttatacaacatggatatttttggacaggaaccaaaggatgacagaagaccaatctgtacttggtcgacggaggatttactatgataccagttgtggtgaagctctaatttgcagtgatagtgaagatgaagccattgaagatgaggaggaaaaaaaggaatttaaacattctgaagatcacattattcgttcaagaatgtggcatgtctgatgctgtactgcaaacgctagctcgacacatggagcgggctgctgatgacataaaggccaggtatgaaattctgcatggtgagaaaactaaggattcttgcaagaaagggactgagcataatgtcaaagtggaagatttgtactgtgacaaagatttggatgcagcattggattcttttgacaatctcttctgtcgacgatgtctagtacgcttgactgtaactttcagatattcttttctaggacctgtgtgctgatggacatttctgctcattggtgatgctgataggtgtttgattgcaagctacatgggtgttctcaagatttagtatttcctacagaaaaacaaccagcttggagtggcgttgatgacagtgtaccctgtggtattcattgccataaactggcatctgaaccagatgctgctgctggtgctgatcacatgctttttgatgttgaggagccaactcactcatcagacaatgtgatgaaccagccaggttcaaataggaaaaagaacggctccagtggaaggaagactaaatctcaacaaagtgaaagctcttcaactgcaagagttatctcagaaagcagtgattcggaagtacatccaataagcaataaatctccacaacactcccctagtccctcaaaagttaaaattgggccgaaaggtggaatcagaaagattaccaatagacgaatcgctgagagaattcttatgagtgtgaagaaaggacaaagggaaatggcatcatctgattctaattttgttagtggatatcttttggcaagggacatgaagcttaggtctgatacacgaaatggaaataaggaattaattgtatcctcacaacagagttctccaagcacaagaagttccaaaaagaagagtacacctcaaattgggaacagctcagcttttgctgaggctcataatgattcaacagaggaagcaaataaccgtcattcagcaacagatggttacgatagttcaaggaaagaagaattcgtcaatgagaatttatgcaagcaggaggtgtacttgagatcatggaaggcaattgagcagggacttcttgtgaaaggattagagatttttggaaggaacagttgtttaattgctcggaaccttcttggtggaatgaagacgtgcaaagatgtttttcaatatatgaattatattgaaaacaacagtgcctctggagctcttagtggtgttgattctcttgttaaaggatatattaagggtactgagttgcgcacaagatcaagatattttagaaggcgaggtaaagtccgtcgtttgaagtacacctggaaatctgcaggttacaatttcaaaaggattaccgaaaggaaggatcagccttgtcgacaatataatccttgtggttgtcaatctacatgcggaaagcagtgtccatgtctttcaaatgggacatgttgtgagaaatactgtgggtgtccaaaaatttgcaagaatcgttttcgaggatgtcactgtgcaaagagccagtgtcgcagccgccaatgtccatgttttgcagctgacagggaatgcgatccggatgtttgcagaaactgttgggttgggtgtggtgatggtacattgggagttccaaaccagagaggagataattatgaatgccggaacatgaaactgcttcttaaacaacaacaaagggtcttacttggaagatcagatgtctctggctggggagcattcctcaagaatagtgttagcaaacatgaataccttggtgagtacactggggaactaatctcacacaaagaagcagataagcgtggaaagatatatgatcgtgagaactcatcgttccttttcaacctgaacaatgagtatgttcttgacgcatacagaatgggtgacaagctgaaatttgccaaccatgcccctgacccgaattgctatgccaaggttatcatggtaactggtgatcatagagtgggcatattcgccaaagaaagaatcctcgctggtgaagagttattctacgattaccgctatgagcctgacagagctcctgcttgggcccgtaagcctgaggcgtcgggagcaaaggatgatgggcaaccgttcaatgggcgtgcaaagaagctcgcccaaaacaaccgaggctgaatctgatttgattctttcattgttaggacaaatttggcagccattcaactaatacaaggaacctgtcattcataggccccaatttatttgaactcgtcattgtaactcgtatgtgcttgaattctccatggcatctggtcctgccatccgtagagttaggtcccgtttgttttgtttgttttgaggaactaaaaattaatccctctattttagtcacattgagtctctagattgtcaaacggcgggactaaaacaaagactaaactatttgtctctagttcctcaagccatgacttaaagggaataaatcacataaattttatttttatccttcctttatttcagttacactaatgatgtaataattgtatgaggtattttggtcctcttagagcatctccaagtgactcttcattttttgctctcta

SEQ ID NO: 212366 - DNA, 2199 bp, Zea Mays
gaaccaaaagcgccggcatctcaaacccgacggcgctctcttctctatcctctgtcccctccaccaaaaccgacggcgacgtcgctctcctccaccggtgcttggagctctccctccaccagcggcggtccacggacgctcggcgagctccaccggcgggcgctggtcagatccgcttggcagtcatccacctggcacatcggccgaagctcccagcgtcctcctgcaggccgagctgaaggttcagcgcgccggtggagttcgacgacgaaactccgtcacgtcatacctctccgcctcccgtcttccagacgtctccaatcggggctcccagcgtctcggagaagaggagcagcacggcacggcggctgtggcgaggaaggctcctgtcccatcccaacccagttagcagccgcccaaggaggaggagatccaatcggcgtgcgggcgtccgcggtccatccatcgatccaattccaatctgcagaagaagggatcaaggaacagcgaccagagaaaggctgcgtctgctgctgctcctacggctgctgatgctacgaacaagaggcccaggatcaatcctggatccgccactgggcggcaggagggaggccatagagcgggagctgaagaagcttcgggcagagcgggaggagctcgacggccggatacggctgctggaatcgcagctcgaggcagggcctgcgggattcaacggtgcggcagcggggaaaggagtaggggatgatgcgtgcggcgggagtggagcgtgccagagccgcgtgggtaacgggtttgctccggacggtagcctcccggcggatatgatctaccggtacagccgccacctccttctcccggacttcggggtcgaaggccagcggaagctgtcacagtcgtcgattttagttgttggagctggaggtttgggctctcccctggcattgtatctagcagcttgtggtgtcggttgcttgggcattgtggatggtgatgatgttgaattgaataatcttcatcgacagataattcataaagaagcatatgttggacaatctaaagtgaagtcagcagctgatgcttgccgattaattcctctatcaaggtagtagagcatcaccatactctgaagccatgcaatgctttggagattgcacggaaatatgatatagttgttgatgcaactgacaaccttcctactaggtatatgatcagcgattgctgtgttttgctgaacaagccacttgtatctggtgcggcattaggcttagaagggcagttgactgtttatcatcataatggaagcccatgctatcggtgcctctttccaactccaccacctgtggcagcctgccagagatgctcagacagtggtgtccttggggttgttccgggagtgattggttgcttacaagctctggaggctataaaggttgcaactggtgttggtgagcccctatgtggaagaatgctactatttgatgcactctctgctcgtattagagttgttaaacttcgtggaagctctccagattgcacccattgtggcgaaaactccgttttcacagaagaagactttcagaagtttgactatgagagcttcacacagtcaccaatgtctgataaggcagcagcaagcgtgaacgtactcccagagagcgcgcgtatcacttgcagagagtacaagaaactggccgacgatggtgaacctcatctactgctggacgtacgacctgcgcatcacttccagatagcttcgatctctccgtcccacaacatcccgctctccatgctggaagagaagctgcccgcgctcgaagcctcgctgaaggaagcaggggaggggtcagccttggttgtcctgtgtaggagaggcaatgactctcagagagccgtccagcttctccgcgagaagggattcgccaacgcgaaggatatcatcggtgggctgcaggcgtggggacaagacgtcgatcctgatttccctgtgtactagcgagatggaaatggatgcactaccttgtaacagtttggatgccgctagaacgagaactctgatactatgatttgagtactaattttgccataccgtgtacttgcaaaaacaaatatacaactggtatggacacggtattgtgatgaataatgccatggacaaaataaaatttgagtgatatttttttgcaggtttaaattttt

SEQ ID NO: 212367 - DNA, 1776 bp, Zea Mays
gaaccaaaagcgccggcatctcaaacccgacggcgctctcttctctatcctctgtcccctccaccaaaaccgacggcgacgtcgctctcctccaccggtgcttggagctctccctccaccagcggcggtccacggacgctcggcgagctccaccggcgggcgctgccgaagctcccagcgtcctcctgcaggccgagctgaaggttcagcgcgccggtggagttcgacgacgaaactccgtcacgtcatacctctccgcctcccgtcttccagacgtctccaatcggggctcccagcgtctcggagaagaggagcagcacggcacggcggctgtggcgaggaaggctcctgtcccatcccaacccagttagcagccgcccaaggaggaggagatccaatcggcgtgcgggcgtccgcggtccatccatcgatccaattccaatctgcaggccagcggaagctgtcacagtcgtcgattttagttgttggagctggaggtttgggctctcccctggcattgtatctagcagcttgtggtgtcggttgcttgggcattgtggatggtgatgatgttgaattgaataatcttcatcgacagataattcataaagaagcatatgttggacaatctaaagtgaagtcagcagctgatgcttgccgtgagattaattcctctatcaaggtagtagagcatcaccatactctgaagccatgcaatgctttggagattgcacggaaatatgatatagttgttgatgcaactgacaaccttcctactaggtatatgatcagcgattgctgtgttttgctgaacaagccacttgtatctggtgcggcattaggcttagaagggcagttgactgtttatcatcataatggaagcccatgctatcggtgcctctttccaactccaccacctgtggcagcctgccagagatgctcagacagtggtgtccttggggttgttccgggagtgattggttgcttacaagctctggaggctataaaggttgcaactggtgttggtgagcccctatgtggaagaatgctactatttgatgcactctctgctcgtattagagttgttaaacttcgtggaagctctccagattgcacccattgtggcgaaaactccgttttcacagaagaagactttcagaagtttgactatgagagcttcacacagtcaccaatgtctgataaggcagcagcaagcgtgaacgtactcccagagagcgcgcgtatcacttgcagagagtacaagaaactggccgacgatggtgaacctcatctactgctggacgtacgacctgcgcatcacttccagatagcttcgatctctccgtcccacaacatcccgctctccatgctggaagagaagctgcccgcgctcgaagcctcgctgaaggaagcaggggaggggtcagccttggttgtcctgtgtaggagaggcaatgactctcagagagccgtccagcttctccgcgagaagggattcgccaacgcgaaggatatcatcggtgggctgcaggcgtggggacaagacgtcgatcctgatttccctgtgtactagcgagatggaaatggatgcactaccttgtaacagtttggatgccgctagaacgagaactctgatactatgatttgagtactaattttgccataccgtgtacttgcaaaaacaaatatacaactggtatggacacggtattgtgatgaataatgccatggacaaaataaaatttgagtgatatttttttgcaggtttaaattttt

SEQ ID NO: 212368 - DNA, 2020 bp, Zea Mays
gaaccaaaagcgccggcatctcaaacccgacggcgctctcttctctatcctctgtcccctccaccaaaaccgacggcgacgtcgctctcctccaccggtgcttggagctctccctccaccagcggcggtccacggacgctcggcgagctccaccggcgggcgctggtcagatccgcttggcagtcatccacctggcacatcgggtagctcacgcctccgttggcagtcccaccgccgcctggccctcccccagtgcccccggtgatccggaccgcacccgcttgctcggcctaacgaccggctcctgccccgccgcagccgaagctcccagcgtcctcctgcaggccgagctgaaggttcagcgcgccggtggagttcgacgacgaaactccgtcacgtcatacctctccgcctcccgtcttccagacgtctccaatcggggctcccagcgtctcggagaagaggagcagcacggcacggcggctgtggcgaggaaggctcctgtcccatcccaacccagttagcagccgcccaaggaggaggagatccaatcggcgtgcgggcgtccgcggtccatccatcgatccaattccaatctgcagaagaagggatcaaggaacagcgaccagagaaaggctgcgtctgctgctgctcctacggctgctgatgctacgaacaagaggcccagggccagcggaagctgtcacagtcgtcgattttagttgttggagctggaggtttgggctctcccctggcattgtatctagcagcttgtggtgtcggttgcttgggcattgtggatggtgatgatgttgaattgaataatcttcatcgacagataattcataaagaagcatatgttggacaatctaaagtgaagtcagcagctgatgcttgccgtgatcaggattaattcctctatcaaggtagtagagcatcaccatactctgaagccatgcaatgctttggagattgcacggaaatatgatatagttgttgatgcaactgacaaccttcctactaggtatatgatcagcgattgctgtgttttgctgaacaagccacttgtatctggtgcggcattaggcttagaagggcagttgactgtttatcatcataatggaagcccatgctatcggtgcctctttccaactccaccacctgtggcagcctgccagagatgctcagacagtggtgtccttggggttgttccgggagtgattggttgcttacaagctctggaggctataaaggttgcaactggtgttggtgagcccctatgtggaagaatgctactatttgatgcactctctgctcgtattagagttgttaaacttcgtggaagctctccagattgcacccattgtggcgaaaactccgttttcacagaagaagactttcagaagtttgactatgagagcttcacacagtcaccaatgtctgataaggcagcagcaagcgtgaacgtactcccagagagcgcgcgtatcacttgcagagagtacaagaaactggccgacgatggtgaacctcatctactgctggacgtacgacctgcgcatcacttccagatagcttcgatctctccgtcccacaacatcccgctctccatgctggaagagaagctgcccgcgctcgaagcctcgctgaaggaagcaggggaggggtcagccttggttgtcctgtgtaggagaggcaatgactctcagagagccgtccagcttctccgcgagaagggattcgccaacgcgaaggatatcatcggtgggctgcaggcgtggggacaagacgtcgatcctgatttccctgtgtactagcgagatggaaatggatgcactaccttgtaacagtttggatgccgctagaacgagaactctgatactatgatttgagtactaattttgccataccgtgtacttgcaaaaacaaatatacaactggtatggacacggtattgtgatgaataatgccatggacaaaataaaatttgagtgatatttttttgcaggtttaaattttt

SEQ ID NO: 212369 - DNA, 2339 bp, Zea Mays
aatctatacaaagtattttatatgtttgcaattcaataggtttgcaaaaactgaaactctgctgttcactgagtaggtttgcaatgtgaattggttaaagcccatgctgagcataattctatcattggttaaagcctagtgcttaatattctgaaactctgaatctgtgagcaattcatttgttatgcaattgtttagctcatacaattattcagttcattggacttcatatacaattattcagttcatttgacttcattcatttgttatgcagcacaatgtcacctggttacttaacaatacatttgcgctctcagcctactttttgtcgtgccacctgatctcctgctctcgtaccaacaatcataatggtctgcttcttgattagttatagattcttcaaaatcctggtcttcaataggatgctgctgctgctttggtgtgcctgatctctgcacctctttgaaaaaagacagtacaattctatctgtgttggactcgacagagatggaatattggtggcaagttgcacagtgatgaaaaagacatcagcctatatgcttctatgaagcattgaacaggccactgtacacatatgtgatgaggggggaaaaaggagatcgcaaaggatgcagccaatgttacaacaatagtaacctgcatcaaatcagtaatacagttgcaagcacactccgatgaggagagcaatgtggtaggtcataatgcatcatcggtcgtctaggtctgcagcatcagccatctctctcaaggttcctgcacgatccagacattccctgtcggctcttggtctccagtatattgaggctagttcaggacaggaaaaggaaaagaacaagccgggcatgggagtagcgacgacgggcgacggatggcgtcaaatgaccgaaatcctgcagcagttgcaacctacacacggtttaaggctcactgtttggagtctatccttcaatttgggcctaaacaaattgacttgagtagcagtagctaaatcaaaatataaggcccaattatagaactcatgattggagttgttctaatgcatttcggtttccaccactcagactgattaccacacaacatacatagaaaggaaagaatgtgcttagtttcagcaggcctcacccctccaatccaggaacagcagcacgagaagccgaggcagcagctactccgcctcgatgatcttcttgggctctgcgaaccagagaagaagcagccatatagacctatcgatcatgccgatcaaagggtaagacgaggcatgaagggattcggaccgtgtaactcgggcggtcgggcatctttgccccaacccacgccgcgtgtagcctctaggtactggtccacgaggtggcggcacttctggtggtggttgatcccctcgatgcggtagcaccagcggaggcgctcccggatgatcttggcggtctcgatctggatccacttctcccgcaccaggtgttcccggtactccagcatagccaccgggtccgcatatgggttcttcgggtcgaagttatccggtggctgctcatcgaactcaacctttgccttgcgcaccatcttctccgatcgcggccggcggccgcacggtcttccgattgggtgggggtgggggtgggggtgtgggattggtgtggtccgctcggtcggatgggagacggagctgatgggtcgatgagttaattatgcgaaccaggcctgtgggctgttagtcggcccaacagaatgaagcgtaggtgggccaagagacaagcttctgtcgccgactcactgtttcccgaagtctgcactctgcaggcggaaacgccagttcagccacgtggagagggcagatccgagaagagccggcgcgatgagctcgccggcgaggtcgaccatctcggccgccgaagacgtcgctgattccatcgacgcgctctaccgcaaggacgaggccctggctgaactcaagtctgaggtgatggaggcgctgcagagggaggtgaggtctctcgacgaagacaactggatgttcgccgcaccgcggtcccgcatcaacctcgtctccaggcctggtgcttacctgcccaagcaaaacgggaagctctcagagttggggcaagcatccaagaaaacaaggaacttctagggtgtacatgcttgtgcttgcaagaagcctggtccatgactccatgatggtagtgaaggctgtagcatcaaggatgatttgttcatgtttcaaatcaatctggttgcttcctgctaattcaatttcagacacatatatgcatgattgccactttagttggagacagcaaatacatcgataattattg

SEQ ID NO: 212370 - DNA, 750 bp, Zea Mays
ccatcgtctccccggaaaccttgtcgtcaccctctcccgcgaactccgtgtcgatagttccgctcttcggctcgggcgctcggtcgttccgttccccattcttctcgtacgcggccgattgtgaccctcgccctcgcctccccacaccacctaaaatgccctgcctccgcgcccgctcgtcatccccgcgccgcctcgtggacgccccggtcggcgatgtggcgggagcatgcggcccgctcctcaggctcctctcggcgtgcggcggggtctggcccacctcgccggtccccggcgccgcggcctcctcctccaccttctctagggacgactcagaaggcagtgacggcctcctccggggatgactcggaatcgaggccggcccgtgctcgtgaatcctccgtcgggcgcggcgccatcggcgttcctctgctgtgtgatccctaaaaccccgcggtgctctagcgaccccgcgatatgggacgacgacgacgacgggaggcgtttcggccgtgcttcgtggatttatatccttgatttttgtttttgatctcaaggattagctgggaatacgatcgtcgcagttgctgcactcgggctcttcctcgccaagaggaacataaacacacctcaggttgacgaattttcatggatcctcgaggctaattgaaattttgaattctctcaaaaattgttagacgtctcatgaatacggagtcattatataaaagttgaatctcatcaatcgga

SEQ ID NO: 212371 - DNA, 1917 bp, Zea Mays
cttcgagggctgtcgggataggacgggaggcgaaccagcagaagcgcgagcgagcgtgtgggtaacggctcacggcttctctgcaccaccgccgacccgaggagcacacttaggtctacctgcaacctgcatttcctctccctctccctctccctctcggctcctctgcagcaccgccggccacgtcctcgaggaccacactggaggtggatcggcgagctcatgaagatatgctagtcctcttgctgatcctagagcaatcctgagcctcttcttccaatccagttcatcaaaagaaaagaaccttgctcctttcagctgtggagcacctccactatcttttttagcgattccccatgaagctaaaaattgaatatgcatgaggtcaacaggcactctggataattctaccctaaacagatggcagcatgcatcctatatcctcgtcaaatgcaatatatcaaggcttaccatcttgggggttcgtctgaccgaaacttggccggaggtataccaagagcaagaacaggagtagcaactgctgcatcgccgccatgccgagctaggcctccaaacaagttgcagcagaccactgctaacttcgatgggacgatggttatccttggagaagtctatgcaatgaggtagctaatggacgagtcagctgctaccaaatggcgccgctcttcttcctgaggttggaaccaggcaaagcaaatagcgtttcaagcaaaacaaccttgcatcaccagattcagaagaatctctcgtcaattattgcctggtctgcttaccgggtccaagcaatggatatgctcataggaacgcacgtatgcaagggtatgggaggccttaaacaaggctacagagagctcagttgaactgatcaaaacacggaaatggttgaagaaaaaatgtttctgtattcctcgttgatagtggggcagttgcttcttgtcatcttgtggctggggcctcatcggagtatcccttctaagctttgacccggtcatggctattaattaattagattagtacggccacaggtcggacttttgtgccataggcccacagttcagaaacgtgttatgctgcgctactgctgctagcagttatgatgtggatttggcatcatgacaaggatattacgtaaatatacttcggtccccttgaacgcaccacccatcgtgttaccatgaatcggtttgttcttaggagacctgatggttcatgttcagtaaatttgatttgatgatgaggcagggtttctctcacctgcacagacacaaagcttcaaatcgcaagtcagaaagcatgtgcagacgattatactgctctccttgatccttggaagttcgcagatggttcggaaaggcctggccgttctttttttttcccccttttcgcagatgctattcgttcaccaacacgaatgggtccggaaggccaggttttggatgcacctgctcaactggttcctttgtcgggaagcttgccgtgcagataaattttttatgcatgatgttccagaaaatgcagataaaggacggcttccacacagaaggttcgttctgcacggagacaaagtgtggccggcaggctgatgtttgcattggccgatgaaatgaactgttcgcttcaacttaaagtcagttgttgtatctacaatctatagagacaaaacactataagaatagtagaagccggtacgaattaaagcagactgaaagatttctatatagtaattgtccgtcttttctctcccgctctttcagtgcgtggttgcaattttctattatttcttgactgccactgatcccgtcgtatatgttgcctaagtaaatgttggtgaacatagtttggcagtaccttcctttttttcttgtgtggatgatgaaatgcgggtcttggcctctt

SEQ ID NO: 212372 - DNA, 2102 bp, Zea Mays
aaagagcaccacgcccgacaaagaacagaatagtgcacgaagactggccaaaatcatgaatatcagcagaagaatggacagtgccttcattttgagagctacaaacactctgaacctcagggttccacaaagctgttgtgaatgtgaatacttcaaggagtggagctttctaaggtttacaactgatcaccaaagccttggtcttttattgaatgttcccttgagtaggaacaggtaataggtctttggtgccttggtggctcggtgcaagtcacaaactcacaatgctgtcaacacattcctttaaacttttgaacgtggacgtattcgtgacaactggtgtctgttttgttatttaaatttgtgtagcctgctcatccttacaggttgtaacttcatgtcgctgggatacagtttttttttgtcatttttaatacttttgcatttgcatgtcatgtagttgatattgttttttcattgatccagtgtatgctgaggtggactgaaataacgatgtcaatgctttggaagctctgctaatgacatagttactttcattgtttctgcaggtcaacaggcactctggataattctaccctaaacagatggcagcatgcatcctatatcctcgtcaaatgcaatatatcaaggcttaccatcttgggggttcgtctgaccgaaacttggccggaggtataccaagagcaagaacaggagtagcaactgctgcatcgccgccatgccgagctaggcctccaaacaagttgcagcagaccactgctaacttcgatgggacgatggttatccttggagaagtctatgcaatgaggtagctaatggacgagtcagctgctaccaaatggcgccgctcttcttcctgaggttggaaccaggcaaagcaaatagcgtttcaagcaaaacaaccttgcatcaccagattcagaagaatctctcgtcaattattgcctggtctgcttaccgggtccaagcaatggatatgctcataggaacgcacgtatgcaagggtatgggaggccttaaacaaggctacagagagctcagttgaactgatcaaaacacggaaatggttgaagaaaaaatgtttctgtattcctcgttgatagtggggcagttgcttcttgtcatcttgtggctggggcctcatcggagtatcccttctaagctttgacccggtcatggctattaattaattagattagtacggccacaggtcggacttttgtgccataggcccacagttcagaaacgtgttatgctgcgctactgctgctagcagttatgatgtggatttggcatcatgacaaggatattacgtaaatatacttcggtccccttgaacgcaccacccatcgtgttaccatgaatcggtttgttcttaggagacctgatggttcatgttcagtaaatttgatttgatgatgaggcagggtttctctcacctgcacagacacaaagcttcaaatcgcaagtcagaaagcatgtgcagacgattatactgctctccttgatccttggaagttcgcagatggttcggaaaggcctggccgttctttttttttcccccttttcgcagatgctattcgttcaccaacacgaatgggtccggaaggccaggttttggatgcacctgctcaactggttcctttgtcgggaagcttgccgtgcagataaattttttatgcatgatgttccagaaaatgcagataaaggacggcttccacacagaaggttcgttctgcacggagacaaagtgtggccggcaggctgatgtttgcattggccgatgaaatgaactgttcgcttcaacttaaagtcagttgttgtatctacaatctatagagacaaaacactataagaatagtagaagccggtacgaattaaagcagactgaaagatttctatatagtaattgtccgtcttttctctcccgctctttcagtgcgtggttgcaattttctattatttcttgactgccactgatcccgtcgtatatgttgcctaagtaaatgttggtgaacatagtttggcagtaccttcctttttttcttgtgtggatgatgaaatgcgggtcttggcctctt

SEQ ID NO: 212373 - DNA, 1628 bp, Zea Mays
gtccctcctccctcccgcgcacgccgcacgccactccgcactgtcggcgctcaaacacagcgctccaatggctgccaccgatgcctttcccccgctggctataagagcgggccacagctctcaccgccacatgccacccgcattgctctcaacctcggtcaacgatcgtgcctcgtgaatttgctctccgatctgaagcagtagtacactactaacctggcctgtccctgcccgtgtggtgttgttgatcgtgttccatccatccagcactttggcaccatggcgcccgcatggctctccgttcccagcgccgccctctccctcctcgacggccagcgtccccgcgagtgggagtggcttccgctccgaaccgcctgcccgagcggtggccgtcgtgtgcgtgtgccgtgccgccggcccaggacgaccgggttttctgtcgcggcgcagaggaggctggtcgtggcggcggcggcgatggagatgacccctgccgcgggagaaaaggaggcggacgccccgttcaccgaggagatgcgggcggcggccatgcggctgcactccagggaccaggccagggacggcaagaaggaggcgcccctggagccgcccgtcgccaagtggcagaccaccgtcgaggggtacctccgcttcctcgtcgacagcaagctcgtcttccagacgctcgaggccatcgtcgaccgcgccgtcgttccctggtatgccgagttcagggatactggtttagtggtttggagagatcggagccgctcggcagggatctggaatggttcaggcagcaaggtcacgcagttccggaaccatctgctcctggcattgcgtacgcttcctttctggtagagctgtctgagaagaaccccccggcgtttgtttgccatttctacaacgtgtacttcgctcatgctgccggaggccgaatcatcggcaaaaaggttgctgagaagctcagtctgcagaaagagctagagttctacgaatgggagggcgatctgtcgcagctgcagcggaatgtccggtcgaggcttaaccgagtcgcttccggttggtctcgagtagagaaggaccgctgcctgggcgagatggagaaggcgtttacctgttcagttgacctccgccgccatatgtttccctgctgatctaaagttcgttcgttgcctgatgcgatgcgaccataaacgttgtctgtcagtttctgtttacgtgtccactagatccactggatccatgtttagttactattgtccaagatatttactccctccgtttcgttttagttgtcgctggatagtgcaaaattgcactgtccagcgacaactaaaacgaaacggagggaatagtattcagccacccaaatcaccaccattcggcttatttagagctagtttggaaatcacattttttgtgagagattttcatttcccaagggaaaataaactaattttctttcgaaaaatggaaatctcttagaaaaatggattttccaaactagtcttaagtagtagtacaaaaatttacaacgtcttcttttatctaggtcaaggaacggattgacatgattacatgtacggttaaaagtgcagactgcagaggactcactacagtaaaat

SEQ ID NO: 212374 - DNA, 798 bp, Zea Mays
tttaaaaaaaactaacggcagagacgcgtacacggcgttcgatgaatggatggacgcccgccgcccagcaagcattgccattctagcttctctaccctggtaaatatctataactttggtcctacttgtcagctgtcagcgagtcagcgtatcccatgttgtaggctcattccattagctttttatccactcccacagtccaatccacacgaccgccaccaactcacgcagcgtgcttcccttcagaaactcgatggcctgccacctcgccatcgccggcgccaccgccgccgccgcccgcgctcctcgtatctccgtgctcgccgccgcctctgcttcctccgcaggggaacccgcgcgccgcatcatccgccgccgcgcgccgccgggtcagcagggctctgccacagcggcccccgcgcctcccgcccagccgtccgtggcggaggtgcgccgcgccatcggcgtctccgacgacgctgcgtcggccgccgcatccatggagaagaagaacaccgcgttcatggacctcatctctaccacgcccatcggccagccggagagcgagcccgagcgccgcctccgcgaggccgccgagtgggtagtcgacaccactgagacgcgcgcttgcgaaggacagaagtctttcttagtgctatgcatgatgacatttcctgcttggttcttgctcctgtttcttgcccttggactctttaagttaccatttgatattccggttctggataatctcctaatgtatatgtctatgtgttgccacgaggcgagggagcgggtgga

SEQ ID NO: 212375 - DNA, 919 bp, Zea Mays
cttgattcgtatagcacctcacatccaaatatgcaacacatagataaggagaaggtgggaggcacaagaacgaggagatcaagttgcctctgtgcttgatgttggagaagttggtccccgagcagcatgtcgttgccaggtcgttagaagtgttggcccatggtcagcaggaacagctcaaatcgaaggaagcatccataatgcctatttttctcttattgaaaaggcagaacattttgtttacatcgagaatcagtttttcatttcaggtctttcaggggatgacacaattaagaatcgtgtattagaagcactatataggcgcatacttagagcagaaaaagagaaaaggcgcttccgggttattattgtcataccacttttacctggttttcagggtggcattgatgatggtggagctgcgtctgtgagggcaattatgcattggcaataccgaactatttgtagaggacctaattcaattcttaaaaatctgtatgatgtggttggctcgaaggcggatgattatatctcattttatgggcttagagcacatggaagatcagatgatgggggtcctctggtcaccaatcagatatatgtgcacagtaaattgatgattattgatgatcgcatggcattgattggctcagccaacataaatgatagaagcttgcttggatctagggattctgagattggtataattattgaagataaagaggttgtcagttctataatggatggaagaccttgggaagctggaaagttctccctcagcctacgactttctctatgggcagaacaccttggtcttcttccaggagaggttagttgcattatggatcctgtggatgattcagcgtacaaaaacatctggatggccactgctaaggaaccatttgagtgactatctgtc

SEQ ID NO: 212376 - DNA, 3055 bp, Zea Mays
aaacaaacacgagctggctcgagcaggagagaaagaaagagacgagagcgcccgaaccccacttggggcgcccgtgccgatatataatccaatcgaaaccgccacactgttggccgccggcgccagcccgctagtaacctgcttaatttaggcatacgtgagactctgagagaaggtactgaccacacaagggaggccactcccgcccggttcgtccgcgtcgtcgccgatccgtacgcaactcccgtgatccgatccggacgtacggccgctctctctccgggctagctggcgatcgccgactgcatggggccggcggccggcgacggcgaccgcggccccggcgccgcggcggagcacaaggtgaacctgtcggcgcggcagccgttcgtggagtcggtgcggacgtgcctggccgagacgttcttccccgacgacccgttccggggcctggggtcgcgcccgcccgccgcgcgcgcgtggggcgcgctcaagtacttcgtgccggccctggagtgggcgccgcgctacaccgccggcaagttcaagtacgacctcctcgccggggtcaccatcgccagcctcgccatcccgcagggcatcagctacgccaagctcgccaacctcccgcccatcatcggcctctattccagtttcgtgccgccgctgctgtacgcggtgttcggaagctccaacaacctggcggtgggcacggtggcggcggcgtcgctgctgctggcgtccatcatcgagacggaggtcccgccggaggagaacccgcagctgtacctgcagctcttctacaccgccgccttcttcaccggcgtcttccagaccgcgctaggcgtcttcagggctgatagtggatttcctgtcgcggtcgacgatcaccgggttcatgggcggcacggcgacgatcatcatcttgcagcagctcaaggggatgctggggatgaagcacttcacgccaaagacagacctcgtctccgtcatgcgctccatcttctattacaggcacgagtggaggtggcagagtttagttcttggcatatgcttcctcctgctcttgctgttaagcaagcacttgaggaagaagaaaccaaatctgttctgggtgtcggccattgcgcctttcctgatcgtggtcatcggcggcgtcttcgccttcctggtcaaaggagacgagcatggcatcccgatagtcggcgatctgaagaaagggatcaacccgctgtctatttcgcagctgacgtttacagacaagcacgtcaatacggcaatgaaagcggggttcttgtccgggatcctggcgctggcagaagggatcgccgtcggacggagcctggcgctggtaaagaacgagcagatcgacgggaacaaggagatgatcgcattcggcatcatgaacatcgccgggtccttcacttcttgctacctcaccacagggccgttctccaaatcggcggtgaacttccacgccgggtgccggacgcccatgtccaacgtggtgatgtcggtgtgcatcctgctggtgctgctgttcctggccccgctcttcaagtacacccccctggtggcgctctcgtccatcatcgtcgtcgccatgatcgggctcatcaaggtcagggagttctgccacctgtaccgggtcgacaagttcgacttctgcatctgcatggtcgcattcatcggcgtcgtcttcttcaccatggtcatcggcctcagtgcctcggtaggcttgtccgtggtcagggcactgctgcacgtggcgagacctagcacctgcaagctcggaagcgtcgcgggaggcgacatcttccgcgacgtcaggcactacccgcacgcgaggagcgtccccaacgtcctcgttttgcagctgggatctccgatatatttcgtcaatgcaggttacttgcgagaaaggatcttaagatgggcggaagaggaggagaacggcagcaagattgacgggcaagatctgcagtacgtggtccttgatctcgctggtgtgacttccatcgacaacacggggattgggatgctagtcgaggttcacaagagccttgatcgtaaagggatcaggatagcgctgacgaaccccaggctggaggtgacggagaagctggtgctgtctgggtacatcaaggacatcataggggaggagtgggtgttcctcacggtgaaggacgccatcacggcgtgccggtacgcgctccagagatctagaagcaaggatgacggtgaagtatagctagcgtccagggacagtcttttagtaggaattatagttcagtagtagctcatcactagctgtagatattgagaagcaggcaggaaagcaagcatcggaggtccttgtataggagaagattcagagctacgactacgagagattggggtgtggttgcggtgcttgcatgtgttggattattgtgtggcatctggtctctccgtctttgtaagggaaatagcgaggtggctggggataggtagctagcgtttgtgtatagaccagttcagctttgcctgtaccagtttgcaattgcagcacaataggctgtttgaatcgctgaaagggtattgcccttcttcatgcgccgaaggaaccgtggccactgtcagtcttatgtatacaggagttagctgcaggacgagaaggagccacggtcactcaaaaatctcattggctctgttattagcctgtttggctaggctttgacatcccacttcggcatcgggttaagtttggatgatcttatacggaacgactacgttctaggacctgtttttgtggtttaatgggtttgatgcctaggtgacacagtgtgtaaattaaagtaccgctgatgtattttactcgttttcctgcatctatcatgcagttatactgcttactgatgttcatcctaggggacctcgtttcccttctcatgctacggttcttccggaatttatggatcggcgacgtgatagcaattctgaaatgagaataatggcctagtatttcatgacttaatttctatggaactttttttaggttaaggagtttctataa

SEQ ID NO: 212377 - DNA, 2971 bp, Zea Mays
cacgagctggctcgagcaggagagaaagaaagagacgagagcgcccgaaccccacttggggcgcccgtgccgatatataatccaatcgaaaccgccacactgttggccgccggcgccagcccgctagtaacctgcttaatttaggcatacgtgagactctgagagaaggtactgaccacacaagggaggccactcccgcccggttcgtccgcgtcgtcgccgatccgtacgcaactcccgtgatccgatccggacgtacggccgctctctctccgggctagctggcgatcgccgactgcatggggccggcggccggcgacggcgaccgcggccccggcgccgcggcggagcacaaggtgaacctgtcggcgcggcagccgttcgtggagtcggtgcggacgtgcctggccgagacgttcttccccgacgacccgttccggggcctggggtcgcgcccgcccgccgcgcgcgcgtggggcgcgctcaagtacttcgtgccggccctggagtgggcgccgcgctacaccgccggcaagttcaagtacgacctcctcgccggggtcaccatcgccagcctcgccatcccgcagggcatcagctacgccaagctcgccaacctcccgcccatcatcggcctctattccagtttcgtgccgccgctgctgtacgcggtgttcggaagctccaacaacctggcggtgggcacggtggcggcggcgtcgctgctgctggcgtccatcatcgagacggaggtcccgccggaggagaacccgcagctgtacctgcagctcttctacaccgccgccttcttcaccggcgtcttccagaccgcgctaggcgtcttcagcagctcaaggggatgctggggatgaagcacttcacgccaaagacagacctcgtctccgtcatgcgctccatcttctattacaggcacgagtggaggtggcagagtttagttcttggcatatgcttcctcctgctcttgctgttaagcaagcacttgaggaagaagaaaccaaatctgttctgggtgtcggccattgcgcctttcctgatcgtggtcatcggcggcgtcttcgccttcctggtcaaaggagacgagcatggcatcccgatagtcggcgatctgaagaaagggatcaacccgctgtctatttcgcagctgacgtttacagacaagcacgtcaatacggcaatgaaagcggggttcttgtccgggatcctggcgctggcagaagggatcgccgtcggacggagcctggcgctggtaaagaacgagcagatcgacgggaacaaggagatgatcgcattcggcatcatgaacatcgccgggtccttcacttcttgctacctcaccacagggccgttctccaaatcggcggtgaacttccacgccgggtgccggacgcccatgtccaacgtggtgatgtcggtgtgcatcctgctggtgctgctgttcctggccccgctcttcaagtacacccccctggtggcgctctcgtccatcatcgtcgtcgccatgatcgggctcatcaaggtcagggagttctgccacctgtaccgggtcgacaagttcgacttctgcatctgcatggtcgcattcatcggcgtcgtcttcttcaccatggtcatcggcctcagtgcctcggtaggcttgtccgtggtcagggcactgctgcacgtggcgagacctagcacctgcaagctcggaagcgtcgcgggaggcgacatcttccgcgacgtcaggcactacccgcacgcgaggagcgtccccaacgtcctcgttttgcagctgggatctccgatatatttcgtcaatgcaggttacttgcgagaaaggatcttaagatgggcggaagaggaggagaacggcagcaagattgacgggcaagatctgcagtacgtggtccttgatctcgctggtgtgacttccatcgacaacacggggattgggatgctagtcgaggttcacaagagccttgatcgtaaagggatcaggatagcgctgacgaaccccaggctggaggtgacggagaagctggtgctgtctgggtacatcaaggacatcataggggaggagtgggtgttcctcacggtgaaggacgccatcacggcgtgccggtacgcgctccagagatctagaagcaaggatgacggtgaagtatagctagcgtccagggacagtcttttagtaggaattatagttcagtagtagctcatcactagctgtagatattgagaagcaggcaggaaagcaagcatcggaggtccttgtataggagaagattcagagctacgactacgagagattggggtgtggttgcggtgcttgcatgtgttggattattgtgtggcatctggtctctccgtctttgtaagggaaatagcgaggtggctggggataggtagctagcgtttgtgtatagaccagttcagctttgcctgtaccagtttgcaattgcagcacaataggctgtttgaatcgctgaaagggtattgcccttcttcatgcgccgaaggaaccgtggccactgtcagtcttatgtatacaggagttagctgcaggacgagaaggagccacggtcactcaaaaatctcattggctctgttattagcctgtttggctaggctttgacatcccacttcggcatcgggttaagtttggatgatcttatacggaacgactacgttctaggacctgtttttgtggtttaatgggtttgatgcctaggtgacacagtgtgtaaattaaagtaccgctgatgtattttactcgttttcctgcatctatcatgcagttatactgcttactgatgttcatcctaggggacctcgtttcccttctcatgctacggttcttccggaatttatggatcggcgacgtgatagcaattctgaaatgagaataatggcctagtatttcatgacttaatttctatggaactttttttaggttaaggagtttctataa

SEQ ID NO: 212378 - DNA, 2108 bp, Zea Mays
taagcctgcccgtgtcgccctcgcccgccccccaaaccaaagggaaaccctcaccacgcttcccgaaacttctcctttctccatcctcaaccctactccccccttcatccgcacgaacgaagcagcgcgagcgaggagcagacgatccttcccgacctcgaagcgtacccccccttccagccgcagccatggcgaccgtcatgcagaagatcaaggacatcgaggacgagatggcaaggacacagaagaataaagccactgctcaccatcttggtcttcttaaggctaaacttgcaaaattgcggcgggagttgctcactccaacatccaaaggtggtggtggtgcaggtgaaggatttgatgtgacgaagagtggagatgcacgtgttggtttagttggctttccttcggttgggaaatcaacattgttgaacaagctaacagggacattttcagaggttgcttcctacgagtttacaactttaacatgtattcctggagttatcatgtataagggtgctaaaatccagcttctagatctcccagggatcatcgaaggtgctaaagatggaaagggcagaggaagacaggttatcagcacagctaggacatgcaatgttattttgattgttcttgatgccataaaaccaataactcacaagcgtcttattgagaaggagcttgaaggatttggcattaggttgaacaaaacaccacccaatttgactttcagaagaaaggacaagggtggaatcaacttcacatcaacagtgacgaacacacatttggaccttgatacagtaaaagcaatctgtagcgagtacaggatacataatgctgatgtctccctgagatatgatgctacagcagatgatctcatagatgttattgaaggaagccggatttacactccttgcgtatatgttgtcaacaagattgatcagataacactcgaggagctggaaatcttggacaaacttccccattactgcccggttagtgctcatcttgaatggaatcttgatggacttctggagaagaaaaccgtggaagatttctgcgacagaatccacaaggacatggtcaaacaatttaaatacgctctggtatggggttccagtgtgaaacataagcctcagagagttggcaaggagcatgagcttgacgatgaggacgtcgttcagatcatcaagaaaatataggcgtatcatgtggtggaacgaaacctgtttttttctgcaaaactgggagcgttgaggattttgttgagtagtagcctcgcgagaagagcttgaactcggcctttgcttgttggtgaggctcatatgtaatgttccctgttctcagaaaatttgctttgatccaaagacaatgtgagtcggcatttacttatatacaacgagtcatgtagctgtgatgtaacttcctctaacttggtgccatgtggactggagtcaccgatgtgtgctgccaagtgtctggcccaaccgttgaacacgtggagagatgctctccatatctttagaggaggatataaggtgatttgatgatttatttattaagtgtttgtaccttatctggtgttcgtacgttttctagtgatgattatgataattcataatcatctttggtggtgtgctatgtgctgtttccccaacgactcgaatccggaatccccattctccccgagtggcctctggcttgacaaaacaagaacaggaccggttcctgttccctagatctgcgtagaggcgacgggacacctgaatccgcaaaaaagggttcgcggtttgattgagaggaacgcaggaacccagcgtcaaaacccaatcttgacgctcgtgcagccgtgcgccatcgtcttcttcgtgtgatatagtgggtacgtcagcgacgagacgatgggcaccttcgctcccatccttcaccggcggccgcttgagcggtacaggctccacacgcgggccgaagaggaggcgaagaaccgcgtcagcctctccaccgtcgtccgcggcgtacttcggcagcagctcgtgtaggccgtcatcgagatgatcttgttcatggtaaggggacaggtagctctggtcggcataccgtgaaacaca

SEQ ID NO: 212379 - DNA, 1997 bp, Zea Mays
agtttgggacgccggaaatactacagatggcaaggacacagaagaataaagccactgctcaccatcttggtcttcttaaggctaaacttgcaaaattgcggcgggagttgctcactccaacatccaaaggtggtggtggtgcaggtgaaggatttgatgtgacgaagagtggagatgcacgtgttggtttagttggctttccttcggttgggaaatcaacattgttgaacaagctaacagggacattttcagaggttgcttcctacgagtttacaactttaacatgtattcctggagttatcatgtataagggtgctaaaatccagcttctagatctcccagggatcatcgaaggtgctaaagatggaaagggcagaggaagacaggttatcagcacagctaggacatgcaatgttattttgattgttcttgatgccataaaaccaataactcacaagcgtcttattgagaaggagcttgaaggatttggcattaggttgaacaaaacaccacccaatttgactttcagaagaaaggacaagggtggaatcaacttcacatcaacagtgacgaacacacatttggaccttgatacagtaaaagcaatctgtagcgagtacaggatacataatgctgatgtctccctgagatatgatgctacagcagatgatctcatagatgttattgaaggaagccggatttacactccttgcgtatatgttgtcaacaagattgatcagataacactcgaggagctggaaatcttggacaaacttccccattactgcccggttagtgctcatcttgaatggaatcttgatggacttctggagaaggtatgggaatacttggatttggttaggatatacacaaaacctaaagggctgaacccagattatgaggatcctgttatcgtatcatctaagaagaaaaccgtggaagatttctgcgacagaatccacaaggacatggtcaaacaatttaaatacgctctggtatggggttccagtgtgaaacataagcctcagagagttggcaaggagcatgagcttgacgatgaggacgtcgttcagatcatcaagaaaatataggcgtatcatgtggtggaacgaaacctgtttttttctgcaaaactgggagcgttgaggattttgttgagtagtagcctcgcgagaagagcttgaactcggcctttgcttgttggtgaggctcatatgtaatgttccctgttctcagaaaatttgctttgatccaaagacaatgtgagtcggcatttacttatatacaacgagtcatgtagctgtgatgtaacttcctctaacttggtgccatgtggactggagtcaccgatgtgtgctgccaagtgtctggcccaaccgttgaacacgtggagagatgctctccatatctttagaggaggatataaggtgatttgatgatttatttattaagtgtttgtaccttatctggtgttcgtacgttttctagtgatgattatgataattcataatcatctttggtggtgtgctatgtgctgtttccccaacgactcgaatccggaatccccattctccccgagtggcctctggcttgacaaaacaagaacaggaccggttcctgttccctagatctgcgtagaggcgacgggacacctgaatccgcaaaaaagggttcgcggtttgattgagaggaacgcaggaacccagcgtcaaaacccaatcttgacgctcgtgcagccgtgcgccatcgtcttcttcgtgtgatatagtgggtacgtcagcgacgagacgatgggcaccttcgctcccatccttcaccggcggccgcttgagcggtacaggctccacacgcgggccgaagaggaggcgaagaaccgcgtcagcctctccaccgtcgtccgcggcgtacttcggcagcagctcgtgtaggccgtcatcgagatgatcttgttcatggtaaggggacaggtagctctggtcggcataccgtgaaacaca

SEQ ID NO: 212380 - DNA, 1714 bp, Zea Mays
aaattagaacagaaggagtattacataaaagcttgtgcgttttccacagtgattttgagcgaccttattgatcttatctgaaagatactcatccgtcgcgctcatcttttgctggttgaaccaaagagcccactaatggaaaaaaacaacacgcaaattcttgttccagaacatttccaaaacatatatcacaagtccaaatcctaaagcagaaacaagccaatttctgagatgttttatcttataccacaaaacaaaataatgaaattccatcagaaaaagcttcagtaaacgtgtaccgggccgaaacgtcccgagcccatgggcgaagcccaacaagcggcccagcacgaaacgtcggagccctagcgaaaatcctcagcgccgccgcgcactataagtagcgcctccaaaccctaggctgctacgcgcttcctctcgccctcgctcctccgccgccgccgccgccgcatcaagcccccgccccgccgtcgcctgaggtagacaccaatccgccgccatggggcgtatgcacagccgcgggaagggtatctcatcgtcggcgcttccctacaagaggacgcctcctacctggctcaagaccgctgcctccgacgtggaggagatgatcacaaaggcagcgaagaagggacagatgccgtcgcagatcggcgtcctgctccgtgaccagcacggtatcccccttgtcaagagcgtcaccggcagcaagatcctccgcatcctcaaggcccatgggctggcaccagaaatccccgaggacctgtacttcctcatcaagaaggcggtggcgataaggaagcaccttgagaggaacaggaaggacaaagactctaaattcaggctcattcttgtggagagcaggatccaccgccttgcccgctactacaagcgcacaaagaagcttccacccacctggaagtatgagtcaaccacagcgagcactctggtggcctaagtgtggtatcctccgacagcttgttctagatatgaatttgtgcaaaagaaaataattccggatattgctgagccgggatgcccttattccacagatctccctagaaaagaatcccatcacgatacaaatgcagctaagttcatatggtgtcgacgaatatgaatgcagctgagttcgacgaatatgaatgcagctgagttcaaattggtttagcaacattctgatcattgtgtatacgatcgtgtaaaaatagaaggtgagatagcagagatgctagagatagccttagaaaccattttcaacaccttctaagggctagtttgaaaactcaaatccttcaagattgaaggggattggagggaaaattagtttatttttatctcaattccctccaatctcgaaggggatttgaggttactaaagtagccttaaagggttatattctaaatttattggacgatggcctcctttgcctccaacaatcgacgctacaagatctgctaaactatagcgtgtaatggacgctaaaagtagggatggcgacaggtttaaaacccgcgggtacagagattacaaacccgtacccgcgagattaatgttaaacttgtacccgctacccgcgacgggtagtgtatgttacccaaacccgctacccgcgggtttatggcacccgcgggcacaatcatataataaatatttattaaactgataaaaacctgtactgatcttagccaaaag

SEQ ID NO: 212381 - DNA, 1788 bp, Zea Mays
gtttaatgtccctgtatgcattagtcatgcaatttagggcctgtttggatcactagagctagttactagctgggactaaaaattagaccaaattagctagagttgactaaccagttgaagacttggctaaaaaattaatctacctattagccctcctgtttggatgcactaagaccaatttttagctagctaacaattagaacttgtatccaaacatgcccctagtatagcttgctgcattgttttggagtctggaatcatattgggttcaaagattaaaacaacaccaacaaagattaaaacatgccccaaggtggtgctgttcaccgtcaacttcatcaaataattcgtgagtgaagtctatgaagcaaacattttaatatttcattctatcaattaaaaaattataattctgctttggatgagatctccaagaacaatggatataatggtaaatgagaatattgatggttgcaattagttttggtagcagaatgatgacaacaccaacaaagattaaaacatgccccaaggtggtgctgttcaccgtcaacttcatcaaataattcgtaccagcaccttcttttcttgaatctgtgagaacttggatctttgttttcacaatttattagtgatgcttatgtatgacaagaattaggccatccctctttggtggtgctcgcccccgtgaacaagttctcaaagaacgtggagtggatgttttggccagtgatcttgagcggatttcaccagttggcaggtctaaaggtgaatttgcaaaggtcgagcagaaggttgaagctttgtccattaacccttctcttgaaagagctgatggtttttcagctggtcatagaggcccaaggagtgttgataagaaggattacaggcgggatactgagaaggctgatgcatataggccttctcgtcgggaggataacaggagggtcgctagagatatggagaagccacaggagcaaccacgcccagagcctgagacatggcgtaagccagtggagcctccaaagccagaggttgcaacacctcgttttgggaaagcagcaaccgcgttggagcttgcgcaggccttctcaacgtccatgtctgatactgcaccacagaaccggttgaccagcgttcccagcccaagagttcctcttagcccaggggctagggatcagtctggcttctcaaggctcactgacagcaggacgttacgctccagcccttcccagcgaaagataaatggctactgatcgcttggcacacatattacacgtgtcacgatgacagttggcctcgatgaagcgccccgctgtatcttcatactcaactgcccctgcgtggagaagtccaattgttgctctgtcagatggtggcacgtgagtggtgataatctcattggtagcaaacaaaaggctcctcttccataagtttctgccctgatttgttgctggggaataattgccacctgcgcatcttttagttggatgtgctctgccgtgcttggttttatgatgttgccagatcggtggtatgtagcctgcgtcataatgcaaaattgggattttactgcgagaacaaattattggtcttgtacggttaaatcaggattaaaggatgtaactttcaatcttggttgtctagtttatataagccgcgtttggatcactggattccaatttgaattttgaaccaagttacgttgaaaatcctgtgtaaattggtgtcacccaattggggttccgatgcttcgtttatttttcttccttaacttgatctcccgtt

SEQ ID NO: 212382 - DNA, 1240 bp, Zea Mays
cagcaccttcttttcttgaatctgccatccctctttggtggtgctcgcccccgtgaacaagttctcaaagaacgtggagtggatgttttggccagtgatcttgagcggatttcaccagttggcaggtctaaaggtgaatttgcaaaggtcgagcagaaggttgaagctttgtccattaacccttctcttgaaagagctgatggtttttcagctggtcatagaggcccaaggagtgttgataagaaggattacaggcgggatactgagaaggctgatgcatataggccttctcgtcgggaggataacaggagggtcgctagagatatggagaagccacaggagcaaccacgcccagagcctgagacatggcgtaagccagtggagcctccaaagccagaggttgcaacacctcgttttgggaaagcagcaaccgcgttggagcttgcgcaggccttctcaacgtccatgtctgatactgcaccacagaaccggttgaccagcgttcccagcccaagagttcctcttagcccaggggctagggatcagtctggcttctcaaggctcactgacagcaggacgttacgctccagcccttcccagcgaaagataaatggctactgatcgcttggcacacatattacacgtgtcacgatgacagttggcctcgatgaagcgccccgctgtatcttcatactcaactgcccctgcgtggagaagtccaattgttgctctgtcagatggtggcacgtgagtggtgataatctcattggtagcaaacaaaaggctcctcttccataagtttctggtcagtgatttatgactcagggttcatttttcctctcttgataacaaagatgtgaatttgtggactattttttcttatgttcgccagccctgatttgttgctggggaataattgccacctgcgcatcttttagttggatgtgctctgccgtgcttggttttatgatgttgccagatcggtggtatgtagcctgcgtcataatgcaaaattgggattttactgcgagaacaaattattggtcttgtacggttaaatcaggattaaaggatgtaactttcaatcttggttgtctagtttatataagccgcgtttggatcactggattccaatttgaattttgaaccaagttacgttgaaaatcctgtgtaaattggtgtcacccaattggggttccgatgcttcgtttatttttcttccttaacttgatctcccgtt

SEQ ID NO: 212383 - DNA, 3193 bp, Zea Mays
cgacaaggcaagcacccaaccgccgccggagcccggagcaaaaccatctccaaaaccctagcccccatcccctcgctggaaagtctcgtcggcggccgcggagatgggcaaggcgaaggggaagcagcgtcaggacaagttctaccacctagccaaggagcaagggtatcggagtcgcgcggcgttcaagctgctccagctcgacgcgcggttccgcttcctcctgacggcgcactcggtgctcgacctctgcgccgcgccgggagggtgggttcaggtggccgtcaaccatgccccagtcggagccttcgtcgtcggcgtcgacctcgttcccatccgccccattcgcggggcccactcgctcaccgaggacatcaccaccaccaagtgccgcgccgcggtgcggaggctcatggactccaatggcgtctccgccttcgacgtcgtgctccacgatgggtcgcccaacgtcggtggtgcctgggcgcaggaggccacatcgcagtcggcgctagttattgacgcactgcgcctcgctaccatgttcctcgcccccaagggcgccttcatcacgaaggtttttaggtctcaagattacaacgctattatgtactgtcttaaacagttgtttgagaaggttgaggcaactaaacctacggcaagtcggtctacatctgctgaaatttatatcatctgtctgaaatataaggctcccgcaaagattcaaccagaacttcttgatataaagcacttgttcagtgtggttccagaacagaccaaatctagggatgttatggatggtaggaaaaagagacaccgtgatgggtatgaagaagggaatacgacattacggaaagttggtttggcatctgattttatatggtctgatgcccaggcgccactggagtttttgggctcttacaatgcaatttcatttgataatccagaatccctgcccataaagaatcatgagcttacaacagatgatatggcgtattcgcttacgaaaagcactgtcagtgtcttcacaagtcaccctaaaggccaatgatgctgtggagaacacaaaggtcatggatgatgatgtacttctacaggaaatggaagaattgaccagtgttattgatagaaagaaaaaaagagagaaaaagcgtttgtcaaagcgtcgagcaaaggataaagcacgcaaggccacaggaatgcagattgatgctacaggagatgattatggtgatcctgacttgttttctattagtgtaatcaagggtggaaaagaacttgaagctgttgaatcagcagaggttgatgtgcaaaatgaaattggagacagtgagaatgaggatactcaagctcgtgaacactctgatgaggaaatggattctgatgaggaacagcagaggtatgatgcccagcttgaggagatgcttgatgaagcttatgagcgctttgtaactagaaagggtggtgaaattaaacaagaacgcaagcgtgcgaaacgaatcaatcctgacgctgatgcagacttgttagagggaggtgaagatgatggtgttgctgaaatggatcaagattttgatgaagaccaagatcttgatgaacatcaagatcaggagaccaatccccttctgttagctctagatgaacagaggccaactaaagagcagattgtaaagcaaatggtatagtcaggacgtgttcacagaagcagcaactggcattactgagcagagtgacactgaagatgaaagggagagtttgcaaaggaatatgaagaagatggttactggcaaaacggaaaaagtggctaaagcacagcgtttgcaacgagatgatattgagattgtaccagcagaacctgtccgagatgaagaggatacgtcttcatcttctggtgaatcagatgtttcggaggatgaactcgatgattacagaaaggctgaagtactagcctatgctaagaagatgctgaggaagaaacagagagagcagatacttgatgatgcttacaacaagtacatgtttgatgatgaagggttacccaactggtttgttgaggatgaaaaaaggcataggcagcccatgaagcctgttacacgtgaggaagtagctgcaatgagggctcagtttaaggagatcgatgcccgcccatccaagaaggttgcagaggccaaggcccggaagaagcgtgttgccatgaagaaactggacaaggctcgccaaaaggcagatgctatagctgaccagaatgacataaacgagctatcgaagaggaagatgattgaccggatttacaggaaggcgatgccaacgaagcctcagaaggagtatgtcgttgcaaagaagggggttcagttgaggactggcaaagggaaggtgttggtggatccacgtatgaagaaggacaagcgggccagcggaacttgtaagaaagggaagaagggcggcaaaggcggcaaggggaagggtggtcagaaaggcatgagagggaaaactgggaagaaggccgggaaagccccgagttaaggaagatgaggagctaagcacggctgggatgctggatgccttcctcccagctaattttttgtctcgtcctactacagctactctcagtaggcagatgctttgaagtcgtgtgatgataaaatttatgtgttaagttttgtagcgtgagttatcatggctacaatttgttctgaaactagtggtcactaatcttaatttacacagttcagtcaattatcaaaactttttaacccctttggcgacaccagagtataagaaatacagatgcctgcatttctactaatatttgtgtggcgcacccttgtggagacttcttttttacaggtgaggaatccgcttgcatttccttatcagatgaaatgaaggcagcactttgagggcgtgttcggctggctacaagccgacactgttgcagctgtttggactgctgcagctgcaatccatagagagaaaaatactgtagaagccgcagccgcagccggattgcagccgcagcaagccgcagcgaacaagctggaatccgaaacattgagatgcagagaccgtcatggattcgcatttccccaacttgtcgatcagagcagaatctgatccaagcttttgtgcgttcaagatttggaatcagggtggtgcagagcagaggcggccactgaatccgagctacttggcg

SEQ ID NO: 212384 - DNA, 1104 bp, Zea Mays
atcattacttaatttgtgcggatgaatgtgtcatcattacatattacgtttccgtccgaaggtgaattcagtaaactgaaggatagtgggttgttacaaagaatcgggttgcaatatcactggagaaatcggaattacaagagttttgatgagtttctgatggatttgaagcagcctaaacggaagaatatcagacaagaacgtaaaaagattcctgcccaaaatttgcaaatgaagcgacttcgtggagacgaaataaagagcagacactgggacaccttctataaattctaccgtaacacaactgataatcattggggcagaccatacttgacaagggatttctttcacctcttgggagaaaagatgggggataatgtgatgcttatagttgctgaaaaagatgataaactagttgctggcgctcttaaccttattggaggtgatacactatttggccggttatggggatgcctgccagatgcttactttcccaatttgcattttgaagcttgctattatcaggcaattgaagcagccatagagttaaacctgagtaaggtggaggcaggtgctcagggagagcacaagatccagcgtggttacctcccagtgacaacttacagctgccactacttttcaaatcctggttttgcggcagctattggaaattatcttactcatgagacggctcaggttaagcatgctattaaggtccttcgtgattccggaccatacaaggaagacatactgaaagagttcgctgctcaacaagacgacgacctgtagaatacagaagggacttaaactatttgcatactgttttatagaactaacatcttctatgtagcaacagggatacaggtcgtccaaagtgttaccaaactacgaatcccacatttggacactgctaggactgtaaatatttaacattgtaacatcagtcttacggcgttgagttgggagctatagctatactcagttgtctcgctcttacttttccccaacagaaggacttgatgcttcctgtatattgcgctttgactttgattagatttataggaaaaaaattacataaatatctgcagctgtcattcagtcacg

SEQ ID NO: 212385 - DNA, 776 bp, Zea Mays
tctgtcagttggatttctttcacctcttgggagaaaagatgggggataatgtgatgcttatagttgctgaaaaagatgataaactagttgctggcgctcttaaccttattggaggtgatacactatttggccggttatggggatgcctgccagatgcttactttcccaatttgcattttgaagcttgctattatcaggcaattgaagcagccatagagttaaacctgagtaaggtggaggcaggtgctcagggagagcacaagatccagcgtggttacctcccagtgacaacttacagctgccactacttttcaaatcctggttttgcggcagctattggaaattatcttactcatgagacggctcaggttaagcatgctattaaggtccttcgtgattccggaccatacaaggaagacatactgaaagagttcgctgctcaacaagacgacgacctgtagaatacagaagggacttaaactatttgcatactgttttatagaactaacatcttctatgtagcaacagggatacaggtcgtccaaagtgttaccaaactacgaatcccacatttggacactgctaggactgtaaatatttaacattgtaacatcagtcttacggcgttgagttgggagctatagctatactcagttgtctcgctcttacttttccccaacagaaggacttgatgcttcctgtatattgcgctttgactttgattagatttataggaaaaaaattacataaatatctgcagctgtcattcagtcacg

SEQ ID NO: 212386 - DNA, 473 bp, Zea Mays
agcaaccccgcgacccgctgcccggccggcccgccgggcgatgcaggcgaagaagctgaccctgctgcagacggtggcagctgcgggagtcttctctgccgtctccttttggtatggcttcatgttcggaagggagtccgcgcggcgcgagcttggtggcatcatagacgacctccgcagcaacaagcccaccaatacccctgccggtcccgatgctcattcgaagccatagtggggtatggtgttctgttgttcctcctttgccgtactaaatctaaatgtggtcaagcttgtcttgtggatcctgctaggctgtagacggaagaactagccttggagctaccagttttttgtccccttctttcataatgtgtatacggcttgaacatcagtttttagactgaaaaaaaaaacaagttaacctgccacaaaagacaaggaagaaaaacaagttaaaacctcctttggttcag

SEQ ID NO: 212387 - DNA, 821 bp, Zea Mays
ctggttttgttaccctagtggacgacgcctcaacgagctgttgcagtggcatcactgcttgctcaagcaccgatgcctgaggctgcccggcttactggcgcgccaggttttcagggttcagaaaaccacatttcttttgcctccccgccgcagacaagtagcaatattcctactacagttctgggcgcctccacctccaccaagcttcctgctgaactccagttgccagagggcagcgtcgtagcgaccaatgcagagctcaagacgccaggaccagaagctacgccttcaactctcaagccatctgctaatccagaaccacgcgtggatggcgatgacatcactgatgctctctacggtgaccatggtcatcgcaggctccctattttcagggagatctgtccagattgagtgtcagcctcagcattctcaacgtcgctgatggatgcatttcggccctagctgtatattctgtttatctatcttgtacccagggtcttggtagcaattactctggagggtcatttctagtttcctaaaggagaatctctcttctcttgatctattcataatcgagaaagctatgatataatttacttgattaagccagcaattgaccgttttgcttgacgttggttgtagatgaaccttgtcatatatatgaattgagccttggtttttttttgccttttgtaactgagttgcagggtttccatatccactcgatgactgtcttgcatcatatgcatactagcacgcacaagaccataaagcatgacgaacactgagtggatatgtgaatcagcttactgaatgaggga

SEQ ID NO: 212388 - DNA, 1132 bp, Zea Mays
atttttggttgtttgtgcatgagagtccagctccacctgagagatacgggctcgccgcgatggaattcgagtcagcggcgcggcggcggcagcgcagactctcttcgccgtcgttgaggacccacctcacgccggcttttgacgccgtggccggtggggagggcggcgtgtctgggtactcttcatcgtcgtcttccagcggtctcgaactcgggttcgacgcctctctcctccgcaaccgccgctccggtttcgccgccccctcggacctggacagccgtgtcctcctctactccccgcagtccgtgccgccgcagatgagggcggcgtacctggcagcggatgatggggtcagggcacctggcgtcaaccactacggatccaaatatgaggctgcccggcttactggcgcgccaggttttcagggttcagaaaaccacatttcttttgcctccccgccgcagacaagtagcaatattcctactacagttctgggcgcctccacctccaccaagcttcctgctgaactccagttgccagagggcagcgtcgtagcgaccaatgcagagctcaagacgccaggaccagaagctacgccttcaactctcaagccatctgctaatccagaaccacgcgtggatggcgatgacatcactgatgctctctacggtgaccatggtcatcgcaggctccctattttcagggagatctgtccagattgagtgtcagcctcagcattctcaacgtcgctgatggatgcatttcggccctagctgtatattctgtttatctatcttgtacccagggtcttggtagcaattactctggagggtcatttctagtttcctaaaggagaatctctcttctcttgatctattcataatcgagaaagctatgatataatttacttgattaagccagcaattgaccgttttgcttgacgttggttgtagatgaaccttgtcatatatatgaattgagccttggtttttttttgccttttgtaactgagttgcagggtttccatatccactcgatgactgtcttgcatcatatgcatactagcacgcacaagaccataaagcatgacgaacactgagtggatatgtgaatcagcttactgaatgaggga

SEQ ID NO: 212389 - DNA, 895 bp, Zea Mays
ttttcctatccgcatcgcttcgtgttcccttcccgcccggccgaagcgaacaagcaaccgccaccaatggctgcgtgaccttgcgggcgagggcgagggcggcggcggcggcggaaaggagcaaggaggcttccagaagctttcgtccatgcaaggctgcccggcttactggcgcgccaggttttcagggttcagaaaaccacatttcttttgcctccccgccgcagacaagtagcaatattcctactacagttctgggcgcctccacctccaccaagcttcctgctgaactccagttgccagagggcagcgtcgtagcgaccaatgcagagctcaagacgccaggaccagaagctacgccttcaactctcaagccatctgctaatccagaaccacgcgtggatggcgatgacatcactgatgctctctacggtgaccatggtcatcgcaggctccctattttcagggagatctgtccagattgagtgtcagcctcagcattctcaacgtcgctgatggatgcatttcggccctagctgtatattctgtttatctatcttgtacccagggtcttggtagcaattactctggagggtcatttctagtttcctaaaggagaatctctcttctcttgatctattcataatcgagaaagctatgatataatttacttgattaagccagcaattgaccgttttgcttgacgttggttgtagatgaaccttgtcatatatatgaattgagccttggtttttttttgccttttgtaactgagttgcagggtttccatatccactcgatgactgtcttgcatcatatgcatactagcacgcacaagaccataaagcatgacgaacactgagtggatatgtgaatcagcttactgaatgaggga

SEQ ID NO: 212390 - DNA, 1443 bp, Zea Mays
cttaattttaatgttattttggacattttttgttattctatgcgtaagtacacatgtatgcgaaagatagaagaatcatacaaaatagtcttgaaagaagggtgatatgtttgatttatatcttgtgaagtaatattacaaagtgcaaaacatattgattggagtcaaaaatccaattttctcactttttcctatccgcatcgcttcgtgttcccttcccgcccggccgaagcgaacaagcaaccgccaccaatggctgcgtgaccttgcgggcgagggcgagggcggcggcggcggcggaaaggagcaaggaggcttccagaagctttcgtccatgcaagctccacctgagagatacgggctcgccgcgatggaattcgagtcagcggcgcggcggcggcagcgcagactctcttcgccgtcgttgaggacccacctcacgccggcttttgacgccgtggccggtggggagggcggcgtgtctgggtactcttcatcgtcgtcttccagcggtctcgaactcgggttcgacgcctctctcctccgcaaccgccgctccggtttcgccgccccctcggacctggacagccgtgtcctcctctactccccgcagtccgtgccgccgcagatgagggcggcgtacctggcagcggatgatggggtcagggcacctggcgtcaaccactacggatccaaatatgaggctgcccggcttactggcgcgccaggttttcagggttcagaaaaccacatttcttttgcctccccgccgcagacaagtagcaatattcctactacagttctgggcgcctccacctccaccaagcttcctgctgaactccagttgccagagggcagcgtcgtagcgaccaatgcagagctcaagacgccaggaccagaagctacgccttcaactctcaagccatctgctaatccagaaccacgcgtggatggcgatgacatcactgatgctctctacggtgaccatggtcatcgcaggctccctattttcagggagatctgtccagattgagtgtcagcctcagcattctcaacgtcgctgatggatgcatttcggccctagctgtatattctgtttatctatcttgtacccagggtcttggtagcaattactctggagggtcatttctagtttcctaaaggagaatctctcttctcttgatctattcataatcgagaaagctatgatataatttacttgattaagccagcaattgaccgttttgcttgacgttggttgtagatgaaccttgtcatatatatgaattgagccttggtttttttttgccttttgtaactgagttgcagggtttccatatccactcgatgactgtcttgcatcatatgcatactagcacgcacaagaccataaagcatgacgaacactgagtggatatgtgaatcagcttactgaatgaggga

SEQ ID NO: 212391 - DNA, 2621 bp, Zea Mays
gtcacggagaaaagaaaaagtaaccaacctccggtccaacccgatagcccaaaccccctgcgagcacaagcacaaagctaaagctgtgtaagcagcagaatccaatccaatccccagctcgcgccgccccctctaatccctcctccgcaaggcagacaggggccggcgttcactcgggcatccgcgggacggacggggagcaaagcctcagcggcgagtgcgggcgatgaggtcttcggaggcgtcgtcgcggctcgtgcaggagctcgtgctgtacgccgccagcgccgcgctcagctgcctcgtcctcttcgctggcctccgccacctcgaccccaaccgcgccgcttcccagaaggcgcagcaacagaagaaggagatcgccaagcgcctcggccggcccctcgtctccaccacgccctatgaggacgtgattgcgtgcgacgtcatcaaccccgacagcatcgacgtcgaattcgactccatcggcggcctggaccagatcaagcaggcgctctacgagctcgtcatcctgcccctgcgccgccccgagctcttcaccttcggcaagctcctcagcccccagaagggcgtcctcctctatggcccgcccggcacaggcaagaccatgctcgccaaggccatcgccagggagtccggcgccgtcttcatcaatgtcaggatctccaatctcatgagcaagtggttcggggacgcacagaagcttgtggctgctgtctttagtctcgctcacaagctccagcctgctattatcttcattgacgaggtcgacagtttcttggggcagcgacggacaactgaccatgaagccatgactaatatgaagacagagttcatgtccctctgggatggcttcaccaccgaccagaacgctcgtgtaatggtcctggctgctacaaacaggccttctgagctagatgaggccatccttaggcgctttactcagatatttgaaattggaattcctgttgagagtgaaaggagcaagatacttcaggttgtgttgaagggagaaaatgtggagcataatattgattacgatcgcattgcaagtttgtgcgagggctttactggatcagacatcctagaactgtgcaagcaggccgcattctatcctatcagggagctgttggacgatgagaaaaaagggaggaaattagataaacctaggcccttgagacaatcagacttggagagagccttgtcagtgtctagaaagggcaagaaggctgcaagttcagcactgcagtcacctttgtgggtacggccgacagattcagaagacgatcagatctcgtgaaaatctgcagcggagtaaatgcaggcattacgtcgataccgttaggtttccttatgcagtttgcagaggttaaacatatttatatatgtattaattcgttttgcgtttggaacctccaccggttttttttgaagcaaactgcagctggtgaagtggcaagcgtgccctcgtgtttaagttgatcatttcaaaatacgtgccccctgagggccgtaaaactgagaactctatagttgtctggtcaacagtcggtcttggttgcctctgtattttatcttcggtttgactactctagggtggcgaattacaacatacagtataatgcagaaaggttcccaaacgtgcttcggttttttttgttgtctggttattatttacatacatgcactgcatatccttttttatatattttatctccgttatgaaaatttctctcggagcacagcacactgtttgaacatatatttccggattagaattccatgagctgtatatgcatgtataatcgtatatgcatgcaccaccatcacgtgcacgagcagctgccgccgcttgctgttctcaaggcgctcgtctccatgatggatatctcatcagcaagcgacagcttggtgcccttgagagccaggacgtcggtggtgccgccggtttccgccgccgcatccagcgtcttcctggacacgatggcgtggatctcccggagcagcgtgaggaaggcacgctcgacgttgtcgccgctgagggcagacgcctccgagaagaagagcccctgctcctccgcgaaggcggcggcctcgtccgcgtccaccgcgcggcggccggcgtcgcgcgccaggtcggccttgttgccgacgagcatgacgacgatggacttgtcggcgtgggcgcgcagctcggcgacccagcgcgtggcgtggtcgaaggtgcggcggctggtgacgtcgtagacgagcatggcgccgagcgcgccgcggtagtaggcgctggtgaccgcgcggtagcgctcctggccggcggtgtcccagatctgggccttgacgcggtggcgcgcgatgtcgacggtgcgcgtctggaactcgatgccgatggtcgacttggagtccaggaagaactcgtcgcgggtgaagcgccccagcagctgcgtcttacccaccgccgagtcgccgaccaccacgatcttgaacacgtagtcctcctccatctccgttgcacgctactcctgactatcctgcttgcagctgcagcgaatggcttccttctccggccggccggccggccgtctctctcgcccctgttagct

SEQ ID NO: 212392 - DNA, 1277 bp, Zea Mays
ctggattgcatgaatagtttcatagttgaaatatatccccacaataaagaagaaagaatcgcaagaacatggggtacaactgcacctggtttaccctatgttgatgaggctattgcgtcagctgggaactggctgatcggtggcgatctggaggtgttggaacccatcaaatacaatgatggtcttgatcactacagactttcacctcggcaacttaggaaggagtttgacaagcggggggctgatgctgtgtttgccttccagttgagaaacccagtacacaatggtcatgcactattgatgaatgacactagaaggcgtctcttggaaatgggttacaagaatcccattctactactacatcccttaggtggttataccaaagcggatgatgtcccactgccagttagaatggaacaacacagtaaggttttagaagatggagtgcttgatcctgagactactatagtgtctatatttccctcaccaatgcattatgctggtccaacagaagtgcagtggcatgcaaaggcacgaattaatgctggtgccaatttctatatagtaggccgagatcctgctggaatgggacatccaacagaaaagagggacttgtacaacccagatcacgggaagaaggtcctgagcatggctcctggtttagagaaactcaacatactgcccttcaaggtagcagcttatgatacagtagcaaaggagatggccttttttgatccttcacgcagtcaagattttctgttcatctctggaaccaagatgcgcacttatgccaaaactggagagaatcctccagacggtttcatgtgcccgggtgggtggaaggttcttgttgactactacaacagcctgcaagctgaagaagcgactccagtccctgtatgaggcaagctactatttgactaagagattattcaatggcggggaaacatacaagcaagtgatcagatcatttgagcttttttccttattgattctttaggttagtagttgattgatatatgatcagatcttttcgattgtttgtttgtcttaaatatgagactctgaagcatggaaaaactaaagatctgcacaagttgagccaaaacagcatggccattgttctgtagcgaagccggttgaactatataataaaagatgaaagggtgcatattttcttgttgctgtagtagatcatctatgttcccaaaacatttgttttttttgccctacgactgagtgaaaggacactacatttatgattcctctgagccctt

SEQ ID NO: 212393 - DNA, 3355 bp, Zea Mays
cggatttatgcggaaattcggaaaacgtgccgtactccggaaagctgcgttgactctgcctcgtttgctggagtgtctgggtgggtcgtggaattctgaccgagcgatttggtgccagttgttggttcacggccctcgagctgcaatcgacaattccgttggcatatgaacagttcgtgttttgtgatatatttcaccaaaaggaatcaggatggagagactgctcattttgtggcaagcgcctccattgtggatgtgttgcttcaaagaactcttatgatctacttgacagtggaggaattcaatgtgtcacttgcatgaaaaattcagcagctcagtctgcttctggacaagtggttccaaagctctttccatgtccaaacaatctgctgttttttggtaaaagcgacgagttattgtcaagcagaaaatttgaacaaccaccctctcttatgttggattccagaaatgatgatattgctattgtaaataagagtagtcacctgttcatggtaagcggcatagaggctggacagagcagtaacatcttgagacaaaaagagatagagaatggtccaaggcagattaaatgggaacaaccaacccttaatattggggacatgggaagacctttactaactaggtctcaaagtgcattagagtcacctcagtgtactcgaagagatgacaataaggatccaactacagatagcacaacaagtgaatcgtttccagaggcatgtctgagcatgaacctaggtattgcaaacaatggaaacaggatggaggctacttcaacagcggaaagacctatgctatcgccaacgacagccattgctgaaggaagagaacttaccactgcactgtccccctttcagcacgcacaaagggctcggcatttcctgaccagaccaccaagggttggtgagggtgcagcttttgatccaactagagacatgtttccgcatcttcgtgttgctaggccacctgctgaaggaaggggccgcaatcaattacttcctcggtattggccaagaataacagaccaagagctgcaacaaatatctggagattcaaattccacaatcgttccattgttcgagaaggtcctgagtgcgagtgatgcaggccgcatagggcgccttgttcttccaaaagcttgtgccgaggcatattttcccccaatttctcaaccagaaggacgccccttgacaattcaagatgcaagaggaaaagaatggcattttcagtttaggttttggccaaataataacagcagaatgtatgtcttggagggtgttacaccatgcatacaatcattgcaattacaagctggcgatacagtgacctttagtcgtatagatcctggagggaaacttgttatgggctttcggaaggccacaaatactgtcagtctgccagactcacagatttcagctattgcgaatggttcccttctcagtgagacactcttttctactgcaaatgaaagcataggagtagtaagtggttatcctggatttcttcactcaataaagggagctgcagatttccatccaagctctctatatgatcatcatattaactcagctgacggggatgtcagttggaataaggcagataaatttggcagcaggccagatgaggggtctttgcaatttctacaaaaacgaagtcgcaatattggttccaaaagcaggaggttcttaatcgacgctgaagatgccatggaactaaagcttacctgggaagaagctcaagagttgttgcgccctgctcccactgcaaaaccaactgttgtgatgattgaggactatgaatttgaagaatatgatgaaccccctgtctttgcaaagagatcaatttttaccatccgtgcaacaggggaacaagaccagtggattcaatgtgacgagtgctcaaaatggcgccggttgcctcttaatgttattgttgcatccaaatggacatgcaccgacaactcatgggacccaaaatgctgctcctgctctgcgcctgaagagttgaccccaaaagagttgcaaagtgttatgcagcagtatgaagaaatgaggaggcgaaagggcagctatggtctgaagctgaatgtcgctgaaatggatgcatccagctttgacgccttggccacgggtgcagtattcggtgaagtcgggaaccaaggtacggcttcagtcgcgacgaccacaaggcaccccaggcatcgccccggctgcacatgcatcgtgtgcatccagccacccagtggcaagggcccgaagcacaaccctgcgtgcacctgcaacgtgtgcatgacggtgaggcgccggttcaagacactgatgatgaggaagaagcagcggcagtcggagcgagaggaggcggaggcaagcaagaagatcgcgtgggtgaacagagacgagcccgaggggagcagcctgtcgagatccccgcagacgctggacacgacccgagacagcagcgatgtcaccatgttcgacaaggtggccgccgacgtgaacaaggggcacatcgacctcaacttccaccctgcagcccctgccgtccgtggcgctggcgaccagggacagaatggcgcgcagcagccccgggcggtgagcatgatgggcctcctggaagtggcgagccggccccttgataactacatgaagcagaacggcctgacgagcctggcgggggagcaaggaggtggcagctccagcacggccacggtcccgccggctccagtggagagtgaggaccggacgtccgatgagggccgtgtcgcgtcagcagagcgggaagcagacgccatggccatcgacgaggccggcgagaaccagcaggacaagcctgccgactctgccgctgccgctgctacttgacggcgtgcgtctgttgtgaaagtgactgatgggtgttgtcagcgtgctttgatgtgcgtatcttatcggctcctcttggtttttttttcttttctttcaggaatagctggtgagtttttgatgtgaaagttctaaactaaatttctgtagggtttcaaggtgttgctcctggaggctggagttacttacgtgtacgtatgaggctgtgcaaccaacccccaggttgtatgttgtagaagttctgtaaaccacgatgctcttgtgttggttgctgctgtaatctaaaaacgcttagacctttggattcaataactcaccacatacttgatctgtactgtacatctcatctaagacatcttttggaaaacaggaatttcacaggagtcacggacggactcagtgcttaagtttaaatatacatgccttttatataaaattagctatagttattagcacttgataatcttgcctag

SEQ ID NO: 212394 - DNA, 3549 bp, Zea Mays
ctttgccctcccccctcctttccacttccttttttttagacaatatatacagaggaaaagaggacgtgatttcgtacgagtacctacctggctacctgctaataaaggcgcggcgatttgcgcatcattcgtcgccgtggattccctagcgaaacgccgaaacccaacaacatactacaagcggatttatgcggaaattcggaaaacgtgccgtactccggaaagctgcgttgactctgcctcgtttgctggagtgtctgggtgggtcgtggaattctgaccgagcgatttggtgccagttgttggttcacggccctcgagctgcaatcgacaattccgttggcatatgaacagttcgtgttttgtgatatatttcaccaaaaggaatcaggatggagagactgctcattttgtggcaagcgcctccattgtggatgtgttgcttcaaagaactcttatgatctacttgacagtggaggaattcaatgtgtcacttgcatgaaaaattcagcagctcagtctgcttctggacaagtggttccaaagctctttccatgtccaaacaatctgctgttttttggtaaaagcgacgagttattgtcaagcagaaaatttgaacaaccaccctctcttatgttggattccagaaatgatgatattgctattgtaaataagagtagtcacctgttcatggtaagcggcatagaggctggacagagcagtaacatcttgagacaaaaagagatagagaatggtccaaggcagattaaatgggaacaaccaacccttaatattggggacatgggaagacctttactaactaggtctcaaagtgcattagagtcacctcagtgtactcgaagagatgacaataaggatccaactacagatagcacaacaagtgaatcgtttccagaggcatgtctgagcatgaacctaggtattgcaaacaatggaaacaggatggaggctacttcaacagcggaaagacctatgctatcgccaacgacagccattgctgaaggaagagaacttaccactgcactgtccccctttcagcacgcacaaagggctcggcatttcctgaccagaccaccaagggttggtgagggtgcagcttttgatccaactagagacatgtttccgcatcttcgtgttgctaggccacctgctgaaggaaggggccgcaatcaattacttcctcggtattggccaagaataacagaccaagagctgcaacaaatatctggagagtatccttgataaggtctccatacatttgaaactgtgaacttcctggtgacattgatctcagacatttagtaacttatacatcaaggctctagaatagctcattaggcttaaacccttataatatgatgcataaatttcttgtgtaacagatatagtttttcttttatcttccttgactatattttgcaagttcaaattccacaatcgttccattgttcgagaaggtcctgagtgcgagtgatgcaggccgcatagggcgccttgttcttccaaaagcttgtgccgaggcatattttcccccaatttctcaaccagaaggacgccccttgacaattcaagatgcaagaggaaaagaatggcattttcagtttaggttttggccaaataataacagcagaatgtatgtcttggagggtgttacaccatgcatacaatcattgcaattacaagctggcgatacagtgacctttagtcgtatagatcctggagggaaacttgttatgggctttcggaaggccacaaatactgactcacagatttcagctattgcgaatggttcccttctcagtgagacactcttttctactgcaaatgaaagcataggagtagtaagtggttatcctggatttcttcactcaataaagggagctgcagatttccatccaagctctctatatgatcatcatattaactcagctgacggggatgtcagttggaataaggcagataaatttggcagcaggccagatgaggggtctttgcaatttctacaaaaacgaagtcgcaatattggttccaaaagcaggaggttcttaatcgacgctgaagatgccatggaactaaagcttacctgggaagaagctcaagagttgttgcgccctgctcccactgcaaaaccaactgttgtgatgattgaggactatgaatttgaagaatatgatgaaccccctgtctttgcaaagagatcaatttttaccatccgtgcaacaggggaacaagaccagtggattcaatgtgacgagtgctcaaaatggcgccggttgcctcttaatgttattgttgcatccaaatggacatgcaccgacaactcatgggacccaaaatgctgctcctgctctgcgcctgaagagttgaccccaaaagagttgcaaagtgttatgcagcagtatgaagaaatgaggaggcgaaagggcagctatggtctgaagctgaatgtcgctgaaatggatgcatccagctttgacgccttggccacgggtgcagtattcggtgaagtcgggaaccaaggtacggcttcagtcgcgacgaccacaaggcaccccaggcatcgccccggctgcacctgcaacgtgtgcatgacggtgaggcgccggttcaagacactgatgatgaggaagaagcagcggcagtcggagcgagaggaggcggaggcaagcaagaagatcgcgtgggtgaacagagacgagcccgaggggagcagcctgtcgagatccccgcagacgctggacacgacccgagacagcagcgatgtcaccatgttcgacaaggtggccgccgacgtgaacaaggggcacatcgacctcaacttccaccctgcagcccctgccgtccgtggcgctggcgaccagggacagaatggcgcgcagcagccccgggcggtgagcatgatgggcctcctggaagtggcgagccggccccttgataactacatgaagcagaacggcctgacgagcctggcgggggagcaaggaggtggcagctccagcacggccacggtcccgccggctccagtggagagtgaggaccggacgtccgatgagggccgtgtcgcgtcagcagagcgggaagcagacgccatggccatcgacgaggccggcgagaaccagcaggacaagcctgccgactctgccgctgccgctgctacttgacggcgtgcgtctgttgtgaaagtgactgatgggtgttgtcagcgtgctttgatgtgttgctcctggaggctggagttacttacgtgtacgtatgaggctgtgcaaccaacccccaggttgtatgttgtagaagttctgtaaaccacgatgctcttgtgttggttgctgctgtaatctaaaaacgcttagacctttggattcaataactcaccacatacttgatctgtactgtacatctcatctaagacatcttttggaaaacaggaatttcacaggagtcacggacggactcagtgcttaagtttaaatatacatgccttttatataaaattagctatagttattagcacttgataatcttgcctag

SEQ ID NO: 212395 - DNA, 3567 bp, Zea Mays
gcactactctatctctatgctgcgcgcctgcgacgagaggagaggaggatgggctgttgctgttctgtttgttttactactactatactactagtacaaccacccctgcctcccgtctcgttttccattccttgtcttccccgcaccgcacccgcatccgcatgcaccaatcgccaccagcgaccgccccgcggctgtgcctgtgggtgcgcgcgttcgttgtcccctccacgtccaccggaaagctacgcctcccccaccgcctcctctagcgtctcggcccgtctccctctcactctctctcgctctcgctctctctctccgtgggtgatgcgctcagccgacctcttctgaccggcggagtggctgcgctcgccggtcacccatggctatggcgggcgccggcgcggcggcggcggcggccaagaggtgcatgaacccggcctgcggcgcgctgccggcgtcatctgtggtggtcggggcgggaggggactggaggaagggctggccgctgcgatccggaggcttcgccctgctctgcgacaagtgtgggttggcatatgaacagttcgtgttttgtgatatatttcaccaaaaggaatcaggatggagagactgctcattttgtggcaagcgcctccattgtggatgtgttgcttcaaagaactcttatgatctacttgacagtggaggaattcaatgtgtcacttgcatgaaaaattcagcagctcagtctgcttctggacaagtggttccaaagctctttccatgtccaaacaatctgctgttttttggtaaaagcgacgagttattgtcaagcagaaaatttgaacaaccaccctctcttatgttggattccagaaatgatgatattgctattgtaaataagagtagtcacctgttcatggtaagcggcatagaggctggacagagcagtaacatcttgagacaaaaagagatagagaatggtccaaggcagattaaatgggaacaaccaacccttaatattggggacatgggaagacctttactaactaggtctcaaagtgcattagagtcacctcagtgtactcgaagagatgacaataaggatccaactacagatagcacaacaagtgaatcgtttccagaggcatgtctgagcatgaacctaggtattgcaaacaatggaaacaggatggaggctacttcaacagcggaaagacctatgctatcgccaacgacagccattgctgaaggaagagaacttaccactgcactgtccccctttcagcacgcacaaagggctcggcatttcctgaccagaccaccaagggttggtgagggtgcagcttttgatccaactagagacatgtttccgcatcttcgtgttgctaggccacctgctgaaggaaggggccgcaatcaattacttcctcggtattggccaagaataacagaccaagagctgcaacaaatatctggagattcaaattccacaatcgttccattgttcgagaaggtcctgagtgcgagtgatgcaggccgcatagggcgccttgttcttccaaaagcttgtgccgaggcatattttcccccaatttctcaaccagaaggacgccccttgacaattcaagatgcaagaggaaaagaatggcattttcagtttaggttttggccaaataataacagcagaatgtatgtcttggagggtgttacaccatgcatacaatcattgcaattacaagctggcgatacaggactcacagatttcagctattgcgaatggttcccttctcagtgagacactcttttctactgcaaatgaaagcataggagtagtaagtggttatcctggatttcttcactcaataaagggagctgcagatttccatccaagctctctatatgatcatcatattaactcagctgacggggatgtcagttggaataaggcagataaatttggcagcaggccagatgaggggtctttgcaatttctacaaaaacgaagtcgcaatattggttccaaaagcaggaggttcttaatcgacgctgaagatgccatggaactaaagcttacctgggaagaagctcaagagttgttgcgccctgctcccactgcaaaaccaactgttgtgatgattgaggactatgaatttgaagaatatgatgaaccccctgtctttgcaaagagatcaatttttaccatccgtgcaacaggggaacaagaccagtggattcaatgtgacgagtgctcaaaatggcgccggttgcctcttaatgttattgttgcatccaaatggacatgcaccgacaactcatgggacccaaaatgctgctcctgctctgcgcctgaagagttgaccccaaaagagttgcaaagtgttatgcagcagtatgaagaaatgaggaggcgaaagggcagctatggtctgaagctgaatgtcgctgaaatggatgcatccagctttgacgccttggccacgggtgcagtattcggtgaagtcgggaaccaaggtacggcttcagtcgcgacgaccacaaggcaccccaggcatcgccccggctgcacatgcatcgtgtgcatccagccacccagtggcaagggcccgaagcacaaccctgcgtgcacctgcaacgtgtgcatgacggtgaggcgccggttcaagacactgatgatgaggaagaagcagcggcagtcggagcgagaggaggcggaggcaagcaagaagatcgcgtgggtgaacagagacgagcccgaggggagcagcctgtcgagatccccgcagacgctggacacgacccgagacagcagcgatgtcaccatgttcgacaaggtggccgccgacgtgaacaaggggcacatcgacctcaacttccaccctgcagcccctgccgtccgtggcgctggcgaccagggacagaatggcgcgcagcagccccgggcggtgagcatgatgggcctcctggaagtggcgagccggccccttgataactacatgaagcagaacggcctgacgagcctggcgggggagcaaggaggtggcagctccagcacggccacggtcccgccggctccagtggagagtgaggaccggacgtccgatgagggccgtgtcgcgtcagcagagcgggaagcagacgccatggccatcgacgaggccggcgagaaccagcaggacaagcctgccgactctgccgctgccgctgctacttgacggcgtgcgtctgttgtgaaagtgactgatgggtgttgtcagcgtgctttgatgtgttgctcctggaggctggagttacttacgtgtacgtatgaggctgtgcaaccaacccccaggttgtatgttgtagaagttctgtaaaccacgatgctcttgtgttggttgctgctgtaatctaaaaacgcttagacctttggattcaataactcaccacatacttgatctgtactgtacatctcatctaagacatcttttggaaaacaggaatttcacaggagtcacggacggactcagtgcttaagtttaaatatacatgccttttatataaaattagctatagttattagcacttgataatcttgcctag

SEQ ID NO: 212396 - DNA, 3566 bp, Zea Mays
gcactactctatctctatgctgcgcgcctgcgacgagaggagaggaggatgggctgttgctgttctgtttgttttactactactatactactagtacaaccacccctgcctcccgtctcgttttccattccttgtcttccccgcaccgcacccgcatccgcatgcaccaatcgccaccagcgaccgccccgcggctgtgcctgtgggtgcgcgcgttcgttgtcccctccacgtccaccggaaagctacgcctcccccaccgcctcctctagcgtctcggcccgtctccctctcactctctctcgctctcgctctctctctccgtgggtgatgcgctcagccgacctcttctgaccggcggagtggctgcgctcgccggtcacccatggctatggcgggcgccggcgcggcggcggcggcggccaagaggtgcatgaacccggcctgcggcgcgctgccggcgtcatctgtggtggtcggggcgggaggggactggaggaagggctggccgctgcgatccggaggcttcgccctgctctgcgacaagtgtgggcttctggacaagtggttccaaagctctttccatgtccaaacaatctgctgttttttggtaaaagcgacgagttattgtcaagcagaaaatttgaacaaccaccctctcttatgttggattccagaaatgatgatattgctattgtaaataagagtagtcacctgttcatggtaagcggcatagaggctggacagagcagtaacatcttgagacaaaaagagatagagaatggtccaaggcagattaaatgggaacaaccaacccttaatattggggacatgggaagacctttactaactaggtctcaaagtgcattagagtcacctcagtgtactcgaagagatgacaataaggatccaactacagatagcacaacaagtgaatcgtttccagaggcatgtctgagcatgaacctaggtattgcaaacaatggaaacaggatggaggctacttcaacagcggaaagacctatgctatcgccaacgacagccattgctgaaggaagagaacttaccactgcactgtccccctttcagcacgcacaaagggctcggcatttcctgaccagaccaccaagggttggtgagggtgcagcttttgatccaactagagacatgtttccgcatcttcgtgttgctaggccacctgctgaaggaaggggccgcaatcaattacttcctcggtattggccaagaataacagaccaagagctgcaacaaatatctggagattcaaattccacaatcgttccattgttcgagaaggtcctgagtgcgagtgatgcaggccgcatagggcgccttgttcttccaaaagcttgtgccgaggcatattttcccccaatttctcaaccagaaggacgccccttgacaattcaagatgcaagaggaaaagaatggcattttcagtttaggttttggccaaataataacagcagaatgtatgtcttggagggtgttacaccatgcatacaatcattgcaattacaagctggcgatacagtgacctttagtcgtatagatcctggagggaaacttgttatgggctttcggaaggccacaaatactgtcagtctgccagactcacagatttcagctattgcgaatggttcccttctcagtgagacactcttttctactgcaaatgaaagcataggagtagtaagtggttatcctggatttcttcactcaataaagggagctgcagatttccatccaagctctctatatgatcatcatattaactcagctgacggggatgtcagttggaataaggcagataaatttggcagcaggccagatgaggggtctttgcaatttctacaaaaacgaagtcgcaatattggttccaaaagcaggaggttcttaatcgacgctgaagatgccatggaactaaagcttacctgggaagaagctcaagagttgttgcgccctgctcccactgcaaaaccaactgttgtgatgattgaggactatgaatttgaagaatatgatgaaccccctgtctttgcaaagagatcaatttttaccatccgtgcaacaggggaacaagaccagtggattcaatgtgacgagtgctcaaaatggcgccggttgcctcttaatgttattgttgcatccaaatggacatgcaccgacaactcatgggacccaaaatgctgctcctgctctgcgcctgaagagttgaccccaaaagagttgcaaagtgttatgcagcagtatgaagaaatgaggaggcgaaagggcagctatggtctgaagctgaatgtcgctgaaatggatgcatccagctttgacgccttggccacgggtgcagtattcggtgaagtcgggaaccaaggtacggcttcagtcgcgacgaccacaaggcaccccaggcatcgccccggctgcacatgcatcgtgtgcatccagccacccagtggcaagggcccgaagcacaaccctgcgtgcacctgcaacgtgtgcatgacggtgaggcgccggttcaagacactgatgatgaggaagaagcagcggcagtcggagcgagaggaggcggaggcaagcaagaagatcgcgtgggtgaacagagacgagcccgaggggagcagcctgtcgagatccccgcagacgctggacacgacccgagacagcagcgatgtcaccatgttcgacaaggtggccgccgacgtgaacaaggggcacatcgacctcaacttccaccctgcagcccctgccgtccgtggcgctggcgaccagggacagaatggcgcgcagcagccccgggcggtgagcatgatgggcctcctggaagtggcgagccggccccttgataactacatgaagcagaacggcctgacgagcctggcgggggagcaaggaggtggcagctccagcacggccacggtcccgccggctccagtggagagtgaggaccggacgtccgatgagggccgtgtcgcgtcagcagagcgggaagcagacgccatggccatcgacgaggccggcgagaaccagcaggacaagcctgccgactctgccgctgccgctgctacttgacggcgtgcgtctgttgtgaaagtgactgatgggtgttgtcagcgtgctttgatgtgcgtatcttatcggctcctcttggtttttttttcttttctttcaggaatagctggtgagtttttgatgtgaaagttctaaactaaatttctgtagggtttcaaggtgttgctcctggaggctggagttacttacgtgtacgtatgaggctgtgcaaccaacccccaggttgtatgttgtagaagttctgtaaaccacgatgctcttgtgttggttgctgctgtaatctaaaaacgcttagacctttggattcaataactcaccacatacttgatctgtactgtacatctcatctaagacatcttttggaaaacaggaatttcacaggagtcacggacggactcagtgcttaagtttaaatatacatgccttttatataaaattagctatagttattagcacttgataatcttgcctag

SEQ ID NO: 212397 - DNA, 3292 bp, Zea Mays
gcagcaccccgaaagtgcccatcactttgcttgctttcctgtccctttttttcccagaagaaatatataaaaaatttcgtccacctgcaactctcctgtcctgcaagagagttggcatatgaacagttcgtgttttgtgatatatttcaccaaaaggaatcaggatggagagactgctcattttgtggcaagcgcctccattgtggatgtgttgcttcaaagaactcttatgatctacttgacagtggaggaattcaatgtgtcacttgcatgaaaaattcagcagctcagtctgcttctggacaagtggttccaaagctctttccatgtccaaacaatctgctgttttttggtaaaagcgacgagttattgtcaagcagaaaatttgaacaaccaccctctcttatgttggattccagaaatgatgatattgctattgtaaataagagtagtcacctgttcatggtaagcggcatagaggctggacagagcagtaacatcttgagacaaaaagagatagagaatggtccaaggcagattaaatgggaacaaccaacccttaatattggggacatgggaagacctttactaactaggtctcaaagtgcattagagtcacctcagtgtactcgaagagatgacaataaggatccaactacagatagcacaacaagtgaatcgtttccagaggcatgtctgagcatgaacctaggtattgcaaacaatggaaacaggatggaggctacttcaacagcggaaagacctatgctatcgccaacgacagccattgctgaaggaagagaacttaccactgcactgtccccctttcagcacgcacaaagggctcggcatttcctgaccagaccaccaagggttggtgagggtgcagcttttgatccaactagagacatgtttccgcatcttcgtgttgctaggccacctgctgaaggaaggggccgcaatcaattacttcctcggtattggccaagaataacagaccaagagctgcaacaaatatctggagattcaaattccacaatcgttccattgttcgagaaggtcctgagtgcgagtgatgcaggccgcatagggcgccttgttcttccaaaagcttgtgccgaggcatattttcccccaatttctcaaccagaaggacgccccttgacaattcaagatgcaagaggaaaagaatggcattttcagtttaggttttggccaaataataacagcagaatgtatgtcttggagggtgttacaccatgcatacaatcattgcaattacaagctggcgatacagtgacctttagtcgtatagatcctggagggaaacttgttatgggctttcggaaggccacaaatactgactcacagatttcagctattgcgaatggttcccttctcagtgagacactcttttctactgcaaatgaaagcataggagtagtaagtggttatcctggatttcttcactcaataaagggagctgcagatttccatccaagctctctatatgatcatcatattaactcagctgacggggatgtcagttggaataaggcagataaatttggcagcaggccagatgaggggtctttgcaatttctacaaaaacgaagtcgcaatattggttccaaaagcaggaggttcttaatcgacgctgaagatgccatggaactaaagcttacctgggaagaagctcaagagttgttgcgccctgctcccactgcaaaaccaactgttgtgatgattgaggactatgaatttgaagaatatgataagtacaagtacttgaatgatcttcaacctgatctaaccatactacatacatgcaggaaccccctgtctttgcaaagagatcaatttttaccatccgtgcaacaggggaacaagaccagtggattcaatgtgacgagtgctcaaaatggcgccggttgcctcttaatgttattgttgcatccaaatggacatgcaccgacaactcatgggacccaaaatgctgctcctgctctgcgcctgaagagttgaccccaaaagagttgcaaagtgttatgcagcagtatgaagaaatgaggaggcgaaagggcagctatggtctgaagctgaatgtcgctgaaatggatgcatccagctttgacgccttggccacgggtgcagtattcggtgaagtcgggaaccaaggtacggcttcagtcgcgacgaccacaaggcaccccaggcatcgccccggctgcacctgcaacgtgtgcatgacggtgaggcgccggttcaagacactgatgatgaggaagaagcagcggcagtcggagcgagaggaggcggaggcaagcaagaagatcgcgtgggtgaacagagacgagcccgaggggagcagcctgtcgagatccccgcagacgctggacacgacccgagacagcagcgatgtcaccatgttcgacaaggtggccgccgacgtgaacaaggggcacatcgacctcaacttccaccctgcagcccctgccgtccgtggcgctggcgaccagggacagaatggcgcgcagcagccccgggcggtgagcatgatgggcctcctggaagtggcgagccggccccttgataactacatgaagcagaacggcctgacgagcctggcgggggagcaaggaggtggcagctccagcacggccacggtcccgccggctccagtggagagtgaggaccggacgtccgatgagggccgtgtcgcgtcagcagagcgggaagcagacgccatggccatcgacgaggccggcgagaaccagcaggacaagcctgccgactctgccgctgccgctgctacttgacggcgtgcgtctgttgtgaaagtgactgatgggtgttgtcagcgtgctttgatgtgcgtatcttatcggctcctcttggtttttttttcttttctttcaggaatagctggtgagtttttgatgtgaaagttctaaactaaatttctgtagggtttcaaggtgttgctcctggaggctggagttacttacgtgtacgtatgaggctgtgcaaccaacccccaggttgtatgttgtagaagttctgtaaaccacgatgctcttgtgttggttgctgctgtaatctaaaaacgcttagacctttggattcaataactcaccacatacttgatctgtactgtacatctcatctaagacatcttttggaaaacaggaatttcacaggagtcacggacggactcagtgcttaagtttaaatatacatgccttttatataaaattagctatagttattagcacttgataatcttgcctag

SEQ ID NO: 212398 - DNA, 1993 bp, Zea Mays
tcatatccttccataatatactctttgttgtatctctggtgggatgtttcccaacattttacaatatcttctttcctattgactgatttataatgttatccccttcctaggtgaacatcactgcgatagaactcaatgttcgtgaatgctattgtttctaactttctatgatttttttgatttgacatacatagtgttatttgctgctacactgtttgcccttaacttttccacggaccccagctcttatgagaattagtagtgaaaagaataccatcaaatccctcaagaatgacataaaacaactgaataataaattggcagagctacaagcatccttagaggagaaggaagatgaaatctctctgttgaggaggaactataatagtggtggttatggaaacaagaatgtagttggtactagtacagctggttcccctcatgaagagatgtcagaaaactatgaagaatcctcggcctcgagtagcatgatacagggttttgattctcggtcctcaagttcagtgaaatcttatacaagaggtggaaaattccatgaatcttctgagatcaaccatacagaggatcagcaggttttggtgactgaggaagagtttcctgaggtgaaagtagatttccaggaaacatttttaggccataacagtccaattagccgatgtcgattttctgcatctgggtcaaatattgctagttcatcaattgatggcacagttaggatttggacatatgattcgtcaactgcatcatccagaaatgctactatatactgtgggtctgaagtcagtgcactttcatgggaatgcagatctgacagattgctgctcataggcacagctaatggaggaattaaagcttggaatgctgatgcaaagagagttgtttgcgacctgagtacatctagaaactttccaagcatcttagatttgaaatgcagccctgttgaacctgtgtttgtctctgcagctgcatcaagacggcatggatcaactacatttgagagaacaggatttgccaacttgacagtgtggcatatgaaaacatggaagccattgactgtcctccctcttggtgaggatccacctgccattacttctctttgcttcaatcacaatgggaagattttggcagcttctgctacagatggaatgattcacatgtttgacatgtctgctggtcttcaaattacaggatggcctgcccatgattcacctgtgagctctgttctttttgggccagcagaaactagcatcttcagcttaggctcggacggaaagatacttgaatggagtttgcacaatcaaggtcagattctttggtcaagagattgcagcagattctgcaatccggagagctttaaaacacgaatgcatgaaatagcattggattcaaatggcaagaggctgctggtcacctccggtttggttcgggccccaatataccaggtacaaggccatgaaagcgaactgaggacactgccgcacagttcatctatcacaagtgtggattggcatccaacactgccaatgtacatcactggatccgcagaccactctgtccgggtcacgtctatcttatgatgatctataaaacaaggtgctggcaacaacctttcccagctagctagcatgcatcaacccttattgacagtcttatccatgcgtgaggctcggtgtcacgctatttcctcgcatggaagatgagctgtgttcttgttttgtggctttggtgtgcgtctaattctgtaccctttggtgggttgctccaacatttttttttcttgttgtaaacaggcatagagttctgtggtcatttgctttaaaatgagtgatagatcaaaataagtaaactttgtagcccgtctctcgaaatctcacgtctgcatacgcagatatgctatatactgtatgtacttgtaaatgaatttgtagcccgtctcagatagtacttcgcattacaatctatcatccttcac

SEQ ID NO: 212399 - DNA, 2184 bp, Zea Mays
cttcgccctcctgccctcccggcgaggtcgcctctgcttccgactccgctcgactgcgcccgaccccagtctcgcctgcgtccaccggcatggcctcacccacggtcgcctccccgacccgggcgagccccgccgacatccccaccgccgcaccctcgtcggccccccggccgcggcgcctcgcgtcggcgccgcccgcagtctacgcgtctgcgtcctcctccccggcctccgcctactccggggaccagctctccgcccccgacgcctcgagcccgctgctcgcgagcaggagcgaggagtacaggcttctgttccggctgccgcccgacgaggttctcgtgcaagattttaactgcgctctccaagaaaatatccttcttcaggggcatatgtatttatttcttcaccatatatgcttctactctaacatatttggatatgagactaagaaaacaatacctttgcaagaggtaacagatgttcgtaaagcaaagacggctgccattttttctaatgccattgaaattgttgctggtagtagaaggtagatggctgggaacaacatgttagtaatgcaagattactccttgaacgtcaggagacaaagtcagctagtagcagtgaagaaaatggttatgttttattggaaggagcaaaggaacctaaacaagatgaagattcatcaccgctggacaggtctgtcaatagtacggctgtctccagtggtagtgctgatggtggtgattcgaacatcaacatttccagaaggttttcaaatgttgaggagaatggactcgaagacaacatcatcacactaaacccattcaatttggagccagttgatgatactcctagtgtacctgaatcttacacttcggtcacggagtcaaagtttcaggtgcctgtggaggttctttttaatttgttattgtctgatggtgcttttggctttttggatgatttccacaaaaattgtggtgacaaagaatttagttgctccaaatggcgtacagatgaacaagggggacttgtaagggatgtctcatttttgcacccaataaaaatttatcttggtgcaaaatttgggacttgtcaagaggtccagaaacttcgtctttacaaaaacagggcatctgggatgttgaacaagatagcctagatgagaactgttgttacctcaggatatatattaatgtagccttctcaaagaaaacaatatttagagggaaaatagagcagtcaacaaaagatgaatgccgagaagttttcagtctctggattaagctcggccatgatcttttgaagcaggagtatgatcgatcaaaaggcacttccagcacaactgattctggtgctcaatcaggggctataacgaacgaggaaaataccggggaagtagcagtacccatggtgagtacctcacaggatgtatctggtgcgaggagcctcattcctccttttcaagatccccagcagagaacaggaagagattcttccatcgggtccacttcacaagaactgtggggttcactaacgtcacacatgagatcaagccaacttggtccagtactagcagtggcgctggtggctatcattgtcctattgcaggtaaccatcatagttctgctaactaggtccccccaggtccagatggctcctcacgggatctcgacgggcagtttcgggtacagcaaagaaagcatggagtgggcgcagaagcgcctcagcctactcagggaggagatgcaggtggctgaggcgcacatggagaggatgaggcacgagtttgcctggctcagatcttacctggagggactggagaggctgaggcgccgcacatgaccgcagcgcgtgtacacgacaggggcacgattccgcgatgcggattcgttggtatacagtacgaactcggagacgttgttcaggtttcttcttcttctgtgttgctacagaccgtacagatgcaaacggagagctggtgccgtggtggtggtgttgcagaggtattgccgtaaggcagaactgccagatcccggtacagcattcaatgtaaatagctgggggacgtgtcattgccatgacgatacagcggcgtgatgttagaaacctcgcactacttttttttttcagaaagtaaaaaactttttgtggtttatgtattgctcgggtggcaaaaggaaa

SEQ ID NO: 212400 - DNA, 3546 bp, Zea Mays
caacagtgacgctagctctcaagcaaatagaggcagcagagcagaccatagagagtggagatcagccagcagcagcagcagcaaggctgagccgccgcccccacgagtggagtggaggcagcagccagcgacaaggctgaatccgggaggtccgcgcgccgcagccgtggctgccatcgcaggcgccgccgccgccgccgcttgtgagaggcgctcgtcttgtattcacgaggagggcgacgacaccccctcggcaaaggagctggccactggccccgccctgtgatggctgctgcccgtgccccggcggcgaggggacgcgtaggtgctccggaggcggcagctgcgtggaggggcggcggtctccgcgcgaagcaggccgggcgcgccagctgccgcggcgcgtagaccgagcgactggacgccgtctctctctctctctctctcgcaatccgagtcgggggctcggggctagggttttggcgctgagggcgccggggttctagcggagcggctggaggaagaggggagggggcggggggcacggagatggcggtcggggacgcgctgcgacggctgtgcgaggagatcgggtggtcctacgccgtcttctggaaggccatcggtgctgcagaccccgtgcatttggtgcaggaggacggctactgtggccacacgtcatgtcctgtcggatctgagccttccgaatctctgcccagcgacgccgggtgctctgttcctgctgctaacaccatctgctcgcttgttcacagcgttatggcgtcgcaggtccatgtcgtcggacaagggaccgtaggccgtgctgcgttcagtggcaaccaccaatggatcgtccgcggtaccgccaatggtcacgggctctcctccgaggttgctgcggagatgaacaatcagttcagagttggcattcagacaattgcgatcattcctgtgctgccacggggtgtcctgcagttaggctctgctggtttggttatggaaaacataaattttgtgatgtttgcaaagaagttgtgttctcagctaaacaaccgttcaagcatggctgcatctgcttcggctaaaaacgctttaagtcagcatggccagtcacgtcctgatactgcaactgtgtcaactaggacaccaccaaatgcattgctgaatgcatctttgcttaaggttgcacaacagagtggtcaccctgttagagagcacgttgtctatgctgagcctgaccttaggtttagacaacaagcatccttctgcgagaaccaatttggaagtaatttacagagtgttgttatgaactcaagtttgacctccccaagcttggcatcagttaaaaagcagccactcttgatgaacagcattgggcagttacagttcagtaattatgtgcattcatcggcagatttggcaagagatgtcatattaaaatcccttgtgcgccaggactcttctgtctgcgaaactacaaacatgaatatgcatcgtggaagatatatggtatccaatgatataaatggttctggggattttgattttctccctgtaggtgccaaagcaagcagagccaacttatcaaccagtgtgtcgagtcaaatattggaccacacaacaagaacactgcagcaaaaacagtctcttgtcccattcaaagtcacccaatcttctgaattcaataagaaaatggagaaccctgaaaatggatcatttcaaaccccttcagttccaacttctgaatctggtggtcaggtttctaacagtttcaacatggaccaagagaatcaattgattatgtcaaacaatgtacggcaagttcaaaagattaatagatttagtgatccaagtgctaatgtaagcactcagagaatgaagaacagggatgtatgcgagtcgggaatgcccattgagagaggttcctcgttgctagtggagcctggtgcagataatgacttgtttgatatgcttggttctgaatttcatcagttctcccacaacgttgggtctgatttggtcacctggagtggtacagagtctcagaattcagatagagatggccctgaatcatcaatatatctcaatagctcaccccttttcagttcgttagacaacgagcttcactattctggtatcttatcactaactgatactgatcaactattggatgctgtcatctcaaatgtcaatccaagtagtaaacagtgtcctgatgatagtgcttcttgcaagactgcattgacggatgttcctagcacatctcatcttggttcaatagacttgaagagatgtgagtcctccggcgttccttcagtgctaattaagcacgaattggcacagcttgttaagcaaccatgtatttttgacaaatctgagaactgtctttcccaaaataatggaatgcacaagtctcagatacgcctttggattgagagtggtcagaacatgaaatgtgaaagtacttcagcttctaacagcaaaggtcttgatacgccaagcaaggcgaatcgcaagagatctcgacccggtgaaagtgctaagccacgacctaaggaccggcagctgatacaggaccgtattaaagagcttcgtgagcttgtaccgaatggggcaaagcattgatggtttgttggagaagacggttaagcacatgcttttcttacaaagtgtgacgaagaatgcagacaagctcaaggactctaccgagtctaagatacttggtagtgaaaatggccccctttggaaagactacttcgaaggtggggctacctgggcttttgatgtcggctctcagtctatgacatgtccaatcattgttgaggatcttgaccgacctcgtcagatgcttgtggagatgctttgcgaggatagaggaatcttcttggagatagctgatttcatcaaaggactaggactgactatcttgaggggtgtgatggaaatgcgcaaaagtaaaatctgggcacggttcactgttgaggcgaaccgggacgtaaccagaatggagatctttctatcgcttgtgcgcttattggagccaaactgtgacggcagtgcagcggcggagaacgctagcaacatgaacatgcctcttggcttggtgcaccaacctgtcatcccagcaacaggcagcatccaatgagactagaggaaaccctgaagcatcttcccaagtgctaagagcaggagctcaactaacttctgcagtgactagcatcgccaatatgccagtgcatcgcctgcttttcctgagacatcttaatccgtgcaaatgtgacatccttcatgagaccaggtcgcagaaatggaagaaggaaaacaacgccaagagtgattgttaggcagtgttttgtttgtatgatcttagtttgtttgttagttagcgctgtttggtcgtatattagcggatttttttggtactgttattcagaatggaaattcttgggttggtttatttcacaccaaaaaagagagatggaataccacctttgttataaatcttctcacatcagaaccagttagcatgactagtggaaaaacacc

SEQ ID NO: 212401 - DNA, 2828 bp, Zea Mays
cttttgactaaaccaagtcgcttttgttgctgcggagatgaacaatcagttcagagttggcattcagacaattgcgatcattcctgtgctgccacggggtgtcctgcagttaggctctgctggtttggttatggaaaacataaattttgtgatgtttgcaaagaagttgtgttctcagctaaacaaccgttcaagcatggctgcatctgcttcggctaaaaacgctttaagtcagcatggccagtcacgtcctgatactgcaactgtgtcaactaggacaccaccaaatgcattgctgaatgcatctttgcttaaggttgcacaacagagtggtcaccctgttagagagcacgttgtctatgctgagcctgaccttaggtttagacaacaagcatccttctgcgagaaccaatttggaagtaatttacagagtgttgttatgaactcaagtttgacctccccaagcttggcatcagttaaaaagcagccactcttgatgaacagcattgggcagttacagttcagtaattatgtgcattcatcggcagatttggcaagagatgtcatattaaaatcccttgtgcgccaggactcttctgtctgcgaaactacaaacatgaatatgcatcgtggaagatatatggtatccaatgatataaatggttctggggattttgattttctccctgtaggtgccaaagcaagcagagccaacttatcaaccagtgtgtcgagtcaaatattggaccacacaacaagaacactgcagcaaaaacagtctcttgtcccattcaaagtcacccaatcttctgaattcaataagaaaatggagaaccctgaaaatggatcatttcaaaccccttcagttccaacttctgaatctggtggtcaggtttctaacagtttcaacatggaccaagagaatcaattgattatgtcaaacaatgtacggcaagttcaaaagattaatagatttagtgatccaagtgctaatgtaagcactcagagaatgaagaacagggatgtatgcgagtcgggaatgcccattgagagaggttcctcgttgctagtggagcctggtgcagataatgacttgtttgatatgcttggttctgaatttcatcagttctcccacaacgttgggtctgatttggtcacctggagtggtacagagtctcagaattcagatagagatggccctgaatcatcaatatatctcaatagctcaccccttttcagttcgttagacaacgagcttcactattctggtatcttatcactaactgatactgatcaactattggatgctgtcatctcaaatgtcaatccaagtagtaaacagtgtcctgatgatagtgcttcttgcaagactgcattgacggatgttcctagcacatctcatcttggttcaatagacttgaagagatgtgagtcctccggcgttccttcagtgctaattaagcacgaattggcacagcttgttaagcaaccatgtatttttgacaaatctgagaactgtctttcccaaaataatggaatgcacaagtctcagatacgcctttggattgagagtggtcagaacatgaaatgtgaaagtacttcagcttctaacagcaaaggtcttgatacgccaagcaaggcgaatcgcaagagatctcgacccggtgaaagtgctaagccacgacctaaggaccggcagctgatacaggaccgtattaaagagcttcgtgagcttgtaccgaatggggcaaagtgtagcattgatggtttgttggagaagacggttaagcacatgcttttcttacaaagtgtgacgaagaatgcagacaagctcaaggactctaccgagtctaagatacttggtagtgaaaatggccccctttggaaagactacttcgaaggtggggctacctgggcttttgatgtcggctctcagtctatgacatgtccaatcattgttgaggatcttgaccgacctcgtcagatgcttgtggagatgctttgcgaggatagaggaatcttcttggagatagctgatttcatcaaaggactaggactgactatcttgaggggtgtgatggaaatgcgcaaaagtaaaatctgggcacggttcactgttgaggtaatgcagctaaatttaataatcaggattctttcagatcaaaatctgaagtaaaaaacagtaactagaagttcaaaatctgaagtaataaacagtaaccagaatggaaatccaaaggaatgagatgacgctgttccatgcaggcgaaccgggacgtaaccagaatggagatctttctatcgcttgtgcgcttattggagccaaactgtgacggcagtgcagcggcggagaacgctagcaacatgaacatgcctcttggcttggtgcaccaacctgtcatcccagcaacaggcagcatccaatgagactagaggaaaccctgaagcatcttcccaagtgctaagagcaggagctcaactaacttctgcagtgactagcatcgccaatatgccagtgcatcgcctgcttttcctgagacatcttaatccgtgcaaatgtgacatccttcatgagaccaggtcgcagaaatggaagaaggaaaacaacgccaagagtgattgttaggcagtgttttgtttgtatgatcttagtttgtttgttagttagcgctgtttggtcgtatattagcggatttttttggtactgttattcagaatggaaattcttgggttggtttatttcacaccaaaaaagagagatggaataccacctttgttataaatcttctcacatcagaaccagttagcatgactagtggaaaaacacc

SEQ ID NO: 212402 - DNA, 1325 bp, Zea Mays
accatatatctctccacctacaccctgcctgcctgcttgcaattgcaattgcaaccaataaccatatacacacagctagctagcttcacatatcgcaagcacccagatcggcaggaccagcggcagcggcaacggtgccggcaagaagcaggccgcgcgctccactctccgaccccggccgaaacaaaggtgatggcgcagctgccgccgagggcgccggggggcgccgcgccgcaggaccactggtcggcggcgggggagttcctggggttcgccgcggccagacgcggcgcgcaccgccgctcggcgagcgactcggccgcgttcctcgaggccctgcccatggaagacgtcatcggcggcgacggcttcgaccgcctcgacgacgaccagctcatgtccatgttctccgacgtcgacgcgccggccgtctccgccggggacgcggcgcagctcatggacgtggcggacgccgacgcggacgcggacgacgacgggtcggccgcctcgtcgcgcgccgccgcggacggcgtcgccgctgaccccaaaagggtcaagaggatattagcaaacaggcagtcagcgcaaaggtcacgagtcaggaagctacagtacatctccgagctcgaacggagtgtcaccggtctccagatggaggtgtcagcgctgtcccctcgcgtggccttcctcgaccaccagcgatcgctgctcaccgtcggcaacagccacctcaagcaacgaatcgcggcgctcgcccaagacaagatcttcaaggatggtatctcatcaagaggcgctgaagaaggagatcgagcggctacgccatgtgtaccagcagcagcagcagcagcagcagatcaaggtggccaccaccggcggcgccgacatcgccgcggccgcctccatgcaggccaggcaagagctgctcgcgtgcgagggcgctgccattcgatagcagatcgagggcggaggcgttcaattggcagtgccacaacaaccagcaccgaactttgtgccgggttcctccttttctcagacaagttgttcgtcgtgcgtgcaaatacacgcgcctgttattagcctattgattttatttctgtgcagtcttaattaattcgtatatgtgatgtattcctcctcttcgtccctagcaaaaaagaaaaagaaacggcagtcgtgctgggatggggactttgttgtgaatgaatgaatgtatttggttatttggacgggcttaccgtttgtgttggtaaagattttttttctcccctccaaaaggtgatcggattcttcaggtgttcaagtcattttttacaactgcaaat

SEQ ID NO: 212403 - DNA, 1740 bp, Zea Mays
tagccctagaccacatgcagcatgatcgatgcaatgcaagcagtctctctcatctcatgcaatattgcaaacgcagtgccccacctcacaaggccatccccccatgcatgtgcactcacacacacacacaccatatatctctccacctacaccctgcctgcctgcttgcaattgcaattgcaaccaataaccatatacacacagctagctagcttcacatatcgcaagcacccagatcggcaggaccagcggcagcggcaacggtgccggcaagaagcaggccgcgcgctccactctccgaccccggccgaaacaaaggtgatggcgcagctgccgccgagggcgccggggggcgccgcgccgcaggaccactggtcggcggcgggggagttcctggggttcgccgcggccagacgcggcgcgcaccgccgctcggcgagcgactcggccgcgttcctcgaggccctgcccatggaagacgtcatcggcggcgacggcttcgaccgcctcgacgacgaccagctcatgtccatgttctccgacgtcgacgcgccggccgtctccgccggggacgcggcgcagctcatggacgtggcggacgccgacgcggacgcggacgacgacgggtcggccgcctcgtcgcgcgccgccgcggacggcgtcgccgctgaccccaaaagggtcaagaggttagtggcaactctgctagctagtacattttttaactagtagtggtcgtcttttccattcgtctacggatctaccatggcggccaaacagtagtttttttataaaaaaaaaagaaaaagaaaaattgaagatgtaatttgtgagttgtgactgcccggtctcagaagtcagaactcaggatcggagtgcctttaatttgtcgtttttgctgttcatctcttagattaacatatttcaaatcagaatggccaagcaatagtttcgatttctctgttcccttgggtttcaggatattagcaaacaggcagtcagcgcaaaggtcacgagtcaggaagctacagtacatctccgagctcgaacggagtgtcaccggtctccagatggaggtgtcagcgctgtcccctcgcgtggccttcctcgaccaccagcgatcgctgctcaccgtcggcaacagccacctcaagcaacgaatcgcggcgctcgcccaagacaagatcttcaaggatgctcatcaagaggcgctgaagaaggagatcgagcggctacgccatgtgtaccagcagcagcagcagcagcagcagatcaaggtggccaccaccggcggcgccgacatcgccgcggccgcctccatgcaggccaggcaagagctgctcgcgtgcgagggcgctgccattcgatagcagatcgagggcggaggcgttcaattggcagtgccacaacaaccagcaccgaactttgtgccgggttcctccttttctcagacaagttgttcgtcgtgcgtgcaaatacacgcgcctgttattagcctattgattttatttctgtgcagtcttaattaattcgtatatgtgatgtattcctcctcttcgtccctagcaaaaaagaaaaagaaacggcagtcgtgctgggatggggactttgttgtgaatgaatgaatgtatttggttatttggacgggcttaccgtttgtgttggtaaagattttttttctcccctccaaaaggtgatcggattcttcaggtgttcaagtcattttttacaactgcaaat

SEQ ID NO: 212404 - DNA, 3291 bp, Zea Mays
cactgggttatcttgttgattggtccaggtcaagcaaattacgaataagcccacaaagtgagaaaggatcagaagttattattgatttagaagcactgtctggcttcactgaattttttcttgagatccaagataatatatttccccatcgtattgctgcttttggagtgtctttacaacctgtttcttataacttgcctgtgccatcacaagtagtactaatagctccaagatatgttctttcaaatgagtctgatgctgcaattgctgttcgtcaatgttttgttgagtggatgtggttaccaattatgtagcacggcattgatggattgacagttgaagctaaacagcgggctgctttacagacatggaaacctgggaaaaaacgagaagtaaattactttgatttatttgttaagaagcacagaaatgtttttgaggattctcacatttttatccagttctgtccaaaagaacctggatacagttggtctggaccaatctgtgtttcatcaattggtcgttttttcttgaaatttagaagattagaaggaatgctggaagatggtattaaaagagaccctttgaatgctgggaagctgaaactatttgcttctgtcgatgttgctcaagagacaacttcttttgtgctacacttcactaaaccaccgaaggttacactcccatatcgaatagaaaattacttgagcgaatcatctatcctgtatttccagaaggattcagttgattcagatgtattacaccctcaagagtcagaacagtatgcttgggatgatttaagttcaccgcgcaaactggttgtccgaattgttgatacacctgcattgcgtgaaattaaaatagataaaatcagcccatggaagccatttttgaagatgcgccaaaatagcaggcttaatctggatttctcattcagtggtggactcaattcgagaaaacagagatttgatgaatcatttggcttgagagtgttcaaaattggctacgaagtgtatgccgatggtttaacaagagttttacgaatttgtgaacatgcagataatcccaaaattgagaaaattcaatggccaatagcaaatatacagttcagaatttcttatgtgtgtattcatcttcttgacaaggaccagaatggggaaaatgtccaattgccatctacaattttagcagcaagacttcagcatgtttcttctgattcagttgtcacaaatagattcaagcaagtatctgttgcaattcattcattgaatgtggatgaaaaatgggaaggggcttcaattgggacaattcttaggaggaacaagcttcaggatgctactctcgatgaaaatattcttcgtatgatctttgtactgaattcaactgactccagtgtcaaacaaatacagtattgtgccatcatcctacagcctgttgatcttaagattgatgaggaaacgttaatgaagctagtaccattttggagagcatctcttgcaccttcaggcacgacaagcacacaattttatttcagacgttttgaagtacatccaattaagatcatagcaagctttcggcctggtggccgacgcacaacatatagttctgctcaagaggctctgagggcactacttcatagtgttataaaggtgcctgaaattagcaactcagctgtggagctcaatggggttctcctaaatcatgctttagttacatttcgtgagctacttctaaaatgcgctcagcactactcatggtatgtattaagggcaatttatgtaacaaagggaagcaaattgcttcctccatcttttgcctcaatttttgatgactctgcttcatctgttcttgatgtcttcttcgacccttctgatggatcgctcaacgtccctggccttaccataggcatgtttaaatttataagcaagaacatgaagtcgggtggtttttctggaacaaaacggtaccttggtgatctcgggaaaactgttactggtttccaccagggcatgttgaggttggcgatggagccatctgtcttagggcaggctataatggagggaggtcctgacagaaagatcaaacttgatcatagccctggacttgatgagctatacattgaagggtacctgcaggctatgttggatgtcatgtataagcaagaatacctccgtgtcagggtgattgatgaccaggttatactgaagaatctaccaccaaatagcgccctgataaacgaaatcgtggacaacgtcaaaagctttcttgtgagcaaggcactgttgaaaggcgattcttccacagttcgaccgatgcgccatctgcgaaatgaacctgaatggaggattgccccaacggtgctcaccctctgcgagcacctttttgtgagcttcgctgtgcgtgtgctgcaccgggaagccagcaaggccatcgctggagtcatgtcgagagtgaagaaaccgaccggagaggaggtcgaaggcgactcgcccgcatctggtggcgtcctgtgtaagcggaataggctgtggactgtcgggaggtttgccgtctcgggcatggtcgcctatgtagatggccggctgtgccggcacatacccaaccccatagcccggaggatcgtcagcgggtttctactgagcttcatcgaaaacaggggcaacgaataagcgggcagccggacaggtgataaaagggctcgccttctgccacctgctaataaggcgtaccatggaccatggtaaataggcgtgcacgttgtacaaagaaccgaggtgtggtagtgctcttgagccgtaaccgatctctgcatagagctgtgcatcaattttgaccgccttcaggcccacgtttggtgtacagaaacactgggacagtaattccgcagatgctacttcctgcctacatttcgttgacatggactcgtgcttagagtaagtttaatagtccacaacgagccttttcacataacaaactcggttagaggccctttcacatagtctatctatatcatcttattatacttgttctacatgcaaagtgataaatagcatggctatgataaacgtatggagccgttggtgtgttgatcatgagtcactccactgggtatatctctaattttattgtttctaaattcaataaggtgttcttgttttaaccgccagcatgtttattatggttgtcaatgcagcgattaattatagttcacacgtgtacatgtgttgttacaaattcactattgattgggtcaagttaaacataaaaatacctaatttcttgacgatccaa

SEQ ID NO: 212405 - DNA, 3410 bp, Zea Mays
caattctctggagtccagtatggccaatgttcctcttccaagccacaaggatgccaccactgtttcccatcgaaggtcaagcaaattacgaataagcccacaaagtgagaaaggatcagaagttattattgatttagaagcactgtctggcttcactgaattttttcttgagatccaagataatatatttccccatcgtattgctgcttttggagtgtctttacaacctgtttcttataacttgcctgtgccatcacaagtagtactaatagctccaagatatgttctttcaaatgagtctgatgctgcaattgctgttcgtcaatgttttgttgagcacggcattgatggattgacagttgaagctaaacagcgggctgctttacagacatggaaacctgggaaaaaacgagaagtaaattactttgatttatttgttaagaagcacagaaatgtttttgaggattctcacatttttatccagttctgtccaaaagaacctggatacagttggtctggaccaatctgtgtttcatcaattggtcgttttttcttgaaatttagaagattagaaggaatgctggaagatggtattaaaagagaccctttgaatgctgggaagctgaaactatttgcttctgtcgatgttgctcaagagacaacttcttttgtgctacacttcactaaaccaccgaaggttacactcccatatcgaatagaaaattacttgagcgaatcatctatcctgtatttccagaaggattcagttgattcagatgtattacaccctcaagagtcagaacagtatgcttgggatgatttaagttcaccgcgcaaactggttgtccgaattgttgatacacctgcattgcgtgaaattaaaatagataaaatcagcccatggaagccatttttgaagatgcgccaaaatagcaggcttaatctggatttctcattcagtggtggactcaattcgagaaaacagagatttgatgaatcatttggcttgagagtgttcaaaattggctacgaagtgtatgccgatggtttaacaagagttttacgaatttgtgaacatgcagataatcccaaaattgagaaaattcaatggccaatagcaaatatacagttcagaatttcttatgtgtgtattcatcttcttgacaaggaccagaatggggaaaatgtccaattgccatctacaattttagcagcaagacttcagcatgtttcttctgattcagttgtcacaaatagattcaagcaagtatctgttgcaattcattcattgaatgtggatgaaaaatgggaaggggcttcaattgggacaattcttaggaggaacaagcttcaggatgctactctcgatgaaaatattcttcgtatgatctttgtactgaattcaactgactccagtgtcaaacaaatacagtattgtgccatcatcctacagcctgttgatcttaagattgatgaggaaacgttaatgaagctagtaccattttggagagcatctcttgcaccttcaggcacgacaagcacacaattttatttcagacgttttgaagtacatccaattaagatcatagcaagctttcggcctggtggccgacgcacaacatatagttctgctcaagaggctctgagggcactacttcatagtgttataaaggtgcctgaaattagcaactcagctgtggagctcaatggggttctcctaaatcatgctttagttacatttcgtgagctacttctaaaatgcgctcagcactactcatggtatgtattaagggcaatttatgtaacaaagggaagcaaattgcttcctccatcttttgcctcaatttttgatgactctgcttcatctgttcttgatgtcttcttcgacccttctgatggatcgctcaacgtccctggccttaccataggcatgtttaaatttataagcaagaacatgaagtcgggtggtttttctggaacaaaacggtaccttggtgatctcgggaaaactgttaaaactgcaagttcgaacgctctctttgctgctgtcacagaaatttcagatagtgttgttagaggagcggaaacaaatggtttgaatggcatggttactggtttccaccagggcatgttgaggttggcgatggagccatctgtcttagggcaggctataatggagggaggtcctgacagaaagatcaaacttgatcatagccctggacttgatgagctatacattgaagggtacctgcaggctatgttggatgtcatgtataagcaagaatacctccgtgtcagggtgattgatgaccaggttatactgaagaatctaccaccaaatagcgccctgataaacgaaatcgtggacaacgtcaaaagctttcttgtgagcaaggcactgttgaaaggcgattcttccacagttcgaccgatgcgccatctgcgaaatgaacctgaatggaggattgccccaacggtgctcaccctctgcgagcacctttttgtgagcttcgctgtgcgtgtgctgcaccgggaagccagcaaggccatcgctggagtcatgtcgagagtgaagaaaccgaccggagaggaggtcgaaggcgactcgcccgcatctggtggcgtcctgtgtaagcggaataggctgtggactgtcgggaggtttgccgtctcgggcatggtcgcctatgtagatggccggctgtgccggcacatacccaaccccatagcccggaggatcgtcagcgggtttctactgagcttcatcgaaaacaggggcaacgaataagcgggcagccggacaggtgataaaagggctcgccttctgccacctgctaataaggcgtaccatggaccatggtaaataggcgtgcacgttgtacaaagaaccgaggtgtggtagtgctcttgagccgtaaccgatctctgcatagagctgtgcatcaattttgaccgccttcaggcccacgtttggtgtacagaaacactgggacagtaattccgcagatgctacttcctgcctacatttcgttgacatggactcgtgcttagagtaagtttaatagtccacaacgagccttttcacataacaaactcggttagaggccctttcacatagtctatctatatcatcttattatacttgttctacatgcaaagtgataaatagcatggctatgataaacgtatggagccgttggtgtgttgatcatgagtcactccactgggtatatctctaattttattgtttctaaattcaataaggtgttcttgttttaaccgccagcatgtttattatggttgtcaatgcagcgattaattatagttcacacgtgtacatgtgttgttacaaattcactattgattgggtcaagttaaacataaaaatacctaatttcttgacgatccaa

SEQ ID NO: 212406 - DNA, 3394 bp, Zea Mays
caattctctggagtccagtatggccaatgttcctcttccaagccacaaggatgccaccactgtttcccatcgaaggtcaagcaaattacgaataagcccacaaagtgagaaaggatcagaagttattattgatttagaagcactgtctggcttcactgaattttttcttgagatccaagataatatatttccccatcgtattgctgcttttggagtgtctttacaacctgtttcttataacttgcctgtgccatcacaagtagtactaatagctccaagatatgttctttcaaatgagtctgatgctgcaattgctgttcgtcaatgttttgttgagcacggcattgatggattgacagttgaagctaaacagcgggctgctttacagacatggaaacctgggaaaaaacgagaagtaaattactttgatttatttgttaagaagcacagaaatgtttttgaggattctcacatttttatccagttctgtccaaaagaacctggatacagttggtctggaccaatctgtgtttcatcaattggtcgttttttcttgaaatttagaagattagaaggaatgctggaagatggtattaaaagagaccctttgaatgctgggaagctgaaactatttgcttctgtcgatgttgctcaagagacaacttcttttgtgctacacttcactaaaccaccgaaggttacactcccatatcgaatagaaaattacttgagcgaatcatctatcctgtatttccagaaggattcagttgattcagatgtattacaccctcaagagtcagaacagtatgcttgggatgatttaagttcaccgcgcaaactgatacacctgcattgcgtgaaattaaaatagataaaatcagcccatggaagccatttttgaagatgcgccaaaatagcaggcttaatctggatttctcattcagtggtggactcaattcgagaaaacagagatttgatgaatcatttggcttgagagtgttcaaaattggctacgaagtgtatgccgatggtttaacaagagttttacgaatttgtgaacatgcagataatcccaaaattgagaaaattcaatggccaatagcaaatatacagttcagaatttcttatgtgtgtattcatcttcttgacaaggaccagaatggggaaaatgtccaattgccatctacaattttagcagcaagacttcagcatgtttcttctgattcagttgtcacaaatagattcaagcaagtatctgttgcaattcattcattgaatgtggatgaaaaatgggaaggggcttcaattgggacaattcttaggaggaacaagcttcaggatgctactctcgatgaaaatattcttcgtatgatctttgtactgaattcaactgactccagtgtcaaacaaatacagtattgtgccatcatcctacagcctgttgatcttaagattgatgaggaaacgttaatgaagctagtaccattttggagagcatctcttgcaccttcaggcacgacaagcacacaattttatttcagacgttttgaagtacatccaattaagatcatagcaagctttcggcctggtggccgacgcacaacatatagttctgctcaagaggctctgagggcactacttcatagtgttataaaggtgcctgaaattagcaactcagctgtggagctcaatggggttctcctaaatcatgctttagttacatttcgtgagctacttctaaaatgcgctcagcactactcatggtatgtattaagggcaatttatgtaacaaagggaagcaaattgcttcctccatcttttgcctcaatttttgatgactctgcttcatctgttcttgatgtcttcttcgacccttctgatggatcgctcaacgtccctggccttaccataggcatgtttaaatttataagcaagaacatgaagtcgggtggtttttctggaacaaaacggtaccttggtgatctcgggaaaactgttaaaactgcaagttcgaacgctctctttgctgctgtcacagaaatttcagatagtgttgttagaggagcggaaacaaatggtttgaatggcatggttactggtttccaccagggcatgttgaggttggcgatggagccatctgtcttagggcaggctataatggagggaggtcctgacagaaagatcaaacttgatcatagccctggacttgatgagctatacattgaagggtacctgcaggctatgttggatgtcatgtataagcaagaatacctccgtgtcagggtgattgatgaccaggttatactgaagaatctaccaccaaatagcgccctgataaacgaaatcgtggacaacgtcaaaagctttcttgtgagcaaggcactgttgaaaggcgattcttccacagttcgaccgatgcgccatctgcgaaatgaacctgaatggaggattgccccaacggtgctcaccctctgcgagcacctttttgtgagcttcgctgtgcgtgtgctgcaccgggaagccagcaaggccatcgctggagtcatgtcgagagtgaagaaaccgaccggagaggaggtcgaaggcgactcgcccgcatctggtggcgtcctgtgtaagcggaataggctgtggactgtcgggaggtttgccgtctcgggcatggtcgcctatgtagatggccggctgtgccggcacatacccaaccccatagcccggaggatcgtcagcgggtttctactgagcttcatcgaaaacaggggcaacgaataagcgggcagccggacaggtgataaaagggctcgccttctgccacctgctaataaggcgtaccatggaccatggtaaataggcgtgcacgttgtacaaagaaccgaggtgtggtagtgctcttgagccgtaaccgatctctgcatagagctgtgcatcaattttgaccgccttcaggcccacgtttggtgtacagaaacactgggacagtaattccgcagatgctacttcctgcctacatttcgttgacatggactcgtgcttagagtaagtttaatagtccacaacgagccttttcacataacaaactcggttagaggccctttcacatagtctatctatatcatcttattatacttgttctacatgcaaagtgataaatagcatggctatgataaacgtatggagccgttggtgtgttgatcatgagtcactccactgggtatatctctaattttattgtttctaaattcaataaggtgttcttgttttaaccgccagcatgtttattatggttgtcaatgcagcgattaattatagttcacacgtgtacatgtgttgttacaaattcactattgattgggtcaagttaaacataaaaatacctaatttcttgacgatccaa

SEQ ID NO: 212407 - DNA, 2842 bp, Zea Mays
ttttttttttgtagtcgatctatccaacaagcccggccggaggtttaaacttatcaaatcacgtgaaaagatagctcgccgacgctgacgcagtccggaaacgcgtcgcccagacgcccacacatccatccacaacggtaaagccgccgcggcgatgtcttccgcacccccgcctccgccgtctctgaaccccgaagtgcccccgcgcatcgtccgcgcccccccgcgccggcctcctccgcgcgcgcccggtccgccgccttgggcggagcgtcggcctgccgtgtccgtcgacctcgaccgcggccgtcgctcggtccgcaccgaggtggacggcgtccgcgccgcgtcgctccctgcgcgacaccgcctccgcgtggagggcaaccggtggcagcgggactggaaggtgtccgaggtcgtcgcgcgcttgctcgcgctgcctcatgccgacgcggacgccgtcgacgccgtgctcaactgctgggccggtcgcttcgcacgccgcaacttcccgctgctcatcagagaaattgcaatttctggatccttgaaacatgctgtgcatgtgttccgctggatgaaaaatcaggagaactactgtgctcgcaatgacatttatggcatgatgattaggttacatgctagacacaacaaggttgatcaagcacgtggcctgttctttgagatgcaagaatggcggtgcaagcctaatactgatacatacaactctttgatccatgctcatgctcgagctggccagtggtgttgggccatcaacattatggatgatatgcaacgtgccgctatacctcctagccgaactacgtataataatgttataaatgcatgtggagctgctggtaactggaagaaagctttagaactttgtaagaagatgactgaaaatggtgtagggccagatttgatcacacacaacattgttttgtctgcttttaagaatggagctcagtactcaaaagccatagcttactttgaaattatgaaatcctctaaagttgcccctgatacatgcactatgaatattgtgatccattgccttgtaaagattgggctgtatggggaagctattgagttgtttaactcaatgagggaaagaagaacaacatgtcatccagatgtcgttacatatactagcataatgtattcttattctgtttgtgggcaagctgaaaattgcaaggcggtctttgatataatggttgctgaaggtgtcagacctaatattgtatcctacaatgcacttttgggtgcttacgcctcacatggtatgcacacagaggccttggagacttttaaattactgaagcaaaatgggttgagacctgatatagtttcctatacctccttacttaatgcttatggtagatctgcacagcctgagaaagctagggaggtctttaatgaaatgaggaagaatgcatgcaagccaaataaagtcagttacaatgcacttattgatgcttatggatctgctggaatgttgaaggaagcgattagtctgttgcatgaaatggagcaagatggcattcaaccggatgttatttcaataagtactctgttaacagcatgtggccgctgcaagcagctaactaaaattgacataattcttgcagcagctaagtctcgagggatccaactaaatacagttgcttacaactcaggcatcggaagttatttaagtttgggagattataagaaagctttggtgttatacacgtcaatgagggcaggcaatgtgaagccagatgctgtgacttacaatatactcattagtggatcttgtaaattgggaaggtatgtagagtctctgaaattttttgaagacatgctggacctgaatattcatttgaccaaggaagtctactcatccgtgatttgctcatatgtcaaacagggcaaattaactgaagcagcatctacttttaattctatgaaagaaactggttgcttccccgatgttttgacatatacgacattaattaaagcatatagtgatgatgggagctggaggagagcatgggacctattcaaagagatggaaaataatggcacacagccagatgctattgtctgttcatccctcatggaagcattgaataagggaggtcaacctgaaagggtccttcagttgatagaattcatgaagcaaaaaaagattcaattgaaccaaaaggcttattttgagataatatcttcatgcaccatgttacgagactggaaaacagcaagtcaaataattgaacatttggattcctctctctcatctatttcttttggcacactcaaccatattttaaattttcttggaaaatgtggcaggacagagagcatgatgaagctgttctataagatggtgacttcatgctctactgtgggcctttctacttatacgattctgctgagaaatctcttaattgtggggaaatggagaaagtatgttgaggttttgcagtggatggaagatgctggagtctgcccaacactctatatgtatcaaagcgtgcttccatatatctggagagacaacagtatggactatgttactctcatgcaagaaaaaataaatgcattgagagagaaggtaacatgagcttcagatatgcatttgctcgcttggtatgaactatgaagtactagaagtccataaccgaatactgaaggtagctttagaatgacactagcaggattcaggtaggacataattgtgagtctgcctgccctagtcgggattgaagcaacgaatccctcttcagaaaaaaaaatggatatggtaagagttttctaatataaagttcacaaatattccctctgaaaaaca

SEQ ID NO: 212408 - DNA, 3160 bp, Zea Mays
tgacaaatgaatcatgaactcttgcgagtgggatcactttgcttttttttttttgtagtcgatctatccaacaagcccggccggaggtttaaacttatcaaatcacgtgaaaagatagctcgccgacgctgacgcagtccggaaacgcgtcgcccagacgcccacacatccatccacaacggtaaagccgccgcggcgatgtcttccgcacccccgcctccgccgtctctgaaccccgaagtgcccccgcgcatcgtccgcgcccccccgcgccggcctcctccgcgcgcgcccggtccgccgccttgggcggagcgtcggcctgccgtgtccgtcgacctcgaccgcggccgtcgctcggtccgcaccgaggtggacggcgtccgcgccgcgtcgctccctgcgcgacaccgcctccgcgtggagggcaaccggtggcagcgggactggaaggtgtccgaggtcgtcgcgcgcttgctcgcgctgcctcatgccgacgcggacgccgtcgacgccgtgctcaactgctgggccggtcgcttcgcacgccgcaacttcccgctgctcatcagagaaattgcaatttctggatccttgaaacatgctgtgcatgtgttccgctggatgaaaaatcaggagaactactgtgctcgcaatgacatttatggcatgatgattaggttacatgctagacacaacaaggttgatcaagcacgtggcctgttctttgagatgcaagaatggcggtgcaagcctaatactgatacatacaactctttgatccatgctcatgctcgagctggccagtggtgttgggccatcaacattatggatgatatgcaacgtgccgctatacctcctagccgaactacgtataataatgttataaatgcatgtggagctgctggtaactggaagaaagctttagaactttgtaagaagatgactgaaaatggtgtagggccagatttgatcacacacaacattgttttgtctgcttttaagaatggagctcagtactcaaaagccatagcttactttgaaattatgaaatcctctaaagttgcccctgatacatgcactatgaatattgtgatccattgccttgtaaagattgggctgtatggggaagctattgagttgtttaactcaatgagggaaagaagaacaacatgtcatccagatgtcgttacatatactagcataatgtattcttattctgtttgtgggcaagctgaaaattgcaaggcggtctttgatataatggttgctgaaggtgtcagacctaatattgtatcctacaatgcacttttgggtgcttacgcctcacatggtatgcacacagaggccttggagacttttaaattactgaagcaaaatgggttgagacctgatatagtttcctatacctccttacttaatgcttatggtagatctgcacagcctgagaaagctagggaggtctttaatgaaatgaggaagaatgcatgcaagccaaataaagtcagttacaatgcacttattgatgcttatggatctgctggaatgttgaaggaagcgattagtctgttgcatgaaatggagcaagatggcattcaaccggatgttatttcaataagtactctgttaacagcatgtggccgctgcaagcagctaactaaaattgacataattcttgcagcagctaagtctcgagggatccaactaaatacagttgcttacaactcaggcatcggaagttatttaagtttgggagattataagaaagctttggtgttatacacgtcaatgagggcaggcaatgtgaagccagatgctgtgacttacaatatactcattagtggatcttgtaaattgggaaggtatgtagagtctctgaaattttttgaagacatgctggacctgaatattcatttgaccaaggaagtctactcatccgtgatttgctcatatgtcaaacagggcaaattaactgaagcagcatctacttttaattctatgaaagaaactggttgcttccccgatgttttgacatatacgacattaattaaagcatatagtgatgatgggagctggaggagagcatgggacctattcaaagagatggaaaataatggcacacagccagatgctattgtctgttcatccctcatggaagcattgaataagggaggtcaacctgaaagggtccttcagttgatagaattcatgaagcaaaaaaagattcaattgaaccaaaaggcttattttgagataatatcttcatgcaccatgttacgagactggaaaacagcaagtcaaataattgaacatttggattcctctctctcatctatttcttttggcacactcaaccatattttaaattttcttggaaaatgtggcaggacagagagcatgatgaagctgttctataagatggtgacttcatgctctactgtgggcctttctacttatacgattctgctgagaaatctcttaattgtggggaaatggagaaagtatgttgaggttttgcagtggatggaagatgctggagtctgcccaacactctatatgtatcaaagcgtgcttccatatatctggagagacaacagtatggactatgttactctcatgcaagaaaaaataaatgcattgagagagaaggtaacatgagcttcagatatgcatttgctcgcttggtatgaactatgaagtactagaagtccataaccgaatactgaaggtagctttagaatgacactagcaggattcaggtaggacataattgtgagtctgcctgccctagtcgggattgaagcaacgaatccctcttcagaaaaaaaaatggatatggcacttcaagaacttaagaaacgacatgattctatagttgataaaaggctggtcagatacgcgcacgaggagtgtagctggtggagcaggccgcgtgcatacaaccttggtctggcatgtattcctagaacactttttattttgtttttccatcgtatattttaattgaaatgtatattttaattaaaatgttcaatcactaaaccaattttagatctgtgttcttgatatttttacgaacaaaactagactacacttgctatataaattttaaagatttatttatttatttattttatcccatctttattttggtgcggat

SEQ ID NO: 212409 - DNA, 2996 bp, Zea Mays
ttttttttttgtagtcgatctatccaacaagcccggccggaggtttaaacttatcaaatcacgtgaaaagatagctcgccgacgctgacgcagtccggaaacgcgtcgcccagacgcccacacatccatccacaacggtaaagccgccgcggcgatgtcttccgcacccccgcctccgccgtctctgaaccccgaagtgcccccgcgcatcgtccgcgcccccccgcgccggcctcctccgcgcgcgcccggtccgccgccttgggcggagcgtcggcctgccgtgtccgtcgacctcgaccgcggccgtcgctcggtccgcaccgaggtggacggcgtccgcgccgcgtcgctccctgcgcgacaccgcctccgcgtggagggcaaccggtggcagcgggactggaaggtgtccgaggtcgtcgcgcgcttgctcgcgctgcctcatgccgacgcggacgccgtcgacgccgtgctcaactgctgggccggtcgcttcgcacgccgcaacttcccgctgctcatcagagaaattgcaatttctggatccttgaaacatgctgtgcatgtgttccgctggatgaaaaatcaggagaactactgtgctcgcaatgacatttatggcatgatgattaggttacatgctagacacaacaaggttgatcaagcacgtggcctgttctttgagatgcaagaatggcggtgcaagcctaatactgatacatacaactctttgatccatgctcatgctcgagctggccagtggtgttgggccatcaacattatggatgatatgcaacgtgccgctatacctcctagccgaactacgtataataatgttataaatgcatgtggagctgctggtaactggaagaaagctttagaactttgtaagaagatgactgaaaatggtgtagggccagatttgatcacacacaacattgttttgtctgcttttaagaatggagctcagtactcaaaagccatagcttactttgaaattatgaaatcctctaaagttgcccctgatacatgcactatgaatattgtgatccattgccttgtaaagattgggctgtatggggaagctattgagttgtttaactcaatgagggaaagaagaacaacatgtcatccagatgtcgttacatatactagcataatgtattcttattctgtttgtgggcaagctgaaaattgcaaggcggtctttgatataatggttgctgaaggtgtcagacctaatattgtatcctacaatgcacttttgggtgcttacgcctcacatggtatgcacacagaggccttggagacttttaaattactgaagcaaaatgggttgagacctgatatagtttcctatacctccttacttaatgcttatggtagatctgcacagcctgagaaagctagggaggtctttaatgaaatgaggaagaatgcatgcaagccaaataaagtcagttacaatgcacttattgatgcttatggatctgctggaatgttgaaggaagcgattagtctgttgcatgaaatggagcaagatggcattcaaccggatgttatttcaataagtactctgttaacagcatgtggccgctgcaagcagctaactaaaattgacataattcttgcagcagctaagtctcgagggatccaactaaatacagttgcttacaactcaggcatcggaagttatttaagtttgggagattataagaaagctttggtgttatacacgtcaatgagggcaggcaatgtgaagccagatgctgtgacttacaatatactcattagtggatcttgtaaattgggaaggtatgtagagtctctgaaattttttgaagacatgctggacctgaatattcatttgaccaaggaagtctactcatccgtgatttgctcatatgtcaaacagggcaaattaactgaagcagcatctacttttaattctatgaaagaaactggttgcttccccgatgttttgacatatacgacattaattaaagcatatagtgatgatgggagctggaggagagcatgggacctattcaaagagatggaaaataatggcacacagccagatgctattgtctgttcatccctcatggaagcattgaataagggaggtcaacctgaaagggtccttcagttgatagaattcatgaagcaaaaaaagattcaattgaaccaaaaggcttattttgagataatatcttcatgcaccatgttacgagactggaaaacagcaagtcaaataattgaacatttggattcctctctctcatctatttcttttggcacactcaaccatattttaaattttcttggaaaatgtggcaggacagagagcatgatgaagctgttctataagatggtgacttcatgctctactgtgggcctttctacttatacgattctgctgagaaatctcttaattgtggggaaatggagaaagtatgttgaggttttgcagtggatggaagatgctggagtctgcccaacactctatatgtatcaaagcgtgcttccatatatctggagagacaacagtatggactatgttactctcatgcaagaaaaaataaatgcattgagagagaaggtaacatgagcttcagatatgcatttgctcgcttggtatgaactatgaagtactagaagtccataaccgaatactgaaggtagctttagaatgacactagcaggattcaggtaggacataattgtgagtctgcctgccctagtcgggattgaagcaacgaatccctcttcagaaaaaaaaatggatatggcacttcaagaacttaagaaacgacatgattctatagttgataaaaggagttgatgggtgaccaagatgactatgctaccgtgctacggatttactgactgcaaaggcctacttgagcgaattcaatagtaggggatatatcattgtgaaaccgtcctctaagtagaggtctcctaatgacctaatccttgataaaaaaaat

SEQ ID NO: 212410 - DNA, 1482 bp, Zea Mays
gacttcgccaaaaacgaaaaacctcaccggctccattccaatccatcctttccttatcccctctccctcccttcgttcgccatggcaaccgtgttcctccgttccctcgccatggccatggccgacaccgcgctcccgccctcccacaagctcctccctacggtttccctgccgctcctcccctcgtccacccgcgccgcgccgctcctcctctgcgccagccgccgcctgccgcccgcgcccctcgttgcctcatccgacgccgtcgagacgaacattgaatgggtcgacgacgacgaggaggaggctggagaagccttcgacgaggagggtggggatgttgaggaggaggtgctggcctcaggcgacgagggtgagggggagtacgccgcggtggagccgcccgaggaggcaaaggtctacgttgggaacctcccctacgacatcgaaagcgagggactcgcgcagctcttcgaccaggccggcgtcgtcgaggtcgccgaggttatttacaacaaagagactggccagagccgtgggtttggctttgttaccatgagcactattgaggaagctgataaagccattgagatgttcaaccgctattgggaggcttctgaatgtaaacagggcatctcctaggggcactcgcatggaaaggcctccgagacaatttgcgcctgctttcagagcttatgttggcaacttgccatggcaagctgatgactctaggctggtgcaattgttcagcgagtacggagaagtcgttaatgctgcggttgtctatgatagagaaaccgggcgctcacgaggattcggttttgtaacgatggtgtcgaaggaggaactcgacgacgctatctctgccctggatggacaggaattggacggccgccctcttcgggtgaacgttgcagcagagcgaccacagaggggcttttgatgcgggcggcggtacgagagagatggctgcttgtttgtgataagagcacggagacacaacggaggaggaacggtacaaattagcggaagttgatgctgtcacaagttgctagatccctcccttagcttcgtgattttggttcttgtcgacatcatcatgagttaaattatccaagtaggcttctatgtttgatctatcccgattcctgatgccttgtcacattatcatcgtggcaaatgttttgttggtaaaaccataggagcaaacggagattatttatatctggcgtataaaaccgtacccagtgtgttgcatctaacattcatctctccttgacacttcgacagtgtaatggccaaccagttatcgcttgagtctggaagcattccccgttaggtcctgtttgatttgaggcttgaaacaattttagccggattggtcctataatttagataagattctggtcgaatcctggagaaacgaatgtatcggaatgggaccaagaactatttcagctcaaataaacatatcattccaca

SEQ ID NO: 212411 - DNA, 921 bp, Zea Mays
gataaaaggggcacatctgtgtaccacttcaaagcatgacattagtgggaggcttctgaatgtaaacagggcatctcctaggggcactcgcatggaaaggcctccgagacaatttgcgcctgctttcagagcttatgttggcaacttgccatggcaagctgatgactctaggctggtgcaattgttcagcgagtacggagaagtcgttaatgctgcggttgtctatgatagagaaaccgggcgctcacgaggattcggttttgtaacgatggtgtcgaaggaggaactcgacgacgctatctctgccctggatggacaggaattggacggccgccctcttcgggtgaacgttgcagcagagcgaccacagaggggcttttgatgcgggcggcggtacgagagagatggctgcttgtttgtgataagagcacggagacacaacggaggaggaacggtacaaattagcggaagttgatgctgtcacaagttgctagatccctcccttagcttcgtgattttggttcttgtcgacatcatcatgagttaaattatccaagtaggcttctatgtttgatctatcccgattcctgatgccttgtcacattatcatcgtggcaaatgttttgttggtaaaaccataggagcaaacggagattatttatatctggcgtataaaaccgtacccagtgtgttgcatctaacattcatctctccttgacacttcgacagtgtaatggccaaccagttatcgcttgagtctggaagcattccccgttaggtcctgtttgatttgaggcttgaaacaattttagccggattggtcctataatttagataagattctggtcgaatcctggagaaacgaatgtatcggaatgggaccaagaactatttcagctcaaataaacatatcattccaca

SEQ ID NO: 212412 - DNA, 1423 bp, Zea Mays
ccttgtcccttgtctcattttatttgtttgtcctttgcttatattctatcaagtccatggcttaccataccatctttccaaactataggttattcaaactgatatttgatgagttcacagtacgcattattccaagagatgctcctctactagaatctgttggaccacaaaagtgtcttgctttcagcacagatggtgcaaaatttgcaattggtggagaggatggacatctcagaatattccattggccaagcataaaagtgcttttggatgagcccaaagctcataaatccttccgagacatggatatcagcttagactcagagttcttagtttcaacatccattgatggatctgcgagaatatggaagatagatgagggcgcaccactggtcaatttgactcgatcctcggatgagaagatcgagtgctgccgcttttctagggatggcatgaaaccgttcctgttttgcactgttgcaaaagaggaagccacgatggtgacttctgtgctgttgatgtgaagaaaatggaagtttcccactggagcaagaaggtccatcttggctccccagtcacctccattgaattttgtcctagtgaaagggttgtaatctccacatcacatcagtggggagcagagctcacgaaactgaacgtgcctgccgactggaaagaatggcaggtctggctcgtactcctggcgctcttcctagcctccgccgtcctgttctacgtgttcttcgagcgatcagacacgttctggaactttcccatggggcggcaccagccggcgaagccatggaacgtgctcaaggagtctcctccggtccccgaggaccagactccatggtgatggtattgcttccatcgcgtcatctgtgaagagaagagcgatactgtcccagacccaacaaagccaccgcgtgctgtttatcttgttacaattataaatcgtccatgcttgttctaccactctcagccagtgaccacgcaagtttgtaaccctggactgccataaaccaggtgatagtaattgaacattctgtcttcgtgcgagtgtctgagtgtgtatccaggtattaccatgccgaccactgtcctgcttcctgatgacgaggtggctgatttcctcgtctttatttatacgttttgggatcaagagaaataaaggagctaaaacctctttgctattcaattttgaatagcaagatgattttgtcccctagctcccaaagaagcccggtttggaaacactaatcgagattggagggcatggaattgaattgagttcaataccaaatcagccatggtatttaaatgcgatgtaattccaattctattgtttggatgtcacttaattagagtttggaatagtttgttacaattccaaacaatacagaggagtaatgtgagtttctag

SEQ ID NO: 212413 - DNA, 1448 bp, Zea Mays
atgggcggcgacggcggagcagcacagggcggggagagggccgcctaccggcggtgttgcaggggggctgcacggggtaggggcgcgacggctgggcgcggttggccggagcagcagcaaaggctagaacgaggctgcgaagcctgcgaggggctggtgcagcggtggccgatgcgggcttgcggcatgcctaggggggtgaagacacacaggcagcgccagtgccggccgcttggagcgctagagtggacgagcaggttggacagaaagctgagcaaagggagtaatgaaaatatggataagagaaagttgcaacctgagaataatttatctgatggtgcaagacctcttatttctgaagggtcggatgggccaccctcaagttcatatgcatatgaaccctcatcttctggccaaggattcaaatctccagaaacacctgatttgacagtatctgtcaaacatccttctaagacggaacatgtgattaactctcaaagacctggtagttcaacatcgtcaacatcagagcgcattgctgcaaactcagctgcgagtgctcttggcttgtcaccaagctcttcaataggatcccttacctctgaaaaatcaactttgaaccctaatgctaaggaattcaagctaaatcctaatgccaagagtttcactccgtcagcatctttgaggccaccacaccctgcatcatctgatgcatcatattactatactaataacattccagcagcaccacttggacctggtttgccagtgggcatggggttcccaccggcatatggcacccagcctgtcatgtataatgctcaacctggagcatcacagcagggttacatgcatcctgttggtctacagtatgggcagcagatgatgatgggaggagggcagaatcgtcctgtttattattatgcgcctgagatgcaacaatacagaggaagaaacttctagatatactattttgaactgctgctaggtgaaagtcacaacaatccccacaagtgggataatgacccggcaaaagccgctattagaatggaaagaactggtgatgatctccctgactgtcgctccgattccttggacaaaaagccccatcgactttgtgttgcttggttgcctggtcaaaaagctcttcattgttctgtcactgttgctcagaagcaggttgactggattttttttatgttttttgtcagacttctgttgtaaattaaattgtgggtcatctgttcgacccagaaatgacattcataagggctagtgtggtgacagaaaattgaaggggatccatagaagagaatccacttgctattcaattttgaatagcaagtggattctcttcatggatctattttaatttctcggtcaccaaatcagtcctaaatgtttgagattgccccatattacatttatgtgttctttgacgcttgttc

SEQ ID NO: 212414 - DNA, 1661 bp, Zea Mays
cacttcttcagcttccgccacctcctcaacacatcaaatccactcgtcctctccacccacctgccccccgcttccttccccggcgcggagaaccaaccagccttttgacgctgtcgcccgccgatagagcactagacgcgctagcccccggatctcctccgcggcctcgccgcacgcgtggggatggatttcgacggcgccattggcgatcagggctccatgtagcagtttgtgggccgaagcaagcaacaatgtgggtggtgattggagcatatttgaggagcaaacaccaattaaacactgtacagacttcgaatttcagttctgtgatgtaggagttgcatttccggactagtaaaaatgcaatctagatatcatcgtcaaggagtttgaagaaaggaaggaaactttacaggcaaaacgcacacgcatgctgcagttctgtccagaaaatcttgagatgacatgttcagtgactgaagatgggctcttggaaagtcttcaggagatgatttttcaggtactgactgtttactgaactctgacgggactgatgaactgccagaagaatggctagttagttgatcacaagatatcgagcccggttttccggcagaagaaatgtacttgtttcattccattgttcataagagtttggattcctgagttgttgagttcactgtctttgaagatgagatattgctacttatggtgtcgaaaatcttcttagtaggaataaccctgctgctgcaacggaagaaactgccgatgtcttggcttgagctcttcgcctgtcgtagtccacgacaatcctgcatgctctagacctacttctctgaaagctggcaaaatttattatcggagcaaagaaggcgagaccatccgtgtccctcccttttgtgctgatcaaaccatacagcatccatggcgacatcaccctgaacgacatcaacgagaagatccacgccccttcgccgcataagatcaggcacaggagcgacgaggagcccgacccgctccaggcctcagcagcgatctcagggaaacctgtggcccacaagacgaagatccacacggagggggggaagggggaaggggagcatcacgatcaccagaaccaaaggctaggctgatgaccatttgtgtgacgctggcgaagtggctaacagttgattcgcctttgcatttttggcgctctgggctcgttcccaattggttttgtggcccaggtgatgcatggccttagcagcgtgcttgtagcgttttctgttcttgctgtttactagtatcttacgcacgcgccttagcgcacgtcataggcagcgctgaatcgtgtcaatgagttaatataaaaatttaataaaataatccaaagaaaataagaatggttcatatgtagtggtactactaataatgaattgcacaatatactgtatgttttgttttgaaaaggccatctgcctcatcgagcaggctcggctcgttctcgccgacgtgggaggtacctgcaggcccgcggccagcaggacaacaagatggtccggactccggaacatggaggagctgctggcccggatcatggcacacacgacgtggccaggcggtggtgacgccgacagacgacgacgctcggacaagagcgagagcaacgaggttacgag

SEQ ID NO: 212415 - DNA, 2530 bp, Zea Mays
gagtgctctatttctagagaccacgagaagaagtgaagagcttgcatgtgcatctagagaacaagctgattctgctaatggggtaggaaacagcgctcattcaggatcaagagggagtggtgctttactacctttttcctctacacataatgcgtcaacttatggggatgaatttgacacgaccataattacattcaacatggctgtcatcctatatcatcttcatgactatgaatctgcactatctgttttggacccactgtaccgaaacattgaaccaatggacgagccaactgctcttcatgtatgctttctattattggatattacattagctttgcaagatgcaacaaaggctgtggatatagtacagtacttggaaaggtcgtttggagtagctaacacaatgaacccgaatgaaaatgcaagcatagctcagcagcaattagctcaagcgaagcctcctgtgaaaattagcatgcctccagattccgattcaaatgcttatgctggtggatatgagaacctttcgtcaggaattttcccagatgagcaaatagaatttgaatctctatgctctagttttgatggacatcagaatgtgggcaggcgtatcttgaatgatttctcaagggcgtctgctgatcttgctgctactgctgctgatttgaaagttagacttcagatttacaaggtccgtcttctactgctcactaggaaccttaaggttgcgaagcgagaactcaaagtactaatgaacatggcacgtggtagggattcatctacagagcttctcttgaaatctcagctggagtatgcccgggggaattataggaaggctgtgaagctattgagcacaccaaataatcggactgaaccagcaatgctagccattttccacaacaacatgggatgtatactccaccaacagagatcgtatcacgcctctatatggtgctttagcaaagcgctgaaatacagcttatcatttcgttcagagaaaccaatgaagttgtctacattatcacaagacaagtcttgccttatttcatacaactgtggtatccaacatttgatgtgtgggaagcctttgttagcagcttcttgttttcgtgaagccatgccgctcttctacaagcgaccccttttctggctccgtttttctgagtgcagcctgctagctctagaaaagggtctcctgtgtgcaaatggtgcttcctcattcaacgatgagattgaaatcaatgttgtggggtcaggacaatggaggcagttgattgtcaacccagtgaactcgagaagtaatttagattctgcaggtgtgactttaggcgaacataaaaatttggtttcacttggatttgctagacagtgtctacaaaatgcgctgctattattggatgctactgagaaggaaaattgggtaatcgcatctgatacagaggattgggaccaaggaaccgtacatggatataaaagctcaggccagaagaatactacaagtacagattctaaaacaccttcaggcccaactctagctaatgtaaatggagaacaaaagggcacaagcttgaatgctaccttgcagagttctcttgctttctatgacgagatccgtagaaaagagtacatcaaaatcagacaggctgtcctggcgaacttggcatttgttgaattgtgccttgataatcccttgaaaactttgacgtatgcaaagtcagtactgcaggtgacagactgttccaggatgtatgcgttcctcagccatgtatacgcagccgaagctctatgtactttgaacagaacagaggatgccgccgagaatctatcagtttatataagagatggtaatcatgtcgagttgccttatagtgtggagaattctgaaaaggccttggttgagaaagacagtgatggtgaagacttggttgctcctgcagtgacaaaactcgccacagaagaacctgagcagctcaggccggaggaggcccgtggtgtcctgtatatcaaccttggcatgattgctgcaaggcagggagaagttgaaaaagccaactacatggtgagccgtggcctggcgatgttgcccaacaacccccgggcagtgctagcatcggtttacgtagaccttttgcaagggaagtcccaggaagctgtcgtgaagttgagacggtgtaggaatgtgagatttagacccgctagcatagcagccagcagtcagcagtcgagcttagaaaagcctcccctttcatgatttctgtagtttacaattaccgttataatcttttttggaccctgaccccaatgtggatgatcaaagatggtaatgcttctcctgtgtaacatatataagaaatgaactctaactccccttctagctccctcccagattcaggggtggaatgtgttggaactgtaccgttttaatttgccctctttggactgaagagagccaagtgatcaaaatagtttcctatgtttattcaagaatttggaaaataatgtgcagtcagcagctgttcatctgaac

SEQ ID NO: 212416 - DNA, 1716 bp, Zea Mays
agcgccagcccattgcccactaaggcatcattccgccaaagacccaaagtggcaaacgcccaaatcgacaaaccctaatgacctaatccccaacccccagccggcagccgccgagcaaaccagctcatccggtcggtcatccactcatcctcatcccctgcccatctgatccgatcggtcatctcatcctcatcccctacccgatcggatcccctgctcatccgccgagcaccaccaggcagcaggctccagtcatcgagcaccagcaggagcacggcgcgctgcccagtaggagcacggccaagaggatgacgcccgcatcctgcctcttctcctctgctactggagcctctactgctaggagcacggctaggaggacaacacccgcatccagcaggagcaccagcaggaggaggacgcccatgctgctgccgttgagcgatgatctgatgcgcccccatcatggctcttctcctccctcacggcctcgcctcgatctgctgctgccggtgatctgctgctgccggatccgagcgccgtgcccacgggtcacggccagcgatatgcagggatcaagaatccaactttgagaaaaattgctcgagatgtaaatggcgccgccggagtaccagcagtacctcgtgcaggtgaccaagtaccaggccgcacagaactgcaaggctcgagaggtggactcaaacatgacatccaagttttgcaagttttgatgttggatgttaaatttctatgctcacccctcgtttggttattgatgtactatttccatctcatgtcacaaatttggcataaggaatgggtattggtggctactgactgtgtttgtttccacgtattatacatgtacaatggaacagttgataatagttttgcatgaactattggtgttggctatctaaaggacagaaaggcagacatgagcaacagatcccgctccatgggctgaaactgggattcgtgatggcagaaagtgctactgtcgctctcaattgtagcggtgtggtactgggatccttgccaataagtgtgtttttagggtgagcccgtccaagatgcccatgcgtccccgcgcccctcgccagctgatgtcgtactaggctaggggattgaagaagcacttgaagaggctcaatgcgcccaagcattggatgctcgacaagcttggcggagcttttttcatgctctgcaaggtgaggtctgttcagtttggccagaaaggtatcccctacctgaacacctacgatgatcgcaccatccgctaccccgacccgctcatcaaggccaacgacaccatcaagatcgatctagagaccaacaagatcatggacttcatcaagtttgacgtcggcaacgtggtcatggtgaccggcgggaggaacaccgggcgtgtaggagtgatcaagaacagggagaagcacaagggcagcttcgagaccatccacgtgctgcttggagctttttgctatgtctagttttttcctatttgttgtacaagaaaacataaaatggaattcaactttggtggccgcaaaagtttagagacttgatttcatataaagttaggctgaacattactgcaaacagttgtattttagtttagatttagagtacacttatgtatgtgttgtttgacaatgcttatttatgatatattgaatggtacttatttatattatattaattataatgttgttcaat

SEQ ID NO: 212417 - DNA, 1922 bp, Zea Mays
attgcccactaaggcatcattccgccaaagacccaaagtggcaaacgcccaaatcgacaaaccctaatgacctaatccccaacccccagccggcagccgccgagcaaaccagctcatccggtcggtcatccactcatcctcatcccctgcccatctgatccgatcggtcatctcatcctcatcccctacccgatcggatcccctgctcatccgccgagcaccaccaggcagcaggctccagtcatcgagcaccagcaggagcacggcgcgctgcccagtaggagcacggccaagaggatgacgcccgcatcctgcctcttctcctctgctactggagcctctactgctaggagcacggctaggaggacaacacccgcatccagcaggagcaccagcaggaggaggacgcccatgctgctgccgttgagcgatgatctgatgcgcccccatcatggctcttctcctccctcacggcctcgcctcgatctgctgctgccggtgatctgctgctgccggatccgagcgccgtgcccacgggtcacggccagcgatatgcagggatcaagaatccaactttgagaaaaattgctcgagatgtaaatggcgccgccggagtaccagcagtacctcgtgcaggtgaccaagtaccaggccgcacagaactgcaagttgataatagttttgcatgaactattggtgttggctatctaaaggacagaaaggcagacatgagcaacagatcccgctccatgggctgaaactgggattcgtgatggtcagctaagcataccttcgccttcaaatttgcgtagcttcgtttttattctgcaagttgtttggtctatcgttcaaatgccttattattctgcgagctgttttaagactgggcctcaatttttttccaggcagaaagtgctactgtcgctctcaattgtagcggtgtggtactgggatccttgccaataagggtgagcccgtccaagatgcccatgcgtccccgcgcccctcgccagctgatgtcgtactaggctaggggattgaagaagcacttgaagaggctcaatgcgcccaagcattggatgctcgacaagcttggcggagcttttgtaagtaaaaaatattttctagctttggtacctacaatcttctgtacttccccatttgtctaatgcttcaggttgttcttttttctgtagatctgtgtaccttatccttgctatactgtccatatatgctgtgtgcatgaaagtcttgcattgaaaatgtcatgtgctacaatcgttaggactattaatagatgttgctctgtctatctatccatttcatcgctggaaattcccatgccctttcatagtacgcctgtgaaatgctcgctgcttttctattggtttgtgtgcagttcatgctctgcaaggtgaggtctgttcagtttggccagaaaggtatcccctacctgaacacctacgatgatcgcaccatccgctaccccgacccgctcatcaaggccaacgacaccatcaagatcgatctagagaccaacaagatcatggacttcatcaagtttgacgtcggcaacgtggtcatggtgaccggcgggaggaacaccgggcgtgtaggagtgatcaagaacagggagaagcacaagggcagcttcgagaccatccacgtgctgcttggagctttttgctatgtctagttttttcctatttgttgtacaagaaaacataaaatggaattcaactttggtggccgcaaaagtttagagacttgatttcatataaagttaggctgaacattactgcaaacagttgtattttagtttagatttagagtacacttatgtatgtgttgtttgacaatgcttatttatgatatattgaatggtacttatttatattatattaattataatgttgttcaat

SEQ ID NO: 212418 - DNA, 1911 bp, Zea Mays
attgcccactaaggcatcattccgccaaagacccaaagtggcaaacgcccaaatcgacaaaccctaatgacctaatccccaacccccagccggcagccgccgagcaaaccagctcatccggtcggtcatccactcatcctcatcccctgcccatctgatccgatcggtcatctcatcctcatcccctacccgatcggatcccctgctcatccgccgagcaccaccaggcagcaggctccagtcatcgagcaccagcaggagcacggcgcgctgcccagtaggagcacggccaagaggatgacgcccgcatcctgcctcttctcctctgctactggagcctctactgctaggagcacggctaggaggacaacacccgcatccagcaggagcaccagcaggaggaggacgcccatgctgctgccgttgagcgatgatctgatgcgcccccatcatggctcttctcctccctcacggcctcgcctcgatctgctgctgccggtgatctgctgctgccggatccgagcgccgtgcccacgggtcacggccagcgatatgcagggatcaagaatccaactttgagaaaaattgctcgagatgtaaatggcgccgccggagtaccagcagtacctcgtgcaggtgaccaagtaccaggccgcacagaactgcaaggtcatggtgatttcacgtccgttaggctcgagaggtggactcaaacatgacatccaagttttgcaagttttgatgttggatgttaaatttctatgctcacccctcgtttggttattgatttgataatagttttgcatgaactattggtgttggctatctaaaggacagaaaggcagacatgagcaacagatcccgctccatgggctgaaactgggattcgtgatggcagaaagtgctactgtcgctctcaattgtagcggtgtggtactgggatccttgccaataagggtgagcccgtccaagatgcccatgcgtccccgcgcccctcgccagctgatgtcgtactaggctaggggattgaagaagcacttgaagaggctcaatgcgcccaagcattggatgctcgacaagcttggcggagcttttgtaagtaaaaaatattttctagctttggtacctacaatcttctgtacttccccatttgtctaatgcttcaggttgttcttttttctgtagatctgtgtaccttatccttgctatactgtccatatatgctgtgtgcatgaaagtcttgcattgaaaatgtcatgtgctacaatcgttaggactattaatagatgttgctctgtctatctatccatttcatcgctggaaattcccatgccctttcatagtacgcctgtgaaatgctcgctgcttttctattggtttgtgtgcagttcatgctctgcaaggtgaggtctgttcagtttggccagaaaggtatcccctacctgaacacctacgatgatcgcaccatccgctaccccgacccgctcatcaaggccaacgacaccatcaagatcgatctagagaccaacaagatcatggacttcatcaagtttgacgtcggcaacgtggtcatggtgaccggcgggaggaacaccgggcgtgtaggagtgatcaagaacagggagaagcacaagggcagcttcgagaccatccacgtgctgcttggagctttttgctatgtctagttttttcctatttgttgtacaagaaaacataaaatggaattcaactttggtggccgcaaaagtttagagacttgatttcatataaagttaggctgaacattactgcaaacagttgtattttagtttagatttagagtacacttatgtatgtgttgtttgacaatgcttatttatgatatattgaatggtacttatttatattatattaattataatgttgttcaat

SEQ ID NO: 212419 - DNA, 1727 bp, Zea Mays
attgcccactaaggcatcattccgccaaagacccaaagtggcaaacgcccaaatcgacaaaccctaatgacctaatccccaacccccagccggcagccgccgagcaaaccagctcatccggtcggtcatccactcatcctcatcccctgcccatctgatccgatcggtcatctcatcctcatcccctacccgatcggatcccctgctcatccgccgagcaccaccaggcagcaggctccagtcatcgagcaccagcaggagcacggcgcgctgcccagtaggagcacggccaagaggatgacgcccgcatcctgcctcttctcctctgctactggagcctctactgctaggagcacggctaggaggacaacacccgcatccagcaggagcaccagcaggaggaggacgcccatgctgctgccgttgagcgatgatctgatgcgcccccatcatggctcttctcctccctcacggcctcgcctcgatctgctgctgccggtgatctgctgctgccggatccgagcgccgtgcccacgggtcacggccagcgatatgcagggatcaagaatccaactttgagaaaaattgctcgagatgtaaatggcgccgccggagtaccagcagtacctcgtgcaggtgaccaagtaccaggccgcacagaactgcaaggctgccaggtcatggtgatttcacgtccgttaggctcgagaggtggactcaaacatgacatccaagttttgcaagttttgatgttggatgttaaatttctatgctcacccctcgtttggttattgatgtactatttccatctcatgtcacaaatttggcataaggaatgggtattggtggctactgactgtgtttgtttccacgtattatacatgtacaatggaacagttgataatagttttgcatgaactattggtgttggctatctaaaggacagaaaggcagacatgagcaacagatcccgctccatgggctgaaactgggattcgtgatggcagaaagtgctactgtcgctctcaattgtagcggtgtggtactgggatccttgccaataagggtgagcccgtccaagatgcccatgcgtccccgcgcccctcgccagctgatgtcgtactaggctaggggattgaagaagcacttgaagaggctcaatgcgcccaagcattggatgctcgacaagcttggcggagcttttttcatgctctgcaaggtgaggtctgttcagtttggccagaaaggtatcccctacctgaacacctacgatgatcgcaccatccgctaccccgacccgctcatcaaggccaacgacaccatcaagatcgatctagagaccaacaagatcatggacttcatcaagtttgacgtcggcaacgtggtcatggtgaccggcgggaggaacaccgggcgtgtaggagtgatcaagaacagggagaagcacaagggcagcttcgagaccatccacgtgctgcttggagctttttgctatgtctagttttttcctatttgttgtacaagaaaacataaaatggaattcaactttggtggccgcaaaagtttagagacttgatttcatataaagttaggctgaacattactgcaaacagttgtattttagtttagatttagagtacacttatgtatgtgttgtttgacaatgcttatttatgatatattgaatggtacttatttatattatattaattataatgttgttcaat

SEQ ID NO: 212420 - DNA, 1176 bp, Zea Mays
atgtctatgtactcttatttttgtccagaacccttatgtaaggggaagtggaaagaaatggattggcacactgctggatggatcttcctcaatacgtttatcgatcgccgccgccgacgacggaggagcagcacctctcgtctgtccaccgctgaccgctcgtttgtcagcctagcaccggggtgcatgaacgcccagtatatgctacagcaccgccgcccctggccctgccgcctgcgccgctcgttgccctgtgcactccgcgggcctcgggaatggccaaccaggacatttatcggcctgtgcttgtgcagaatgcaccaaggacaagactggatgcagggacatgggggacgatggggattggattgggggcgattctggatttggcttcagtgcaatggaggttgaggtgaacaggggcttcaacagtgatgctgttttagcaatggagacgatccattccctgtcagcttcaaaatcaagttacccaatggctgatctcacccaactcttcatgacagctacccaagaagggaaaagatcagaatcgcaaggccagattcttagggtgattacttgcctacatcgctttgaagatactggatattctttcagtgtagaaacagcagctagagtgaaagtaattgattttggatcagcacttccatggagggttcttgatgttaatgggctgaagcgcgaggcggcgtcccgcggcggtgccacggggcacggcaaaccgcggctgctcatcatctcccggcgtggctcacgacggttcctgaacgagcgggagatggagcgtgccgcgggcgacgccgggtttgagatgtgtggtaatggagtccgttgcttcggtcggtttatagccgagattgaaaatctgtaagggacagctaggtaatgcattgcggcttcacagtaaaacattgtatttctacagacacttccagtaactgaactctattttttagttgttcccataatagtcagccacctggtatactgttattgtctttcagatttcagacatcaaccccttgcagctatctgaaacttagtgtttggccggggcgagggagattgggaaggaagtggaggagagcatgctcccaacaccgctagagagttttcagttttttctcttatatcacgttccttggacttcgtgtt

SEQ ID NO: 212421 - DNA, 3151 bp, Zea Mays
agcagcacggacggggcatgggattgacccacacacccgccctccgccccgcaagccaaatacgccgtggcacgcgtcgccatgccgccccagttccccaccgcccgcctcctcctccctagtcacaggctgctcccgctcctctcccctctcccctccgcgtccctgtcccctgctcctcgcaccctccgcctcccgccgccgcagcttcttcaccgagtcgcccgccgccgcccgctgctgcgcggcatggcctccgccgccgcccccgggtcacacgccgccgcggaagcgccccccgtcgacgtggggggagggggcgctggcgccccgcggcggctcgtcctggaggagctaccctgggaccattccttcgtccgcgagctgcctggcgacccgcgatcggacactatcccgcgggaggtcctgcacgcctgttactccagggtgtctccctctgccaaagtggacaaccccaagctggttgcgtggtctgattccgtggccgatctactcgatctggatcacaaagagtttgaaagacctgatttccctcagtttttctcaggagcaactccactagtggggagtttgccctacgcacagtgctatggaggacatcagtttggtgtatgggctggtcagttgggggatggaagagcgatagctcttggagaggttgtcaactctcgaggtgagagatgggagttgcagctcaaaggttgtggaaagactccatacagcagatttgctgatggtcttgctgtcctacgcagcagcatccgtgaattcttatgcagcgaagccatgcacggcctaggcattcctacaactcgtgctctttgtctagttgaaactggaaaatcagttgtccgagatatgttctatgagtatgtcatgacatcttcatttttttaatgtgcactgttaaaacttaaaccatgttatgtttcatcgctgtgttccacttatatataaaaagggtagattcagtgccggaagatcccacatgagtggggtctggggaagggacggcaaagtattagtgatgggttaacttctcaacatcattattaaaataggctattcatgtgccacaaccttgacttgtgggttctgttgggtttttaactctagcctaccccaatttgcttgggggctaaaaggctttgttgttgttaagaacgtttttggtaatttgtgcttcaggcatagtggttttatttctttgaatgacagcttgcttcatgtctttttattatttgatgcgtgcacaggtggcaatgtactgctgtatgttggtcttttgcttttgttctatgtgccttttattgtccttaacttcttattaatctatagtcctatacatgattataaagcatgaaactgccctaaatttattcttgaacacgatctgcagtgtatagtgtggattgggttatttcattttatttatttgtgtaaatgaggtcaagtctcatgcactcacatatatcacatgtatgtgctgtgtaggggcatatggccactttcctgttaaggattttctttaaaaaatctcgaatgtgtatgagttttgctcttactgtatcaccactcaccagggcatcctgtactttagagaacttttgttacattacgactaccttcaatctataacaccgactggcagcagttaaaatatactctgtttgaaggatcatgtttctgaaggttttgagtaaatacactgtacctatttgatacacttctattgtttaatcattcatcttatatacacagtggcaatgcaaaggaagaacctggtgcaatagtttgtcgtgtagcaccgtcttttttacgttttggttcgtatcagatacacgcttcaaggggcaaagaggacattgagattgttcgtcgtttggcagactacacgatacatcatcactttccacatcttgaaaatatgaaaaagagtgaaggtttgtcattcgagacagctataggagattccccaacaatagatctcacatcaaacaaatatgcagcttgggcagttgaggtggcggagaggactgcttacttgatagctagatggcaaggtgttggcttcacccatggtgtacttaacactgacaacatgagtgtgctgggcctaactattgattatggaccatttggatttctcgatgcatttgatcctagctatactccaaatactactgatcttcctgggaagaggtactgttttgcaaatcaacctgatgttggcttgtggaatattgctcagttcactggaccactgtcctctgctgaacttatcagccaagatgaggcaaattatgtgatggagaggtatgggacaaagttcatggatgagtaccaatctatcatgaccaaaaaactgggcttaactaagtataataagcagctaattagtaagctgcttagcaacatggcagttgacaaggttgactataccaacttcttccgtcttctttcgaatgtcaatgcggatcctggtattccggagaatgagctgcttgtcccactgaaggctgctctcctagatattgggaaagaaaggaaggaagcatggattagttgggtacagacttatattgaagagctggtggagagcggcgttcctgatgaagaaaggaaagccgcgatgaactctgttaatccaaagtatattctccgcaactatctctgccagtctgctatcgacgtagctgagcaaggcgattacgaggaggttcgccgggtgcttagggtaatgcataatccgtatgacgagcagccgggaatggagaaatatgcacggttgccaccagcttgggcatacagacctggagtgtgcatgctgtcctgctcctcgtgaaccccatgatgcaagacgtggagtcgtcgtggacattacaaaaatgcttgggtgcttatagtcttcctcctgtataggggtccatctttgtgctgtaatgtgtcaagcatcgcatgctattttttttccggtgatgcaagtgtgtaagaaccatgtcgttgcaggaatagtgaagcagtgggacctgttattgtgactacctagtatcccgtacggagatggaaatttggcggtttactagtctatatagtgaagctctggcacttgcagactggtcaactagaa

SEQ ID NO: 212422 - DNA, 2174 bp, Zea Mays
agcagcacggacggggcatgggattgacccacacacccgccctccgccccgcaagccaaatacgccgtggcacgcgtcgccatgccgccccagttccccaccgcccgcctcctcctccctagtcacaggctgctcccgctcctctcccctctcccctccgcgtccctgtcccctgctcctcgcaccctccgcctcccgccgccgcagcttcttcaccgagtcgcccgccgccgcccgctgctgcgcggcatggcctccgccgccgcccccgggtcacacgccgccgcggaagcgccccccgtcgacgtggggggagggggcgctggcgccccgcggcggctcgtcctggaggagctaccctgggaccattccttcgtccgcgagctgcctggcgacccgcgatcggacactatcccgcgggaggtcctgcacgcctgttactccagggtgtctccctctgccaaagtggacaaccccaagctggttgcgtggtctgattccgtggccgatctactcgatctggatcacaaagagtttgaaagacctgatttccctcagtttttctcaggagcaactccactagtggggagtttgccctacgcacagtgctatggaggacatcagtttggtgtatgggctggtcagttgggggatggaagagcgatagctcttggagaggttgtcaactctcgagcatccgtgaattcttatgcagcgaagccatgcacggcctaggcattcctacaactcgtgctctttgtctagttgaaactggaaaatcagttgtccgagatatgttctatgatggcaatgcaaaggaagaacctggtgcaatagtttgtcgtgtagcaccgtcttttttacgttttggttcgtatcagatacacgcttcaaggggcaaagaggacattgagattgttcgtcgtttggcagactacacgatacatcatcactttccacatcttgaaaatatgaaaaagagtgaaggtttgtcattcgagacagctataggagattccccaacaatagatctcacatcaaacaaatatgcagcttgggcagttgaggtggcggagaggactgcttacttgatagctagatggcaaggtgttggcttcacccatggtgtacttaacactgacaacatgagtgtgctgggcctaactattgattatggaccatttggatttctcgatgcatttgatcctagctatactccaaatactactgatcttcctgggaagaggtactgttttgcaaatcaacctgatgttggcttgtggaatattgctcagttcactggaccactgtcctctgctgaacttatcagccaagatgaggcaaattatgtgatggagaggtatgggacaaagttcatggatgagtaccaatctatcatgaccaaaaaactgggcttaactaagtataataagcagctaattagtaagctgcttagcaacatggcagttgacaaggttgactataccaacttcttccgtcttctttcgaatgtcaatgcggatcctggtattccggagaatgagctgcttgtcccactgaaggctgctctcctagatattgggaaagaaaggaaggaagcatggattagttgggtacagacttatattgaagagctggtggagagcggcgttcctgatgaagaaaggaaagccgcgatgaactctgttaatccaaagtatattctccgcaactatctctgccagtctgctatcgacgtagctgagcaaggcgattacgaggaggttcgccgggtgcttagggtaatgcataatccgtatgacgagcagccgggaatggagaaatatgcacggttgccaccagcttgggcatacagacctggagtgtgcatgctgtcctgctcctcgtgaaccccatgatgcaagacgtggagtcgtcgtggacattacaaaaatgcttgggtgcttatagtcttcctcctgtataggggtccatctttgtgctgtaatgtgtcaagcatcgcatgctattttttttccggtgatgcaagtgtgtaagaaccatgtcgttgcaggaatagtgaagcagtgggacctgttattgtgactacctagtatcccgtacggagatggaaatttggcggtttactagtctatatagtgaagctctggcacttgcagactggtcaactagaa

SEQ ID NO: 212423 - DNA, 2063 bp, Zea Mays
agcagcacggacggggcatgggattgacccacacacccgccctccgccccgcaagccaaatacgccgtggcacgcgtcgccatgccgccccagttccccaccgcccgcctcctcctccctagtcacaggctgctcccgctcctctcccctctcccctccgcgtccctgtcccctgctcctcgcaccctccgcctcccgccgccgcagcttcttcaccgagtcgcccgccgccgcccgctgctgcgcggcatggcctccgccgccgcccccgggtcacacgccgccgcggaagcgccccccgtcgacgtggggggagggggcgctggcgccccgcggcggctcgtcctggaggagctaccctgggaccattccttcgtccgcgagctgcctggcgacccgcgatcggacactatcccgcgggaggtcctgcacgcctgttactccagggtgtctccctctgccaaagtggacaaccccaagctggttgcgtggtctgattccgtggccgatctactcgatctggatcacaaagagtttgaaagacctgatttccctcagtttttctcaggagcaactccactagtggggagtttgccctacgcacagtgctatggaggacatcagtttggtgtatgggctggtcagttgggggatggaagagcgatagctcttggagaggttgtcaactctcgagtggcaatgcaaaggaagaacctggtgcaatagtttgtcgtgtagcaccgtcttttttacgttttggttcgtatcagatacacgcttcaaggggcaaagaggacattgagattgttcgtcgtttggcagactacacgatacatcatcactttccacatcttgaaaatatgaaaaagagtgaaggtttgtcattcgagacagctataggagattccccaacaatagatctcacatcaaacaaatatgcagcttgggcagttgaggtggcggagaggactgcttacttgatagctagatggcaaggtgttggcttcacccatggtgtacttaacactgacaacatgagtgtgctgggcctaactattgattatggaccatttggatttctcgatgcatttgatcctagctatactccaaatactactgatcttcctgggaagaggtactgttttgcaaatcaacctgatgttggcttgtggaatattgctcagttcactggaccactgtcctctgctgaacttatcagccaagatgaggcaaattatgtgatggagaggtatgggacaaagttcatggatgagtaccaatctatcatgaccaaaaaactgggcttaactaagtataataagcagctaattagtaagctgcttagcaacatggcagttgacaaggttgactataccaacttcttccgtcttctttcgaatgtcaatgcggatcctggtattccggagaatgagctgcttgtcccactgaaggctgctctcctagatattgggaaagaaaggaaggaagcatggattagttgggtacagacttatattgaagagctggtggagagcggcgttcctgatgaagaaaggaaagccgcgatgaactctgttaatccaaagtatattctccgcaactatctctgccagtctgctatcgacgtagctgagcaaggcgattacgaggaggttcgccgggtgcttagggtaatgcataatccgtatgacgagcagccgggaatggagaaatatgcacggttgccaccagcttgggcatacagacctggagtgtgcatgctgtcctgctcctcgtgaaccccatgatgcaagacgtggagtcgtcgtggacattacaaaaatgcttgggtgcttatagtcttcctcctgtataggggtccatctttgtgctgtaatgtgtcaagcatcgcatgctattttttttccggtgatgcaagtgtgtaagaaccatgtcgttgcaggaatagtgaagcagtgggacctgttattgtgactacctagtatcccgtacggagatggaaatttggcggtttactagtctatatagtgaagctctggcacttgcagactggtcaactagaa

SEQ ID NO: 212424 - DNA, 3172 bp, Zea Mays
cacggttcttcaccagttgcgttcgtcgttcccgttctcctcctcgtatcccctggtccgtacgtcgtggccaccggcgccgcctagctcgcaccgccgacagcgtctcagactagatcgcgcctccccctcccaaatcgggttccagtcgggctcccgcaaccgccgccgtctacaccaggtgccgaggccgatcttttcgtcggcaaagatcgccgagcagatctgcccctggccgtcgccctacaccaggtgccgatatcttcgccagcgaagagcgcccagcagtttgtattgacaggtacagtgatttgggattctatactacctagctttatgattgcaagacctggttattttcacctgaggttgtgttcaacatgttagtggcatgaaaattgcctcaattgggggcaatggcatctagtacaaaatcagatttagtgtctggtagccctgatgggcatggatacttcaatgcacaacgtgggtcctatgcagctgcttcattggaaaggtcaggaagcttccgtgaaggcggtgatggctatgcgatgttttcagcatcaaactcatcaaggtcagcggcagtgaactctatcaatctagttcagtcacttgcactggacttgagaccggcaactgtggatcacaaaacatctcggttagatctaaagaaatcaataagttccatttttggaacctctgcagaagattcaacatcacttccatctctagggagaaatttaccaaatgctatcgaagagatcagacgtatgaggagtaatcttaacgacaattcaaataaggccagggaaagatctagagcttttggtggtgctatggcgaagattgataaactttgtcccaatattgtgcgaaaacgttctcgaggagacagttcatctaatgaacgatctagtgtgttatcatctggaggagttacccctaaaaatgttcctcagagccatttaaatgcagatgatatggaagctgggcttcagagagaagagaggacaaagaatgcaggacaaaataggagaatacgtacatccatggtggagatggatgcaagaacagctggtccatcaagaggccccggacctactgataggatctcagatcctggtaaagccaccaatggcagttctgcagttccagaagaaaaaatcagaggtttggcaactactatcgatggttgggaaaagccaaaaatgaagaaaaagcgttctaccattaaggcagacatgtcactggctggtgttttgaggactgttgatgtagaccgagagtcaaaacaaggcatgcagcacaagtttactaatgacggtagggcgagaatgacaagttctagtttcaggtctggaactgttgcatctggcacaaccaaagcagatttgctttctacacaaaatggtcttgttatgcgacccttaaataggagtgatcaagacaatggtttccatcctactaacaaaagggaacgtcaagctgcattagataaagaaacgcccaacccgagaaccattaacaagcctaatgaagacgacagtggatgtaacattgcatcattaccgaaggcgaatggatctgcgcggggaccccgatcaaattcagggtcaatattgaagtcatatccaaacattcatcgatcacaagctagttctgatgattgggaacatccgtctggtacaaataagttaatttctgctggtggatctggcattcataaacgtacaaaatcaacacattcattatctcctccgatccaatggggtgggcagaggcctcagaagatatcccgttcagcaaggaagtcaaatttagtccctataatcactactgatagtgcactggtaccaggttcgctggacagtcctgtcaatgaagattgtgcaggtttaccgaggcgtgcatctgtaaatagccttcaacaaacaaaacgaggagatcatgggctctcaactggacctgaaggcaatgagcctgtagttgctgagaaaaagctaagggacaagggcaaaagggctggtgaactggatgatgggcatggctctggttttcagaagattgctatgcttgggcatccttccaaaaggaataagttgcctgctgatgaggatattggagatgctttaaggagacaagcaagagttgtcccgggttttactctgaccaggcctgggactcctgtatccattgacaagcttgaaaatgctccgattacaaaacaaagaagtgtgaggacagtctcagagagaactgagagtaaatctgggagaccactgatgaagaaaatatctgagcgcaaaagtaatgcacggcctaggcatacaagtagcagtgtgcagtcagactctcctgtgcaatctgaagatgatcatgaggaacttcttgcttcagcaaatgctgccctaagatctgcttgtgcaagcacgttctggcggcaggttgaacctttcttcgcatttttgactgcagaagacatcacatatcttagtcaacagatacatttaccagatgattcctcttcaagtaggtcaatggaagggggtgaatgccaaaaatataagggtggtcttgaatacatttcacacccctcaactccagccgctagcaacaaagatgatcacgctgctcttccaaatggttttggcttgaatcagttggataatgacataggggttggctgggaggcaagctgcattgaacctatcctcgatcaacttgtccatgggattggggtaccaggatggtcttcagttggccaaagacttattcaagcattgattgatgaagataggatcgatagtattaccaacaacacttacataagcgagggctatgcatttgatacacatgaaattcattttgatggaggaggatggaagcctcactcaaataattataagttagaacctttagcgaattttgaagcttcaaggaggggcccaaatggtctgacaatggattctgactggaaatataatgatgtgtcaaatagaagtggcaatgtcatggataaaaccaaggtgtggcctgagtttcagtacagtgagatgtgcttcaatgataggattatcattgagctgagtgaagttggtgtatctattgaacctgtgctcagcttccgcttattggccctgtttggcatagattattttcagcttct

SEQ ID NO: 212425 - DNA, 4986 bp, Zea Mays
cacggttcttcaccagttgcgttcgtcgttcccgttctcctcctcgtatcccctggtccgtacgtcgtggccaccggcgccgcctagctcgcaccgccgacagcgtctcagactagatcgcgcctccccctcccaaatcgggttccagtcgggctcccgcaaccgccgccgtctacaccaggtgccgaggccgatcttttcgtcggcaaagatcgccgagcagatctgcccctggccgtcgccctacaccaggtgccgatatcttcgccagcgaagagcgcccagcaggtacagtgatttgggattctatactacctagctttatgattgcaagacctggttattttcacctgaggttgtgttcaacatgttagtggcatgaaaattgcctcaattgggggcaatggcatctagtacaaaatcagatttagtgtctggtagccctgatgggcatggatacttcaatgcacaacgtgggtcctatgcagctgcttcattggaaaggtcaggaagcttccgtgaaggcggtgatggctatgcgatgttttcagcatcaaactcatcaaggtcagcggcagtgaactctatcaatctagttcagtcacttgcactggacttgagaccggcaactgtggatcacaaaacatctcggttagatctaaagaaatcaataagttccatttttggaacctctgcagaagattcaacatcacttccatctctagggagaaatttaccaaatgctatcgaagagatcagacgtatgaggagtaatcttaacgacaattcaaataaggccagggaaagatctagagcttttggtggtgctatggcgaagattgataaactttgtcccaatattgtgcgaaaacgttctcgaggagacagttcatctaatgaacgatctagtgtgttatcatctggaggagttacccctaaaaatgttcctcagagccatttaaatgcagatgatatggaagctgggcttcagagagaagagaggacaaagaatgcaggacaaaataggagaatacgtacatccatggtggagatggatgcaagaacagctggtccatcaagaggccccggacctactgataggatctcagatcctggtaaagccaccaatggcagttctgcagttccagaagaaaaaatcagaggtttggcaactactatcgatggttgggaaaagccaaaaatgaagaaaaagcgttctaccattaaggcagacatgtcactggctggtgttttgaggactgttgatgtagaccgagagtcaaaacaaggcatgcagcacaagtttactaatgacggtagggcgagaatgacaagttctagtttcaggtctggaactgttgcatctggcacaaccaaagcagatttgctttctacacaaaatggtcttgttatgcgacccttaaataggagtgatcaagacaatggtttccatcctactaacaaaagggaacgtcaagctgcattagataaagaaacgcccaacccgagaaccattaacaagcctaatgaagacgacagtggatgtaacattgcatcattaccgaaggcgaatggatctgcgcggggaccccgatcaaattcagggtcaatattgaagtcatatccaaacattcatcgatcacaagctagttctgatgattgggaacatccgtctggtacaaataagttaatttctgctggtggatctggcattcataaacgtacaaaatcaacacattcattatctcctccgatccaatggggtgggcagaggcctcagaagatatcccgttcagcaaggaagtcaaatttagtccctataatcactactgatagtgcactggtaccaggttcgctggacagtcctgtcaatgaagattgtgcaggtttaccgaggcgtgcatctgtaaatagccttcaacaaacaaaacgaggagatcatgggctctcaactggacctgaaggcaatgagcctgtagttgctgagaaaaagctaagggacaagggcaaaagggctggtgaactggatgatgggcatggctctggttttcagaagattgctatgcttgggcatccttccaaaaggaataagttgcctgctgatgaggatattggagatgctttaaggagacaagcaagagttgtcccgggttttactctgaccaggcctgggactcctgtatccattgacaagcttgaaaatgctccgattacaaaacaaagaagtgtgaggacagtctcagagagaactgagagtaaatctgggagaccactgatgaagaaaatatctgagcgcaaaagtaatgcacggcctaggcatacaagtagcagtgtgcagtcagactctcctgtgcaatctgaagatgatcatgaggaacttcttgcttcagcaaatgctgccctaagatctgcttgtgcaagcacgttctggcggcaggttgaacctttcttcgcatttttgactgcagaagacatcacatatcttagtcaacagatacatttaccagatgattcctcttcaagtaggtcaatggaagggggtgaatgccaaaaatataagggtggtcttgaatacatttcacacccctcaactccagccgctagcaacaaagatgatcacgctgctcttccaaatggttttggcttgaatcagttggataatgacataggggttggctgggaggcaagctgcattgaacctatcctcgatcaacttgtccatgggattggggtaccaggatggtcttcagttggccaaagacttattcaagcattgattgatgaagataggatcgatagtattaccaacaacacttacataagcgagggctatgcatttgatacacatgaaattcattttgatggaggaggatggaagcctcactcaaataattataagttagaacctttagcgaattttgaagcttcaaggaggggcccaaatggtctgacaatggattctgactggaaatataatgatgtgtcaaatagaagtggcaatgtcatggataaaaccaaggtgtggcctgagtttcagtacagtgagatgtgcttcaatgataggattatcattgagctgagtgaagttggtgtatctattgaacctgtgagtgaggacgaggatattaatgctgaaatctgtaaattagaaggccaacttcgtaaagaggttgtggagaagaaaaacttgctattgaaactggatggcattgttgcaactgcaaaagagtctcagcatagggaattctcacgccttgccatggatagacttctcctgagagcatatgagaaatatatggccttctgtggtccaaatgtttcaagcagcaaaaatgtcaatagaactggcaaacatgctgctctaagttttgtcaaacgagtactagtgcgatgccaaaactacgaagaggcggggacaagttgctttgatgagcctattttcaaggacatgtttttatcagcgacgtctcacagacgcagtctagatactgcttcacaagataacaatacaacagcgagaccagtccacagggccggtgcaccagacgcttcgcgaggaagcagtcacccgacggacctgtcgtttgcaaaggaggatccctggacaaacaacgtaaagcagcgggaactgttgctggacgaggttgtaggtagcataacaggaggagctctgagaacctcctcctccgtccttggtatctccctcgtcagcaatacgaaagggaagagaagcgagagggaagggaaggggcacaaccgagacagcctcaggtccggccgtccgtcgccgtccaacgcaaagggtgaaaggaagaacaaaacaaagctcagacagaaggcagccaacatctctgctccttcaggaggtctacagcttccagcgaaaacaacgcctcccagcagtgggaacggcaaggaggagagcgcagcagcagcagcagctgctgctgccaggcatggtggtgatccggcggcgaatgcttcgaatgacgccgaaatgcccgacctggctaacctcgagctgccaggactggacgccgactttggcggctggttgaatctggacgacgacgacgccctccaggacctcgacctgatgggcctcgagatccccatggacgacatcaacgagataaacctcatgatatagccgtacattttccttcgtttctcacagtaacaaccaacagagaaaaagctcccgatagtgcgtgcacaggtaaccaccaaccctgcagttttaacaccaggcctggttattaagcttcacttagggctagtttggaaactcaaatcccttccggtattggaggtgattgaggggagaatgcaataatttcttcctcaatctcctctaattctggaggggatttgagtttccaaactagctctgataaaagagagagagagggacagacagttgatagagacctcttgacaatcccaacaaccacgtgttgtcttttttgtaccagcgtgtaatttgcctccctgccttgtaccctcccctatacgttcatctgtcgtgtagacgtcggtgtacatatctattttggcgccctagttacaaggtagggaggctagttactgcatctgttactcgctccaaaggttgtgtgtgtacagactgaggacatttctcatctcatggcagcgccgactttccccccttattgcgagcataagatcacattcttttatctcagattagattgaggctagagactattccagccaatcaatgttaacgtaaataaatgtatcattccagctggaaccatttcatagtaaacgaaatgatactatctctagcagcttacctatttctatccctatatattaaaactttactcagtattgcagtctacggcacaaaacattaacaaacgcccatcttagatatactgtgtataaacacatagcaaaactatctggaaaaatggaggaatagcatagatcaaacacgtggttacaactcgtcctgag

SEQ ID NO: 212426 - DNA, 6614 bp, Zea Mays
cacggttcttcaccagttgcgttcgtcgttcccgttctcctcctcgtatcccctggtccgtacgtcgtggccaccggcgccgcctagctcgcaccgccgacagcgtctcagactagatcgcgcctccccctcccaaatcgggttccagtcgggctcccgcaaccgccgccgtctacaccaggtgccgaggccgatcttttcgtcggcaaagatcgccgagcagatctgcccctggccgtcgccctacaccaggtgccgatatcttcgccagcgaagagcgcccagcagctgcttcattggaaaggtcaggaagcttccgtgaaggcggtgatggctatgcgatgttttcagcatcaaactcatcaaggtcagcggcagtgaactctatcaatctagttcagtcacttgcactggacttgagaccggcaactgtggatcacaaaacatctcggttagatctaaagaaatcaataagttccatttttggaacctctgcagaagattcaacatcacttccatctctagggagaaatttaccaaatgctatcgaagagatcagacgtatgaggagtaatcttaacgacaattcaaataaggccagggaaagatctagagcttttggtggtgctatggcgaagattgataaactttgtcccaatattgtgcgaaaacgttctcgaggagacagttcatctaatgaacgatctagtgtgttatcatctggaggagttacccctaaaaatgttcctcagagccatttaaatgcagatgatatggaagctgggcttcagagagaagagaggacaaagaatgcaggacaaaataggagaatacgtacatccatggtggagggcaagcttggtgcagtggtgagagctgtctcaccgagtctccaggtcgcaggccttatttggcaatgtggcttagttgctgtttttagcatgatggatgcaagaacagctggtccatcaagaggccccggacctactgataggatctcagatcctggtaaagccaccaatggcagttctgcagttccagaagaaaaaatcagaggtttggcaactactatcgatggttgggaaaagccaaaaatgaagaaaaagcgttctaccattaaggcagacatgtcactggctggtgttttgaggactgttgatgtagaccgagagtcaaaacaaggcatgcagcacaagtttactaatgacggtagggcgagaatgacaagttctagtttcaggtctggaactgttgcatctggcacaaccaaagcagatttgctttctacacaaaatggtcttgttatgcgacccttaaataggagtgatcaagacaatggtttccatcctactaacaaaagggaacgtcaagctgcattagataaagaaacgcccaacccgagaaccattaacaagcctaatgaagacgacagtggatgtaacattgcatcattaccgaaggcgaatggatctgcgcggggaccccgatcaaattcagggtcaatattgaagtcatatccaaacattcatcgatcacaagctagttctgatgattgggaacatccgtctggtacaaataagttaatttctgctggtggatctggcattcataaacgtacaaaatcaacacattcattatctcctccgatccaatggggtgggcagaggcctcagaagatatcccgttcagcaaggaagtcaaatttagtccctataatcactactgatagtgcactggtaccaggttcgctggacagtcctgtcaatgaagattgtgcaggtttaccgaggcgtgcatctgtaaatagccttcaacaaacaaaacgaggagatcatgggctctcaactggacctgaaggcaatgagcctgtagttgctgagaaaaagctaagggacaagggcaaaagggctggtgaactggatgatgggcatggctctggttttcagaagattgctatgcttgggcatccttccaaaaggaataagttgcctgctgatgaggatattggagatgctttaaggagacaagcaagagttgtcccgggttttactctgaccaggcctgggactcctgtatccattgacaagcttgaaaatgctccgattacaaaacaaagaagtgtgaggacagtctcagagagaactgagagtaaatctgggagaccactgatgaagaaaatatctgagcgcaaaagtaatgcacggcctaggcatacaagtagcagtgtgcagtcagactctcctgtgcaatctgaagatgatcatgaggaacttcttgcttcagcaaatgctgccctaagatctgcttgtgcaagcacgttctggcggcaggttgaacctttcttcgcatttttgactgcagaagacatcacatatcttagtcaacagatacatttaccagatgattcctcttcaagtaggtcaatggaagggggtgaatgccaaaaatataagggtggtcttgaatacatttcacacccctcaactccagccgctagcaacaaagatgatcacgctgctcttccaaatggttttggcttgaatcagttggataatgacataggggttggctgggaggcaagctgcattgaacctatcctcgatcaacttgtccatgggattggggtaccaggatggtcttcagttggccaaagacttattcaagcattgattgatgaagataggatcgatagtattaccaacaacacttacataagcgagggctatgcatttgatacacatgaaattcattttgatggaggaggatggaagcctcactcaaataattataagttagaacctttagcgaattttgaagcttcaaggaggggcccaaatggtctgacaatggattctgactggaaatataatgatgtgtcaaatagaagtggcaatgtcatggataaaaccaaggtgtggcctgagtttcagtacagtgagatgtgcttcaatgataggattatcattgagctgagtgaagttggtgtatctattgaacctgtgcctgatcttgcacagagtgaggacgaggatattaatgctgaaatctgtaaattagaaggccaacttcgtaaagaggttgtggagaagaaaaacttgctattgaaactggatggcattgttgcaactgcaaaagagtctcagcatagggaattctcacgccttgccatggatagacttctcctgagagcatatgagaaatatatggccttctgtggtccaaatgtttcaagcagcaaaaatgtcaatagaactggcaaacatgctgctctaagttttgtcaaacgagtactagtgcgatgccaaaactacgaagaggcggggacaagttgctttgatgagcctattttcaaggacatgtttttatcagcgacgtctcacagacgcagtctagatactgcttcacaagataacaatacaacagcgagaccagtccacagggccggtgcaccagacgcttcgcgaggaagcagtcacccgacggacctgtcgtttgcaaaggaggatccctggacaaacaacgtaaagcagcgggaactgttgctggacgaggttgtaggtagcataacaggaggagctctgagaacctcctcctccgtccttggtatctccctcgtcagcaatacgaaagggaagagaagcgagagggaagggaaggggcacaaccgagacagcctcaggtccggccgtccgtcgccgtccaacgcaaagggtgaaaggaagaacaaaacaaagctcagacagaaggcagccaacatctctgctccttcaggaggtctacagcttccagcgaaaacaacgcctcccagcagtgggaacggcaaggaggagagcgcagcagcagcagcagctgctgctgccaggcatggtggtgatccggcggcgaatgcttcgaatgacgccgaaatgcccgacctggctaacctcgagctgccaggactggacgccgactttggcggctggttgaatctggacgacgacgacgccctccaggacctcgacctgatgggcctcgagatccccatggacgacatcaacgagataaacctcatgatatagccgtacattttccttcgtttctcacagtaacaaccaacagagaaaaagctcccgatagtgcgtgcacaggccaccgccggcgcccgcgcgcggaggaagtgcatgcagccaggagagagctagcatagcagctaggagaaactaaccatggccgcctctcgccgctcttccgttgagctcccagtcgccgacccggcggcggatccagaccaagtccggctgcaccagctgggatacaagcaggagctcaagcgaggcctctccgtcctttccaacttcgccttgtctttctccatcatctccgtgctgatgggcgtgacgatcacctacaacaccggcctgcgctacggcgggccggtgtccatgacgctgggctggttcctcgtctccgccctcaacgcatgcgtggcgctgtccatggcggagatctgctcggcgtacccgacctccggcggcctctactactggagcgctaagctcgccggcaaggactgggctcccctcgcttcctggctcaccggatggttcaacatcgtgggacaggtacgtacgtcgtacgccggcctgatcaatcttgcttcacagattcatgcgtgcatagctgactagctagctgcaacacatatagtatacactgcgtattttcatccatgctgaaattaaaatattcttcataatctagtcaagtacttccataatacgcaatacattacacataggttctttgaaatcgagagccaaatttagaaatttctgtcttatattacaaacataagagcaagtataacgagaggtggtaagcaggctaaatgccgatgcagaagagagagagaggagtggagaggagacatagggaaaacggactgcagctgggttagacacaagaaccaaaaaaaactttacaagagatggtaagtgctggttttgcaaaaaatattgaagagctaactataattatacggatgaactgagagagactgcaaatagactcagtcggctatattattaaacttttttccaattaatgcggtgtaaaaaaaatgagagtactagctagctagccagccagagtactccacagtccacactacatacctggttttgcgtgctttgggcacagtcagctctggcggcgaagggcagagtctgcacccgatgatagtcttgttgattaaactatgtcacacacacagtgggcaggtacgacgagcgtcgacttctcgctggcgcagcttgtgcaggtgatcgtcctgcttgccaccggaggcctcaacggcggcggctacatggcatccaagtacgtcgtgctggccatctacggcgccatcctggtcatacacgggctaatgaacacctggcatggttcggccatctcggagcgttctggaacaccgcaggtacatttgctcttgtgatcatcatcccagccgttgcgacggagagggcgagcacggagttcatcttcacgcatttgaacacagacaatggcatgggcgtccacggcaaggcctacatccttgccttggggctgctgatgagccagtactcgctcatcggctatgacgcatctgcacacatgacggaggagacgaagaacgcggactggagtgggccgatggggatcgtcacctccgtcgctctgtccagcgtcttgggatgggtctacctggtggccctggcgtcgctgatgacggacatcccgtacctcctggaccccggcaacgacgccggcgggtacgccgtcgcgcaggccctctacgacgctttccgcaggaggttcggcagcggcgtcggaggcgtcgtttgcttggggatcgtcgccgtcaccaccttcctctgcggctccgcgtgcgtcaccagcaactcaaggatggggtatgccttctccagggacggagcggtgccattctcgcacgtatggtacaaggtgaacaagcaggaggtgcccttgaacgtcgtctggctctccgtgtccgtggcgttcgccatggctctcacgtcgctggggagccaggtggcattccaggcgatgctgtccgtggcgaccgtcgggccgtacatcgcctacggactgcccatcgtcttccgcgtcaccacggcccggagatccttcgtcccggggccgttccacctcgggagatacggcctcctcgtcggctgggtcgccgtcgcgtgggtggccgccgtcaccgtgctcttctccctgcccgtagcgtaccccgtcgccgaggacaccttcaactacgcgccggtcgtcgtcgtcggcgtgctgctgctcagcgtcggctcgtgggtgctccacgcccgcttctggttccaagggccaatcaccaacgttgatgtcgcctaagctagagtgtgtatgtgttgatcaaggcaagctactttgtagtcagaaatatcacacaaatgcaaatatctctaattatactctacatgaggctaattgaacaattgacatgcaacaagtaattgaaagtgattgcaagagtaagtatagtagcaaatcactagggaggataagggatgacacaagatgtatccataaggttcgat

SEQ ID NO: 212427 - DNA, 2402 bp, Zea Mays
aataatctagatgtatcagttttattaatgaagaatggccctgtttggtttcgaagaaaaaagatttcacaactggcttgaaggtgcacgtgattgggccattagcagaagtagattctggggtactccacttccactgtggatgagtcaagatcgtaaagaaattgttgttatggattctatcgaaaagcttgaaaaattatctggagtcaaggtcactgatcttcaccgacactatgttgatgatattacaattccctctaagaggggacccaagtttgggacgctcaaacgtgttgatgatgtttttgactgctggtttgagagtggatcaatgccatatgcctacattcactatccatttgagaatcgagagctatttgaaaagaattttcctgggaattttgtggcagagggtttggatcaaacccgtggatggttttatactctgatggttctctcgacggcactgtttgggaagcctgcatttaagaatcttatatgcaatggccttgtcttggctgaggatggtaagaaaatgagtaagagtaaaaagaactatccttcaccaaaagatctcattgacgagtttggagcggattctctgcgtctatatttggtaaactctccagttgtacgtgcagagtctctacgattcaaacgtactggtgtctttgctgttgtgaaagatgtcttcctcccatggtataatgcgtacagattctttgtccaaaatgcaaagagactggaagtcgagggtcttgcctcattttctccgatggaacaagcggtacttctgaagtcatccaatgtgttggatcactggataaactcagcaactgaaagtctagttagctttgttcaccaggagatggatgcatatcgtctttacacggttgtgccatatttggtaaaatacattgactatcttactaacatatatgtgcgcttgaaccgcaaacggttcaaaggacgtactggagaagaagactgcagaatttctctctcaacactctaccatgttctcgtaacaacttgcgtggtgatggctccatttacaccattctttactgaagttctttatcaaaatttgcggaaggtatcaagtaaatctgaggagagcattcacttctgcaagttcccttccacaactggtgagagagatgagcgtgttgagcaaagtgtaaataggatggtgaccatcattgatcttgcacgtaatattcgtgagcggcataacaaagctctcaaaacaccactcaaggagatggtggttgtgcatccagacaatgactttcttgaagacataactggtaaactaaaagagtatgtcatggaggaaatcaatgttaagactgtcactccatgcaatgaccccttgatgtatgcttctctgcgagctgaacctaatttcagtgtgctgggaaaaagacttggaaaggacatgggcaaagtatcaaatgtggtgaagaagatgactcaggaacagatcttagacttcgaaaaaagtggagagatttcattcttcggtcattgcttgaagctagatgatattaaggttgtccgacaattcaagcgtcctgaaaacgtgtcggagaaggagattgatgctgcaggagatggcgacgttttagtcattttagatctacgagctgaccagtcattgtttgaagctggagtggctcgagaggttgtgaacaggatccaaaaattacggaagactgctcagcttgaacctgctgatccagttgatgtgtattacgaatctgtgggcagtgacaaaaacacactggaagagattttgaagtcacaggatcagtatattagggacgcacttggttcaccaattatgccaaaagaaatggcaccaacagatgatgtaatacttggcgaggagtctcacaatgtacatgacatgtcatttgtcatatgcattgcaaggtccacccctattcttgcaccagatcttctttctcatgcctcaggcaaaagcaatcatgtggaggcgttgagagtatatcttctgtcaaggtctctttccagattgaagaaccagttccaagctggaaagggcatgattacagttgactgcatcgaaggttatccaccggtcagtttactgctaggaaagcacgttttcctaagtgcaggggatttttatctggctagtcgatcctagtttcgtttgctgcatcccaattttgagctgcttcacccattgttttgccgcaatcagcttaaaacagcttggttccatttatgcatctcaccaaagtcatgtattcagtaaaggtgaaagtctcaatgtatgctaatatgctatagcatgacatgtaagctaagattttcaaatacctggctatgggttcccataggtgatagcatgtttgtttgcaatctct

SEQ ID NO: 212428 - DNA, 1036 bp, Zea Mays
tgccaggcacaggagcatgacccgcgttctccgcctcgcactaaggccgacgccttcctctcttggatcgtcgcgcggttccccttcctgtttccacctccgcccgcgtcgagcgagggacacaccgcctccggccgcgcggcacgatctccgttccccaacatgagcacgacagaggatgagaggtccggcgccgccgcagaagcgggaggaggggaggaggagagacgggagaggagcgtcggcctgatggccggcctcgtggacagggccaagggcttcgtggtggagaaggtggcgcagattcccaagcccgaggcggcgctggatcgagtctccttccagagcataagccgcgagggcgtcgagctgcacagccacgtcgacgttagcaacccctactcgcaccgcatccccatctgcgagatcacctacaccttcaagagcgccgggtgatagcgtcgggcatgatgcccgaccccgggtggatcgcggcgagcggtagcaccaagctggagctaccggtgaaggtgccgtacgacttcatcctgacgctgatgaaggatctgggaggggactgggacatcgactacctgctggaggtagggctcaccatcgacctccccgtcatcggcgccttcactatcccgctcaccaccgagggcgagatcaagctccccaccttccgagacttactgttctaggcaatcggcaaatgaaatgatttattatccatatcaaaatcagtgctctatcaaagcaatgatggtcgattagcaatatttgggtttctatataactgttcagggatttaaaacaatctcacaccggtgtgaaaatagatgacttgacagtcaaaaaaataataatgccatgaggcacatgcatggccgtgtgtgggtgattggaatttggaatgatataatacaagatcaatagaagtagcatgtgtgcccagatgtattagaaaggttcctcgctttagagcatctccaacaattcctatatatggtcaatttccaaaaccagatttttg

SEQ ID NO: 212429 - DNA, 2464 bp, Zea Mays
cgagaccggcacaacacaaacagaaacatgtatcaacacaccatggccgccatgcacgccatcgtgcaccaccgcgcaccgccgcctggccgctgctgtcgcggccacgggcgcagcgtcgtcgtccgcgcgtcggccgccaccgtcaccaccagcatccccgggtccgcggcgacagtgccggactcgccgtccgcggcgttctgggactacaacctcctattccggtcgcagcgcgccgagtcccccgaccccgtggtgctccgcgtcacggagggcgcgatcccgccggacttcccggcgggcacctactacctcgccggtcccgggatgttcaccgacgaccacgggtccacggtccacccgctcgacggccacggctacctccgctcgttccgcttcgacgccagcggcgcggcgcactactccgcgcggtacgtggagacggcggcgaagcgggaggagcacgacgcgggcggcgcgtcgtggcggttcacgcaccggggccccttctcggtgctgcagggtgggagccgggtgggcaacgtgaaggtgatgaagaacgtggccaacaccagcgtgctgcgctggggcggccgcgtgctctgcctctgggaaggcggggagccgtacgagctggacccgcggacgctggagaccatcggcccgttcgacatcctcggcagcctctgcggcggtaccgacgaagtggcacgagacgccagcggcgaggctgcgcatcacgggcgccggcagccgtggctgcaggaggcagggatcgacgtggccgcgcgcctgctgcgaccggtcctcagtggtgtctacagcatgccggccaagcggctcctcgcgcactacaagatcgaccccaagaagaaccggctgctgatggtggcctgcaacgccgaggacatgctcctcccgcgctccaacttcactttctacgagttcgacgccaacttcgcgctggtgcagaagcgggagttcgtcttgccggaccacctgatgatccacgactgggccttcacggatagccaatacgtcctcctcggaaacagaatcaggctggacattcccggttcgctgctggcgctcacgggcactcacccaatgatcgcggccctcgccgtggacccgagccggcagtccacacccgtctacctgctgccgcgcaccccggaggccgaggccgaggccagcggccgcgactggagcgtgcccatcgaggcgccgtcgcagatgtggtcgatgcacgtcggcaacgccttcgaggagcgcaacgcccggggcggcatcaacatacagctccacatgtccggctgctcctaccagtggttcaacttccacaggatgtttggttacaactggctgaacaagaagctggacccgtccttcatgaatatagccaagggaagggaatggctacctcgtcttgttcagtgttaacagcggcagaattgtggcaccacgcacgccgccgaccccatcccatcccatgcaggtgtccatcgacctcgacaagagagggacgcgccgaggatgcgccgtccggagactgtccgaccagtggaccaggccggcggacttcccggcgatcaacccaggcttcgccaaccggaggagccgcttcgtctacgccggtgccgcctccggctcgcgcagattcttgccgtacttcccctttgacagcgttgtcaaggtagacgtctccgatggatcagcgcggctgtggtctgtcgctgggcgcaagttcgtcggtgagccggtcttcgtccccaccggcagtggcgaggatgacggctatgttctacttgtagagtatgcagtgtacgatcacaggtgccatctggtgctgctggacgcaaggaagatcggggaaaggaacgcagttgtggcaaaacttgaggtgcccaagcacctcaccttcccgatgggattccatgggttctgggcagatgaatgacgccacagacatccattctcactcactgagccctgaagtccaagacccatgttgtcttgatcgcttgaaacctctgaaactgaaaggaacgcaacaatcgggtcttttcttcgggatcgtatcctgtgctcattgcgctcccgcacatgtgagcacttttaatctgaggcatccgtcgtggttctgctcgtcggtcccattccctgcctgtgtcaccggcctcctgcacgccgtcgtcgtcctcctgcgtcctgcacgccgttgctatcctcctgtgtcctgcacgctgccaccatcctcctatgtcctccccgatgccgtcatgagaaaggaactcatgtatgtaagcttgcttccacggattgcttcgacaggttgctaggtatgtcacaactgcgattgtaaactgattgtatagacccatgtgaattaaatagattgtttcatgactggaaacatcttgtatcacagcaatagattggtccagaatatacaaactga

SEQ ID NO: 212430 - DNA, 869 bp, Zea Mays
gaattttagtcctcttgtcctattaagaaggactcaaaacctgctgttggctctactctcattggtggtgagacagaagctctggagaggttgaagaagtttgctgcagaatgctctatgcagccaaacaaagtagacaaaagcaatacccaagatagcatatatggtgctaatttctcttgcaaaatttctccatggcttgctacaggttgcctctctccacggttcatgtatgaggagttgaagaagcatgctactaaagcaattccttttgggtcaacacccaagaataatgatggcacatctgatgctggaacaaattggttaatgtttgagttgctgtggagagatttcttcaggttcatcacaaagaagtacagctctgtacagaagacatctgaagttgccactggctgcactcccgccccagcgcttgcatgaacttacttagacaagctgattgccagctgcttttttggggtgataaacttatgtgcattttcaatggagtcttttttttgccgccaataatgttggtagtcaaagtgaacgccgaatgcgcattcctgcgttttggtttggtcgatgtatttaatgctgtcgacatccctccaaatgactgttgaatgcaaatgatactgtgagcaacctatcatctgctgtgtaaatgtgttctgtcgacgttcctccaaatgacacttcgatgcaatgatattgtgagcaacctgtaagctgttatgtaaatgtgatagttagatgcatatcatgcatgtgacctgctattgttctatatatcatattattgttctatatatcatatgaatagactttatttaaataaaacacaaaaatgtatgtgtttttgaaag

SEQ ID NO: 212431 - DNA, 1157 bp, Zea Mays
ggaaggtcctgatcggcgtcgcggccgtgatgctggccctcgtcctcgttggcttcgcgttctcgttgacggggaagaagtcgcttgtgtccacagcggtgtttcttgcatggatcataattacggcgaccctaatactgtccggcactttccttctcctgcacaacgtgataggagacacctgcgtggcgatggacgagtgggtggcccagccgcaggggcaggggcagagccacaccgcgctggacgacatcctgccctgcgccgacgcggcggtgacggcggaggcgctgcggcggagcaaggaggtgaactaccagctggtctccaagctcaaccagctgctctccaacgtgtcgaacggcaacgtgcctccgcaggccgggcccccgctctactacaaccagtcggggcctcccgtgccgctcctctgcagcccctacagcgccgacctctccgaccggccctgcgccgtcggcgaggtcaccgccgccgacgcgcagcaggtctggcagcgctacgtgtgccgcgcggcggcggggtcgggccgggaagaggtgtgctcgacggcggggcgcctgacgccggcgatgtactcgcagatggtcgccgtggccggcctcagcgacgggctgaggcggcagtccccggccctggccgacgtcgcgagctgcgtgaccgtgcggcgcgcgttccggacggtgggccagcgcggctgccccccgctgcggcgggacagccgccgggtgtaccaggcgctgctcgcggcgtcggcggccgggatgctcgccgcggccgcgtggctcgtgcactcccgggagcggcggcggcggcgggacagcgagcggttcaaggtgtcgccgtacaggctccccatcgaggacaaggtgctgctcaacagccccagacggccgtacaggcgagtgtagctgtagtgtaaacacaagcttggtcatcgaccagacgctgacggatcggatcggacctctcgagcacagtgacgacgacggtccagtgcaggtccggtaggggagaaaatggattccgagcagttttggcagtacaattctgtaaagtatataaatgtgtccttgtactgtggtaactgtacatgagtggctacgcgaataaggtaccttcttggattggatcaaacc

SEQ ID NO: 212432 - DNA, 2955 bp, Zea Mays
atgccgaaaaaggtcgccatgcggcgaggtaagcccgcccccgaccaagggaagaggcggcgccacgggccgcggctgtccaaggtgatgcttcgggagctcgacgcgatggggcctggccctgcccgcggctccgatggtgaggaggacgggtccgacgcggttgccgaggacgtgtacgagtacgaggaaggggtgcccgaggaggaggccggcaagaacggccgctatgacaccgtcgccaagtacgagtacaacttcgacagcgacgcctccgatgcggatgaggatgtgccttcggaggaaggcgaggatatggacgaagatgacaatgacgacggtgatgatgaggagaagcagataagaatacttcaggagacgaccggaatgcccagagaagccttcgatggaaagaagaggaaacagccatcggagctgcacctgcagcatggcgatggagatggtcctgtcacaattcatgatctcttggacaatgtccaggggaaacctggttatagcaagatccgtaagaggctgcagcagcaggagaaaaaaccgatggtcgtgctagccccacttccaaaagtagagagggacaagatcgagcgcagcgtgacgtttcagaaatccaagaatgagctaacaaagtgggaaggaatcgtgaagagtaacagggaagctcctgtactatactttgaaaatgataccaacttgggtgtgaacactgttgcggcaattgctagcgaatttaaaccaaggactgagtttgagaagaagattgctgagattacgcaaagcactgaaataatagaagcacacaagaacgatggtgccaaaatcctggaacttaacaagattgatgcagaagatgtgagagaacaccaaaaccgtcttgctaagatgcgcagccttctattccgtcatgaaatgaaagcaaagcgtatgaagaagatcaagtccaggacatatcatcggatgttgaagaaggacaaattgaaggcagcatcagcagatttcgaggcagatcctgaagctgtcacagatcatgctaggaaacaagaatttaaacgggcagaggaaaggatgacattaaagcacaagaatacatcacaatgggcaaagcgcatcctcaagcgtggattgtctgttcaagatgaaggcacccgagctgccattgcagcacagctccaacaaaatactcttctgactagaaaaatgaattccatgaaggatgattctagtagtgaagaaagttcagatgatgatgacgacgagagtgactcagaagcaaaaatcttaaacagagggaaagaaaagattcttaaagctcttgaagaagacaatgagataccgaattctggagttttttcgttgcctttcatggagcgtgctatgaaaaagcgcgaggaagcaacttatgaggaagcacgacaggctcttgaagaatacgatgattccttgaagaaattagaggacaataacactgaacaaaacgaagacaaagttaaggtgtcaggtaaaagaacgtttgggcctaccaaaaatacgcacgaagagttagtgaagaggaaaaaattacaagatactgaaaacagcagtgatagcgagtatgattctgagccagcccagcctttgagcaataatgaagtaactatgaaacatgatgatacccaatttgggagtgcactactggatgatgaaccacagaatgatatatacagaaactttactgatatcataaaaaatcctggtcctaagacaactttcgaagttggaatgttagctggtgattcatggaagaaaggtagccattctggtatcttgcggtcaagagcgacaaaggaaaggaccacagcaatgccaatgacattaccaataaatccaaaataccggttccttctattgtagacccacagcctaaggatcacaattccgattcagattctgaggaagagatggttgaaggcaacttgaccatccctgacagaaaggagagctatgaacttccatcgcaagctgatctcatacgtcaggcttttgctggtgatgatgttgaagctgaatttgagaaagacaaaatggatgttttaaatgaggagaatcctgaacctgaaaagcctgctcttgttcctggctggggccagtggacagacatccaacagaaaaaaggacttccctcatggatgataaaagaacatgaagttgctaaaagaaatagagaagaagccttgaagaggaggaaagactcgaagcttaagcatgtcattatttctgaacatgtagataagaagactgaaaagtatttggtaaggaaactgcctttcccttacacttcgaaagatgtgtatgagcagagcattcgaatgcctattgggcctgatttcaacccagcgatatcagtttctgctctcaatcgacctgcgattgttaagaagcctggtgttatcattaaaccaatacaatacgaggaggttaatccccatgagaagctcgatgaaccaaaacgtgtcattcagagagcaaccccaaaccggaatgcaaagaaagcctttgccaaacaaggaaaaagcgtaacttcacaaaagagaaagtgacgagacagtcatcttctcgtcaatggcttcatttggacaaaggagagctcatccgaattttgttgcccccgccgaatttgcacatgcatggctccaggtgtgtgcagtgattcttccctttatgaaagttcccgcttcggcgcatgacccatgggcaaaaggtttcacaccactggtttatgagagcagagaaattttggtacaagtagttctgtatttgttatttattgcattcgccacgcatcgtccaaatgagacggatgctatatttcagttctgatgatggccactggttaactagagtcacctgtcttgtatggatccccacttttcagacgccggtaaatttgtatgatttgcg

SEQ ID NO: 212433 - DNA, 1976 bp, Zea Mays
cccgatcgcgctctcgccggaattagaccgaggagacggcaagggaaggtcgaggcacgagagcgctagcggcggagctagcgagcacccggcgtcgggcgacggtggcgccatgggtggttggtactccgccattgcggccaccaggctgaagatgctgcgccgcggatgccggggtgccgctgccgtcctccccgtcgccagccacgacagcgtcaccggcaaggagaggaagaggaagcgcaggaagcacgcctctatcctgggcgactccggcaccgtcgacccggacttctcgcggcggtaccggctcggcgcggagcttgggcgcggcgagttcggcgtcacgcggcggtgcgaggatgccgccacgggggaggccctggcgtgcaagacgatccggcggaagcggctgctcctgcgccgcgccgggctcgacgcggacgacgtgcggcgcgaggtggagatcacgcggcgcatgtcggaggcgggcgggggcagggtggtgcgcctgcgcgaggcgtgcgaggacgacgacggcgtgcacctcgtcgtggagctctgcgagggcggcgagctcttcgaccgcatcttcgagcgggagcactactccgagcgcgccgccgccaagctcgcccgcaccatcgtcgaggtcgtgcaggtaaccaccgagccgtccgtcgtccattggccagccgacggcccgagcgaggccgcgcatgagttcgccagcgccttacgcccccgatacgcagctgtgccacgagaacggagtgatgcacagggacctgaagccggagaacttcctgttcgtgaacaagtcggaggagtcgcctctcaaggctatcgacttcggcctctccgtgttcttcaagcctggggatcggttcgccgaagtggttggcagcgggtgctacatggctccagaggttctcaagagaagctatgggccagagatagacgtgtggagcgccggcgtcatcctgcacctcctcctctgcggattcccgccgttctggggagactccgatgagaagattgcacagtcgatactacggggagtaattaacttacagaaggatccatggcccaaggtctcccagagtgcaaaggatcttgtcaggaagatgcttgacccagacccttgtacacggttgacggcaaaacaagtcctcgagcatccttggctcaagaatgctgataaggcttcaaacgcgtcactcggagaggtggttcggtcgaggctgaagcagctctcgtccatgaacaagtttaagaagaaggcacttggagtggtcgccatgaatttaccgacggaagaggttgaccaatacaatcagatgttccgtaccatggacaaggacaatgacggcaatttgtcacttgaagatctcaaagagggtttccggataaacggtcatcctgttccagaggaagagataaagatgctgttacaagcgggtgatatacatggaagtggcacgttagactgtgaggaatttgtgacggtcttacttcacattaaaaagctcagtaacgacgagtatctacctaaggctttcaagttctttgacaaggacaagaacggttttattgagatggccgagctgatggaggctctaggtgacggtgaactgaagcctaacgagcaagtggttaacgacattatccgtgaggttgacaaggataaggatggccgtatcagctacccagagttcgaattgatgatgaaaggtgggtcagactggaggaatgcctctagacgcataaaagactggtgggaagctacatcctccccgctcccaaagaaccaaaagcgtgacttcaacggcctcatgatatacaccctatggaacatctggaaggagagaaaccggaggatattcgaaaacagcgccctcacccctatccaattagccttgaagattaaagaggacgtgtgcactttcaagagagccatgttcctccagtattag

SEQ ID NO: 212434 - DNA, 1769 bp, Zea Mays
cacgccccggcactggcggccagccggccaacgattggaagtgtcggcctgtcgggccgttccccgatcgcgctctcgccggaattagaccgaggagacggcaagggaaggtcgaggcacgagagcgctagcggcggagctagcgagcacccggcgtcgggcgacggtggcgccatgggtggttggtactccgccattgcggccaccaggctgaagatgctgcgccgcggatgccggggtgccgctgccgtcctccccgtcgccagccacgacagcgtcaccggcaaggagaggaagaggaagcgcaggaagcacgcctctatcctgggcgactccggcaccgtcgacccggacttctcgcggcggtaccggctcggcgcggagcttgggcgcggcgagttcggcgtcacgcggcggtgcgaggatgccgccacgggggaggccctggcgtgcaagacgatccggcggaagcggctgctcctgcgccgcgccgggctcgacgcggacgacgtgcggcgcgaggtggagatcacgcggcgcatgtcggaggcgggcgggggcagggtggtgcgcctgcgcgaggcgtgcgaggacgacgacggcgtgcacctcgtcgtggagctctgcgagggcggcgagctcttcgaccgcatcttcgagcgggagcactactccgagcgcgccgccgccaagctcgcccgcaccatcgtcgaggtcgtgcaggtaaccaccgagccgtccgtcgtccattggccagccgacggcccgagcgaggccgcgcatgagttcgccagcgccttacgcccccgatacgcagctgtgccacgagaacggagtgatgcacagggacctgaagccggagaacttcctgttcgtgaacaagtcggaggagtcgcctctcaaggctatcgacttcggcctctccgtgttcttcaagcctggggatcggttcgccgaagtggttggcagcgggtgctacatggctccagaggttctcaagagaagctatgggccagagatagacgtgtggagcgccggcgtcatcctgcacctcctcctctgcggattcccgccgttctggggaggtggtcgccatgaatttaccgacggaagaggttgaccaatacaatcagatgttccgtaccatggacaaggacaatgacggcaatttgtcacttgaagatctcaaagagggtttccggataaacggtcatcctgttccagaggaagagataaagatgctgttacaagcgggtgatatacatggaagtggcacgttagactgtgaggaatttgtgacggtcttacttcacattaaaaagctcagtaacgacgagtatctacctaaggctttcaagttctttgacaaggacaagaacggttttattgagatggccgagctgatggaggctctaggtgacggtgaactgaagcctaacgagcaagtggttaacgacattatccgtgaggttgacaaggataaggatggccgtatcagctacccagagttcgaattgatgatgaaaggtgggtcagactggaggaatgcctctagacgcataaaagactggtgggaagctacatcctccccgctcccaaagaaccaaaagcgtgacttcaacggcctcatgatatacaccctatggaacatctggaaggagagaaaccggaggatattcgaaaacagcgccctcacccctatccaattagccttgaagattaaagaggacgtgtgcactttcaagagagccatgttcctccagtattag

SEQ ID NO: 212435 - DNA, 2170 bp, Zea Mays
gcaaaaattgagactaatttttggttcgcagattatgcaaggtcttcttgatcagtacacagttgctgggaattccatggctcttgacatggtgataaagatggctaattatttcagtgaccgggtgaagaatgtcatacagaattatagcattgagaggcactgggaatctctcaatgaggagactggtgggatgaatgatgttctctatcagctctacacgataacgcacgatatgaagcatttgacactagctcatctcttcgataagccatgctttcttgggttgctggcagttcaggctgacagtatttccggttttcattcaaacacacacattccagttgtcattggtgcgcaaatgaggtatgaagttactggagatcctctttacaagcaaattgcgtcattctttatggatacaataaattcttctcatagctacgcaactggtggcacatctgctggtgaattctggaccgatccaaagcgtttagctgggactctgagtactgagaatgaggaatcttgtaccacctacaatatgcttaaggtttctcgcaacctattcagatggacaaaggaaatagcatatgcagattactatgaaagggcattgataaatggtgttttaagcattcaacgggggacagatcctggtgttatgatttacatgctaccccaggcccctggacactcaaaggctgtgagttatcatggttggggaacaaagtacgattcattctggtgttgttatgggacaggtatagaatccttttcaaaacttggtgattctatttactttgaggagaaaggagatccacctgcactcaatatcattcagtacataccaagcacttacaactggaaagcagctgggcttactgttactcagcaaatcaaaaccctcagctcttctgaccagtatcttcaaatttcattctccatttctgcaaacacaagcggtcagactgccaatataaattttagaattccgtcatggacatttgctgatggtgcaggagcaactttaaatggcaaagatttggggtctatatctccaggatctttcctatcaatcaccaaacagtggaactccgatgatcacttagcgctacactttccaatcaggttaaggacggaagcaattaaagatgacagactggaatatgcatcccttcaagcagtcctgtttgggccatttgttcttgctggcctatccactggtgactgggatgcaaaagctggcaacggcagtgctatttcagattggatcgccgctgtccctccagcacacaactcacagctggtaaccttcacacaagtatccaacggaaaggcatttgtcctctcaagtgcaaatggcaccctgacgatgcaagagcgacctgaagtcgacggcaccgacgccgccatccatgcgacattcagggctcaccctcaggaggactcaacagagctgcatgacatctacagcacaaccttgacgggaacttccattctgctcgaaccattcgacttgccaggaaccgtgatcaccaacaacctcactctatctgcgcagaagagctccgattccctcttcaacatcgtgcccgggctcgatggaaaccctaactcggtctccctcgagctcgggaccaaaccaggatgcttcttggtgacgggcacgaactactccgcagggacgaggattgaagtcaactgcaagagttcccttgagagcattggcgggatactcgagcaggcggcgagcttttcgcaaactgacccattgaggcagtatcacccgatcagctttgtcgcgaagggggtggccaggaacttcctccttgagccattgtacagtttgagggacgaattctacacggtttacttcaacgtcagggtctgagtcctgacgcttacacttgcagtagaagtaatacagaataaataatgtgcgcgacctttttcttctcatacactgtagcttagaacagccaatgaagaagcaattgggttgtttgaacttgttatgcacgcgggagtattcactttgtgtgaaaccacttgttatgcaataccaaacgagtcctggctgctatctgacttgtggcatggtaaaaagaaccccatttgggtgtctgatttgcaactaataaccccctggaccctggttcatgccgag

SEQ ID NO: 212436 - DNA, 1979 bp, Zea Mays
gtacagcctaacagcacccacgaatttacccaaacgcccctgtggtgccgctcgttttctcttcgccttttcctcccctactttttcctgctactgttcacgctctacagtacggaggctcctacgtgcaggtagctcccaggaccagatccgaaccctaaccctagccaatttggtcggtgatggaagagcacgtgcctcgaggcggcggcggcgggaggcccccgatcccggcggcggcggcgaggaagccggcgctcgcgcggcactcctcttttatttttgatgggcatggtggaaagcatgcagctgattttgtgtgcagtaatttaccaaggtttattgtcgaggatgaggattttcctagggagatagtgaaagcaatgtcctctgcattcttgcaggctgatgcttcttttgcagatgcttgttctctgaactgctctctttcttctggtacaactgctcttgcagcacttgtggttgggaggtaatattcttattaatttctgcaactgtgatccatacaaaatcattgtatagaataggtgtcactggctcactgctatttgatgtttctcactacatatggacgatggggggcctttttttgtttttatccaatctgccaaaatcaattctgacacatggtaactactatatgaagtttatcatttacttatgcaggtgggagcctttcctatttgtggtttatataccatcatgtgcccttttgtcccacctgactaaatctgttctggcacctgcactcatgtgtattattgcaaacaagctgcatgtgccttcacttgtttcctacaaggatctgcatcccctgccctttggtgactgcatatattcaaattttcgtggtgcatgcatgtgttttttagcgctgttcgttgctcttctatggaatgtcctgaagatagctaaatttgttaatttttaatttgttagttctggcccctcaaatttgcacatgcttttcacttaaatcctcagatgctgtcatatttctgtgtctggatgctcaacagatcacttctggtcgcgaatgctggtgactgccgagcagtactttgtcgtcgtggaaaggcaattgagatgtccagggatcacaaaccatcttgcaacagggagaagatacgtattgaggcattgggtggatatgtcgatgatggctacctgaatgggcagcttaatgtcgctcgagcaattggggactggcatatggaaggcatgaaggcatgtggtggtcttggtcctcttactgccgagcctgaggtaatgacaatggatctaactgatgaggacgaattcctgatcatgggctgtgatgggatctgggatgtattcctcagccaaaatgcagtagattttgctcgccgtaagctccaagaacacaatgacccggctgcctgctgtaaagaactagttgatgaggccattaagaggaagagtggtgataacctttctgtggttgtcgtctgcttcaactctaggccgcctcctgttctaacaactcctaggcctcgtgtacagaggagcatatctgcagaaggcctgagagagctgcagagcttccttgatagtttggccgattgacatggggttctagcagccccactataagttttgaccttttccatagcttagcttggaaaataggtttagcatgtgctgtctcataacttcgctgagatggctgctgttgagtaatctagagttgtaaaatatgctgcggctaactgtgtcagcagttgagagcgtttatcagttgagagtatttatcagcatgttgactttgtgagtcctgaatgattagtcggcatttcttaggtctccataaatcggtggttcatcgttgtaaaaggctgttaatgcccttggatattttcctgtattgttcgctttggacaagttattaactgggaaaactgctgtttttgctgcgaagtggttgaattttcttgggt

SEQ ID NO: 212437 - DNA, 1329 bp, Zea Mays
tgccatttcccggcgcatgattgccctgcactagctgtggcctgtgggggagtgggcacgtgaacgcgcaacgcatgaaggctggagatgtgagcctgtaataaagcggtctctatgtacgtgcctatcgctggggcctggggagctggaggctggagctagatcggcatgcaggcgaagtcgttctcacgctagtggcgttgctgggctcaactacgacaacaagatttctgtcaccttttctgcctgtcgcaatgagctaactttgcactgggatatatgagaaatctgtgggttcctccttccagcttgtgtttgcaccgattgatgagcattttccggatgatgctccattgatttcctctagctttcgtgtcataccacttgatatgaaaacagatggtgtatcctctggtaggacactagatttggcatctagtcttgatgtgggttctgctgcaccccaagcctcaggggatgcatctccagatgactgtaatttgagatatgtgctgacaatcgcctttcaattcccttatgagacgcaccttcaggacagtgttgctactatggcccatcaatatgtgtgtagtgttgtttctgctgtgcaaagggtgtcaatggctatatctccctccaaatctggtctaaatgatgggcaaaggatgctttccggcttccctgaagctgccacacttgctagatgggtttgccagagttatcactaccatctaggtgtggaaaccctcttcgctagtggaggtatcgaccatcactcgtcactgtaacacgatagtgatcgacgatcgtgagcttccatgttatgtgttctgatacttgagacttttattatgactatgtatgagatattgtctcttattagtactggatgagatgtgtcttattatgactatggatgagacttttgtgatgtaattgatgagactatggatttaaatattgttatgtgattgtgtgtgagatgttttatgtgaaaatatgttgtgctatatagctgttgatatatttgttatgttgtggaatgtggtgtaaaataaaaataaacaacatttgtaatgctggtcaaattaacttcctagaggcttattaagtcgtaggaagttagccagctaacttcctaggggctacagtaagctgtaggaagttatccagctaacttcctaggggctacaataagtcgtaggaagttagccagctaacttcctagggtctacagtcagccgtaggaagttagtcgtaggaagttagtcagctgacggcgctgacggcgtgaagctactaacttccgagaatctactaaattccgag

SEQ ID NO: 212438 - DNA, 1479 bp, Zea Mays
cgcgcattgtgtttttgcctttcaataaagaacatcatacttggtctagtagcagatgtctcggacaaaatttatttaacgtttaaatttaaatcgctcggttatagtaataatcaagagatatgttttttgtgtaattaatttcataatagtttacaggccgtttaggtaaacgtgaacttatttttgacactttctgtgtaacatctccagccttcatgatgaacgtgaacttatttttaggtaaaacgtgaacttatttttaacttattcatgttgtccgccttgaaggacaacctcttactcatgatgaagcccttctttcaagggacatccaccttctccagtaaatatttgagccccatctattcttttgattcgaaattctgcaccgcctctcactgaaccaaaagctttgcactgggatatatgagaaatctgtgggttcctccttccagcttgtgtttgcaccgattgatgagcattttccggatgatgctccattgatttcctctagctttcgtgtcataccacttgatatgaaaacagatggtgtatcctctggtaggacactagatttggcatctagtcttgatgtgggttctgctgcaccccaagcctcaggggatgcatctccagatgactgtaatttgagatatgtgctgacaatcgcctttcaattcccttatgagacgcaccttcaggacagtgttgctactatggcccatcaatatgtgtgtagtgttgtttctgctgtgcaaagggtgtcaatggctatatctccctccaaatctggtctaaatgatgggcaaaggatgctttccggcttccctgaagctgccacacttgctagatgggtttgccagagttatcactaccatctaggtgtggaaaccctcttcgctagtggaggtatcgaccatcactcgtcactgtaacacgatagtgatcgacgatcgtgagcttccatgttatgtgttctgatacttgagacttttattatgactatgtatgagatattgtctcttattagtactggatgagatgtgtcttattatgactatggatgagacttttgtgatgtaattgatgagactatggatttaaatattgttatgtgattgtgtgtgagatgttttatgtgaaaatatgttgtgctatatagctgttgatatatttgttatgttgtggaatgtggtgtaaaataaaaataaacaacatttgtaatgctggtcaaattaacttcctagaggcttattaagtcgtaggaagttagccagctaacttcctaggggctacagtaagctgtaggaagttatccagctaacttcctaggggctacaataagtcgtaggaagttagccagctaacttcctagggtctacagtcagccgtaggaagttagtcgtaggaagttagtcagctgacggcgctgacggcgtgaagctactaacttccgagaatctactaaattccgag

SEQ ID NO: 212439 - DNA, 439 bp, Zea Mays
caagaagataatgtcgctgtttattattccgctcgtttctcaggagtcaggacctcgccccggccccaatcccttctccttcgtgcagctgcgcgccagatcgacttcaccgtcgcaactcgtgctgacggtccggccagcatcgcctcctgctcgcgacctcgcccagctccctccaccctccggtgagacgcagatctcctgctcgtggcctcgcccagctccctccaccctccggtgagacacagatcttggtgcgacggggcactacggaggcagggtagtgcggttgtgcgtgtgttggtggcctggttctagcaaccgagaatgttcagagatgaattagagagagatggcatgcctaacattgaaagaacattgcgacaaggattccagacttggttcagaacccatatcctcagaatgcggaatataaatc

SEQ ID NO: 212440 - DNA, 728 bp, Zea Mays
ggcgctgtcgagacgtgttagctcagcgccacggtcctgacaccgtataaaaggtgcaggaccgcgaacacgaggaggcaggggagcagcatccacaaccacaagccatggcggggaggactaacatccccactaacaactccgccctcatcgcaatcatcgccgacgaggacaccgtcactggcttcttgatggccggcgttggcaatgttgatctgcgcaagaaaaccaattacctcctcgtcgacaacaagacgacagttaaacaaatcgaggacgcgttcaaagaatttactgcaagggaggatattgctattgtgctcatcagtcagtatattgccaacatgataagatttctggtggatagctacaacaagccagtccctgctattctggagatcccatccaaggaccatccatatgatccagcgcacgactcggtgctgtctcgagtgaagtatctcttctctgcggaatcggtggcgtctgataggcgatgaaggcatccttgtgtagtagtaccctttggtgtatctgttttgttatgtattgaaaagaagtggcatgcgtccgagcgagacagcaaacaataataatggttgtggaaccaaaccaacacctttttttctttcataaaaggttggaatgctattttgttgctttgtactgtatttggttggttaatagagagtaataaaatgcgattgtcatgttgcacagtactgttt

SEQ ID NO: 212441 - DNA, 1772 bp, Zea Mays
atctatcaaaaaccctagcaaagccacctcaactctcctgctggtccggcgcaggctccgctccgttcccccgctgtagttcgagtgttcgacccggcggccggcggcgacgcgctcgtggtttccagcgatgtcggcgcaggcgggtccagggacgtactccccggcggcggccgcaggagacaggcggcgggagaggaaggaggagctgcggcgccacctcgccgaagacgccgactggccgcgggccgacggccgctccttccacgactgccggccagcgtttatgcagacaggaccaactactgctgcatcagggtctgcttatgcagaatttgggaagacaaaggtcattgtatcggtttttggaccaagggaaagtaagaaagcaatgatgtacagtgacgttggtaggctcaattgcaatgtgagctatacaacctttgccactccagtgcgtggacagggagcagacaacaaagagtattcatcgatgcttcataaagctctggaaggcgcagtaatgctgcacacttttccaaagaccactgttgatgtttttgccttggttcttgagtctggtggcagtatgatactattctagccttgattttttgagaaaaatataatgcatagatttttttacatatgtgcaagttctgttcttgtttaagaagtaggaatgctgctcatctttgtgacatgctagagcctctaatagttagagctaagtcgtaaatgacaaatgcatagattgaacgtgttatccatactcccatagtatttgcttattctacaaaactgtacggggttaatgtgttttgagttgataattcttatgtcagtcagatattgctatattattggtagaaatgatggattgtgggtacattttttccttcaaaaaagggataatttttacagcccatcttccattatatatatctattgtttcaatggaaacctttcttctatgaccaattctttctgcataagtttccttgttgaaatgcaggaccttacctgcagttgtttcgtttcaggtgatcttcccatcattatatcatgcgctagtcttgcattggcagatgctggaatcatgatgtatgaccttgttacatctgtatccgtgtcctgtttcagaaagaacatcatcatcgatccaacctcagacgaggaagcatggcaagacggaagccttgtggtggctttcatgccagcccgcaaggagatcacgcagctcacgctcactggagagtggagcgatggcagaataaccaatgcagtagagctctgtatggatgcttgcagcaagctgggtgacatattgcgtgaccgcttgaaagataccgctaccttgacgtgtgaatgacgtgttagagagagcactggcaacaacagatgttcttagctgtacaaattctgtaggcaggggaggctgatcggcctgatgtttgagtgagcatgatgcatggttatgatgatggtctccttcacggcaaaagctgtcaaaccgggaagaaattgcagggcagtgtgtatttggcatgtaacgtacttctgactgacctttgccttcatgtagcatctgtatctttctttttccgcgtactgtaacacttcttactctaccaggagctggaatttttttggttcgggtgaaaaaacattttgctgctctcagcttttcaccccttgtttccacatgctttaggtcggactcgctacatgaaattcctagcctagttactagtggctcgcaactcgcaaat

SEQ ID NO: 212442 - DNA, 2706 bp, Zea Mays
agctcttccagcacattatagtttccacctagttgtggatcaacgaagctctcttctatagccatcaactcaattgtatactgaactatgtcacgaggcagggatcctttggcattgagccaggtaattggtgatgtgttggatcctttcataaagtcagcaacgatgaggattaattatggtgacaaggagatcacaaatggcactggactacgagcatctgctgtgctcaatgcaccacatgttgagattgaaggccacgaccaaacaaatctctacacacttgttatggtggatcctgatgcaccaagtccaagcaaaccagagtacagggaatatctgcattggattggatgcagccctctcaaaaaaggaggggggtgtttcttttccatccatcaacatctgaagaactcttgttatgtatgctattgggttggtaacagatataccagaggcaagagacatatgttctggttaaggatctcaagttgaggatctgacatcatggtattttctgtgggatccacttgatcactttagtcagtgtggtgagacttctacaggaaataaagtagatggctattgttacctaattcattgcatgacaatatacaatgctcaactaatggtatcttctgtgtgcgcccacaaaaataaaggttgcagctatatattaaatctttgagatgtccttcagaatgtcacgcattagaacttccattctagacaaaaatgaaattgagcttagtgtttaaattaaatacgatactataaggtgtcaaaaatgtttcatgacctagatgtctccttcaggaagctttcaaccagatctcaaaaatactatatattagcatgatgatatcaaacatattaatggttatcaattgttgcatacataaaaaaatagatcaacctagaagaatgtaggtggcattttattaaaaagaaaataggcatcaaaatttgcctccatgaggacttcaacctaggtggtctggtcatacatccacactcttggcttgaccaactgagctagctcaactcccttgttatcaattatacaactacagaactacttctgtgacaaattttaaattgcaccagggatttcttcaaaatcaggaagcattactgtagactcataaacatatctttagcaatgcatgtttcatgcacaatctagcagcccaatcagcttaggctggcagatagaaaaacttctgactgtaagaaaaaagttaagaacattttaaacaaatgaaataaaactagcacatcataatcataatagacctcatgttttttgtgaatttatgatttatactctcaataatggggatattacacatgtacattatatatggtaagctttgatatttaatttacttttgattgtagaagctataagggtctacatttaatatgctataggtagcaataacttcatcatcagaacctatcgtgtgtgtatttcttttctttttgggtgggtggatgtgttgattttctttgtgtgtgtgtgttgggggggggggggtggcatggtgccaactgaacacaatgttgaggacagcaggcaatgaaatagttccctatgaaagcccaaggccaccagctggaattcatcgaattgtttttgtgctgttcaaacagcaagcaagacaaacagtttatgcaccaggatggcggcaaaatttcaacatcagagacttctcggcaatttacaatcttggagcaccagttgctgcattatacttcaactgccaaaaggaaagtggtgttggtggcagaaggtttctgggatcaagctgaagaaaagattcagagaaacatctacatggaggcagtaccattcacaattcagaaattagtccacctaaaatagttgaaaacatatgagatgttagttgacagttaggttctagagtaattgactcatatcatatggaacaaactagcatttgaaggtcatcttcctatgttacccacctcaataaagattactgagtttcattatgagaataagtgctcatttacaacaaatcgttggtgtttaagttcaagtatcacaaaatcttaataaagtataaaatctgcttggtggattctccaaatagaaaggagaccataccacatggacgtggccattctgcgtcttcagataacgcgccatctacaactagcagattggccggcccacgcccatccctccaagttacctgctaagggcctcacacacccagcagccagcgtccattccaactaggatacatcaggcaacgcgcctatgaaactcaaccggcgagatgcgaatcgaagtttgctttgaagtttgaaccaggcggccccggccgatcaccgtttggcactgcagcgatacctaatacgaaacgattgaatcacaggggtggggaccggaggagatacattgcctttgaggagaaagagaaccgcggctggacgacggcgagtcgagcggccgaggcgaacgaagctcataccagttgttcgtggagagcgcgggaggcgtcggaggaagcgatcgcgttggtcggcgtctgaacgagcctgggtgaggctgggttcgttttctcctccttggatggagtggagggtataggacggtgggcggtggcctccgacgccgacgaggtggtggctgacggcggcaagcagttcggattgctaaatgcggagtgtggg

SEQ ID NO: 212443 - DNA, 857 bp, Zea Mays
tctacactaaccacaccaagaacttggagggtaggtggtgtacttgcaatgtctcgggcatttggcaaccgtctcttaaaacaatttgttattgcagaccctgagattcaggaacaagaaataaatgatgagttggagtttctaattatagctagtgatgggctgtgggatgtggttccgaatgaggacgctgtttcacttgtgaagatggaggaggatcctgaggcagcagcccggaagctgacagagactgcgttctcccgtgggagcggcgataacatcacctgcatcgttgtgaagttcgagcatgacaagcctggtggcggcggctactcgcctccaggcgacaagagttgattccatttgctgttggttatacgctttgccggtgtcccttttaccctgggccggattttgctggccccatccatggtgccccccgcggctggtacttgaggaaggagctggttcatgttcgtcgcctgtcttgtctatatttatgccactaattttggtctccggtcagtggggttaccggcgggcagtgcttgcccatttgcatgtttatcgtgggttcatcgtcctatacggcattgttgtagacttgtagttgctgttgcctgttgtatcaatgagagctaattctgtgaggcgcagggggatgggtgcactttgagatgttcccggaccgatctccttgcaaacacctccgctgcactgtatgtttctgttatatacagatcattgtccttgcacggccgtcagccaaggacgaatggccagtgaaaatgtggtggtgctcactgcccaaaagcctctctcaaggcagagggctttgcagtgtggccaaggtctgc

SEQ ID NO: 212444 - DNA, 950 bp, Zea Mays
gtcccaccgagtcatcagatcacagctattgcgctctctgaagatcacaagccgaacagaagtgatgagaggaaacgaatcgagagtgctggtggaatagttatgtgggctggaacttggagggtaggtggtgtacttgcaatgtctcgggcatttggcaaccgtctcttaaaacaatttgttattgcagaccctgagattcaggaacaagaaataaatgatgagttggagtttctaattatagctagtgatgggctgtgggatgtggttccgaatgaggacgctgtttcacttgtgaagatggaggaggatcctgaggcagcagcccggaagctgacagagactgcgttctcccgtgggagcggcgataacatcacctgcatcgttgtgaagttcgagcatgacaagcctggtggcggcggctactcgcctccaggcgacaagagttgattccatttgctgttggttatacgctttgccggtgtcccttttaccctgggccggattttgctggccccatccatggtgccccccgcggctggtacttgaggaaggagctggttcatgttcgtcgcctgtcttgtctatatttatgccactaattttggtctccggtcagtggggttaccggcgggcagtgcttgcccatttgcatgtttatcgtgggttcatcgtcctatacggcattgttgtagacttgtagttgctgttgcctgttgtatcaatgagagctaattctgtgaggcgcagggggatgggtgcactttgagatgttcccggaccgatctccttgcaaacacctccgctgcactgtatgtttctgttatatacagatcattgtccttgcacggccgtcagccaaggacgaatggccagtgaaaatgtggtggtgctcactgcccaaaagcctctctcaaggcagagggctttgcagtgtggccaaggtctgc

SEQ ID NO: 212445 - DNA, 1354 bp, Zea Mays
ggcggttcttctttctcctcgtctctcttcaccctcgcgtgggtaggagcgccagcggcttcgtccgatctctcacctcacttcagtcttcagccacgcacactccctccttccctccccgatcactactctccctctccagttcacacccaccgccccacctctcccactcaaatccagggccatcgcagatccaccgcctccccgatccggtcgcctacccagccgcccgatcggatcctgcaggtcatggcggttcacgtgctgctgagtatttgaaggagcatttgtttgagaacctcatgaaacatccagagttcatgacaaacacaaaattagcaataaatgaaacatataggaagaccgattcagagttcttggatgctgaaaggaattctcatagagatgatgggtcaacagcatcaacagcagtgctagttggtgaccatctttacgtggcaaatgttggagactcaagggctgttatatcaaaggctggcaaagctattgcgctctctgaagatcacaagccgaacagaagtgatgagaggaaacgaatcgagagtgctggtggaatagttatgtgggctggaacttggagggtaggtggtgtacttgcaatgtctcgggcatttggcaaccgtctcttaaaacaatttgttattgcagaccctgagattcaggacgctgtttcacttgtgaagatggaggaggatcctgaggcagcagcccggaagctgacagagactgcgttctcccgtgggagcggcgataacatcacctgcatcgttgtgaagttcgagcatgacaagcctggtggcggcggctactcgcctccaggcgacaagagttgattccatttgctgttggttatacgctttgccggtgtcccttttaccctgggccggattttgctggccccatccatggtgccccccgcggctggtacttgaggaaggagctggttcatgttcgtcgcctgtcttgtctatatttatgccactaattttggtctccggtcagtggggttaccggcgggcagtgcttgcccatttgcatgtttatcgtgggttcatcgtcctatacggcattgttgtagacttgtagttgctgttgcctgttgtatcaatgagagctaattctgtgaggcgcagggggatgggtgcactttgagatgttcccggaccgatctccttgcaaacacctccgctgcactgtatgtttctgttatatacagatcattgtccttgcacggccgtcagccaaggacgaatggccagtgaaaatgtggtggtgctcactgcccaaaagcctctctcaaggcagagggctttgcagtgtggccaaggtctgc

SEQ ID NO: 212446 - DNA, 1429 bp, Zea Mays
ggcggttcttctttctcctcgtctctcttcaccctcgcgtgggtaggagcgccagcggcttcgtccgatctctcacctcacttcagtcttcagccacgcacactccctccttccctccccgatcactactctccctctccagttcacacccaccgccccacctctcccactcaaatccagggccatcgcagatccaccgcctccccgatccggtcgcctacccagccgcccgatcggatcctgcaggtcatggcggttcacgtgctgctgagtatttgaaggagcatttgtttgagaacctcatgaaacatccagagttcatgacaaacacaaaattagcaataaatgaaacatataggaagaccgattcagagttcttggatgctgaaaggaattctcatagagatgatgggtcaacagcatcaacagcagtgctagttggtgaccatctttacgtggcaaatgttggagactcaagggctgttatatcaaaggctggcaaagctattgcgctctctgaagatcacaagccgaacagaagtgatgagaggaaacgaatcgagagtgctggtggaatagttatgtgggctggaacttggagggtaggtggtgtacttgcaatgtctcgggcatttggcaaccgtctcttaaaacaatttgttattgcagaccctgagattcaggaacaagaaataaatgatgagttggagtttctaattatagctagtgatgggctgtgggatgtggttccgaatgaggacgctgtttcacttgtgaagatggaggaggatcctgaggcagcagcccggaagctgacagagactgcgttctcccgtgggagcggcgataacatcacctgcatcgttgtgaagttcgagcatgacaagcctggtggcggcggctactcgcctccaggcgacaagagttgattccatttgctgttggttatacgctttgccggtgtcccttttaccctgggccggattttgctggccccatccatggtgccccccgcggctggtacttgaggaaggagctggttcatgttcgtcgcctgtcttgtctatatttatgccactaattttggtctccggtcagtggggttaccggcgggcagtgcttgcccatttgcatgtttatcgtgggttcatcgtcctatacggcattgttgtagacttgtagttgctgttgcctgttgtatcaatgagagctaattctgtgaggcgcagggggatgggtgcactttgagatgttcccggaccgatctccttgcaaacacctccgctgcactgtatgtttctgttatatacagatcattgtccttgcacggccgtcagccaaggacgaatggccagtgaaaatgtggtggtgctcactgcccaaaagcctctctcaaggcagagggctttgcagtgtggccaaggtctgc

SEQ ID NO: 212447 - DNA, 2162 bp, Zea Mays
gtgggcggttcttctttctcctcgtctctcttcaccctcgcgtgggtaggagcgccagcggcttcgtccgatctctcacctcacttcagtcttcagccacgcacactccctccttccctccccgatcactactctccctctccagttcacacccaccgccccacctctcccactcaaatccagggccatcgcagatccaccgcctccccgatccggtcgcctacccagccgcccgatcggatcctgcagggtttgtgcccgccgtgagttagatggtttacgatggtgccgtgaaggaccaggaccaggagagcgcagcggcgagcactgcgttggcggcatcggtggtggcggcgtctcccgagcaggtggtggtggggagcacgagggtctcggcgaggccgccgcaagacaagcgcctcggcgtgcgccaccccttgaagcaccgctggttccgtgcccggggtaaggtgatggtggagctcggaggggtgccgcccgctcacgccgtgccggaaggcgaggaggaggaagaggaggaggagggagtcagcgagagcgaggtggaagaggagttagtggaggtagaggtggagcaagcctcgtcagcggggacgggaatgcggggcgttgaagtggaggtgttatccgcgccagcaacaggggtgcaggagatggacgtggaggtcggtgaaatggaggtgtcgcctgagcccgcggtcgctgtggggggcaccgagctggagccccagccggacgacgaggacgaggtctcatccgtcaccttggcgcgaggggagaggaagcaggaggccgctcctgctcctgcttcctctgccgtgctagctgtggaggcgcccagggagaaggatcaggatggggagagggtggagaaggagaagagggacaaggagagggaaatgcagaaggagcgggagagggtggatgaggtcggctacatgagcggaggatggaagaggtcatggcggttcacgtgctgctgagtatttgaaggagcatttgtttgagaacctcatgaaacatccagagttcatgacaaacacaaaattagcaataaatgaaacatataggaagaccgattcagagttcttggatgctgaaaggaattctcatagagatgatgggtcaacagcatcaacagcagtgctagttggtgaccatctttacgtggcaaatgttggagactcaagggctgttatatcaaaggctggcaaagctattgcgctctctgaagatcacaagccgaacagaagtgatgagaggaaacgaatcgagagtgctggtggaatagttatgtgggctggaacttggagggtaggtggtgtacttgcaatgtctcgggcatttggcaaccgtctcttaaaacaatttgttattgcagaccctgagattcaggaacaagaaataaatgatgagttggagtttctaattatagctagtgatgggctgtgggatgtggttccgaatgaggacgctgtttcacttgtgaagatggaggaggatcctgaggcagcagcccggaagctgacagagactgcgttctcccgtgggagcggcgataacatcacctgcatcgttgtgaagttcgagcatgacaagcctggtggcggcggctactcgcctccaggcgacaagagttgattccatttgctgttggttatacgctttgccggtgtcccttttaccctgggccggattttgctggccccatccatggtgccccccgcggctggtacttgaggaaggagctggttcatgttcgtcgcctgtcttgtctatatttatgccactaattttggtctccggtcagtggggttaccggcgggcagtgcttgcccatttgcatgtttatcgtgggttcatcgtcctatacggcattgttgtagacttgtagttgctgttgcctgttgtatcaatgagagctaattctgtgaggcgcagggggatgggtgcactttgagatgttcccggaccgatctccttgcaaacacctccgctgcactgtatgtttctgttatatacagatcattgtccttgcacggccgtcagccaaggacgaatggccagtgaaaatgtggtggtgctcactgcccaaaagcctctctcaaggcagagggctttgcagtgtggccaaggtctgc

SEQ ID NO: 212448 - DNA, 3806 bp, Zea Mays
ccccagactgatagcagcacacaattaacagttgttaaattaataagggccatcattgccttggaatagtattctacaacaaggctggaagctagcagcagcgcaacatatccggagttgttcgtaattgaagctgaaactaagatgcagtacaacatctcgaccaaaataaaacccacaaccagcagctcagcgcagccgattgcaaaagggactaaaactgagttgcagtacatcatctaaaaccaaaatacacccggacaggctggcaaggaaccagacagccaccagacgtgctgcagcattgctccttgcttccgcttgcagattatccatctcatcatgtatttcttctatagcttcacctgcaattcccatcagtgccttgtcaacgtgttcggtgtccggcatatgaatgttgaacagggcttccaaagtcgcccctacctccttagataatggtttctggaaccaagcctgaaagtcctggaaagcattatcaaaattaggagttccgtcattggccaagaggccaagtttgtgacagaggttgcattgtgcccgctgcatgatctgcatatgagggccattagcgagtctagcactacgaggtaccgcagagttgtgacatgcacttctcctgatctattcgaatttaagaaaatagcagcagcatccgcgtacagattcactctccttgcagaatgagagagaggataggggtaagggcactctctcgagatgccatggcgaacaatttctgcatggggtcgatggaaagaatgaaaagcaaatgagagagagagaggttctccttgtctcaaaccccagccatggttgaaaaaactgcctaaggactgcgaagctggctgttctgaggagaattgaaacccaggctttccatctagcaccgaaacccaactgatgcaacacctcaagcagataatctcatctagcactatcaaaggctttggcaatattcagcttcagtcgtcaggacgatgtgtgggagaagatgagacaggggaagaggggaaaaaagaaaataaataaattgtattttgatcgataggtcatacatactgagggagagtactgatgatctgctagagcatgtctttcaaatagtaacaaaatcagtattggtgcatggccactaatatcgtcacataaacttggtcagtagagaaaaaccgcctcacaatattatattaagaaaaggcttaatcgtaacctgaaccgagaaagatcacaaaagataacctcacattgaagatgaattattggtgagttgttgaagatgctcttaacagtagtatagtagacaatggtacgccaacgctcctggcttgcaagctagccacacagcttcctcacatccatgggtgaaaccaatggcgcggggagccgtcgaaggcaatggccgtgagcttccgcgacgtggcctccgtcggatggacgaggtcccagaacacgtggttcgtccccgcgctcacccgcccgcacacgcacagatggagaattttttatggatggaaaaaactagagatatcacctgttcgcttgttgcttcgattctggtgtcgacgtctcccgtctccgtgcgtagtgtcgccgagccatcaaggatgctcttccatttgtctctcatcacggggcgacggcgtcgtccgctgtcctgcacggcggaacacgcagctgactcgttctcctctcggacgccggccggcctcgctctggatcgctagcggccggccggccgttgctacgccaaacggccagagtgccgatgcccacgtccaacgcgagagcatcatatatgtcgttgcttatccaaagcacacctggcgtgccgagctctacctggcctgaccatcgcgctggtgccatcatgtcgtcgtcgaagcggtggacgtccgcctccggcacggcggagctgcctgggcggtcgcccctacccgcctccgcgctctcgccagtccgccagagcgcccggcgctcagtctcccgaccggaacccggcgccacaacatcccccgtggccgtctcgatcgctcgcacgctctggccttcctcgtccaccggcaacaagagcggcaagagcaaggccccgcgcccgccgtctcccttgtcctccgcgccacctccgccgccgtcgccgtccgtggccaccctcgcggaccacctcgtcaaagacgactcgccacgttctctctcccggcagcgcagctgcaccgaggtcccgcgcttcgccgacgcggacgcggaggccaggaagatcgggaagcaggcatcagggaagggcgccgggcacgcgttcggccgctccatgcgcttcctcccgtccaccaggcccgcgggcgtgacgctcaccccgggccgcgtcgcgccgtcggacctccgcaggctcggcaacatggccgtttccctggacgccgccgccgacgtcgccagctccgggtcggagtgcagcgacgcctccaggggctccaccaccacgccgaggacggcgtccaagccgcggtctccgttgctcccccgcacgggttccgtccgcttgctcgggtcgagcaacacgcagtgggcgctctcgccgggtcggcgcagcgggtcgccgctcaagcaggcggcgacgacgacgacgctggccacggtgccggagagcaaagggaagaagagcctgatcagcctggggtggggccatatcttccaccggcggaagcacgcggccgaggacgcgtccatcgccgccgctgccacggccaccctgctgtcctcgccggtgccatcgtcatcgcgcagcagcggcggggaggccggccaccacgtgaggatggcgcactgccgcctcctgcagtggcgcttcgcgaacgctaacgcggacgccgtccgcaagaggaagacgggcagcgccgagctggagttgatgggcacgtgggcaagcgtgtcggagatgagagggaaggtggcgcggaagcgagtgcagcttgagaaggagaagcagaagattaaactagacaccgtgctctatttccagataaaagatttggagagctgggggcagcagctgcagaccgcacatgactccgccctggcctcaacagtgggttgcgcccgagcagccgtttgcaggcttcccgtcaccaatggtgccaaggtatccctagcgccattggcgaccattctgcagcaagctcttgagctcacgttgacggccaagacagtgacaagatcatccagtccgatggctgaggacacggcgtcactgatctcaaagctggtgcttgtggcaagggaagagcaagctacgttgcaagagtgcgtcgagctgcttaggttggtctctgcactgcaggtggaggagcacagcttgcgcagccatctggtgcagtcggcatcgcgtagtgctgtggccgtgaaatagtaggccgggcgcttgtgcacaggcgtttcggctgtaggacgaccagctccagatgtgctctagacttttccagtaaaactagctagaatagaatcatatccacagatgcttaattgcttacgtagatgggtaccatcaaacaaaaacaaaaaaaaggaggtgtcatgtgagcacgttactgctgaatggccttcaactcttaggatgcgtttggttgagttaaataaaatagagtagttttatttcagtatttgagaatagagccgttctattatgtgtttagcaagaagaacagaaccgctctattttttttttggttgaacagtagaatagagttgagccgcttctttctttgtttggttggagagccgtatgagtgtag

SEQ ID NO: 212449 - DNA, 1197 bp, Zea Mays
caaaataggaaggatactaatcagctagctactttctctcctagccaatctccttctatgtttgctgcatgcacaatcaatcaggcggtcgccttctatgtttgctgcatgcgcaatcaattagatggctactttccatcctagccactcacctgctgcgcatgtgcctttgctgcctgctcagctcggcgcacatcgcgggctctcctacgcctggcgtatgtgtggccgtacatgacaatgtgtcttggcgacagccgggaatatggccttctccggagatataaaatgtgccaatatcctagttgatgcaagcggactggtcaaattggcagattttggacttgcaaaggagatgtcaattttgagccaggcaaaatctagcaagggaactgtctactggatggcccctgaggttgctaaggctaagccacatggacctccagcggacatatggagtcttggctgcacagttttggagatgctgacaggcgaagtgccgtatcctgatatggaatggacgcaggctttgctcaaaattggtaggggaataccaccagaaattcctaatacattatcagaagatgcgcgtgatttcataaagaagtgtgtccaagcaaatccaaatgaccggccatgtgctgctcagttattcgagcacccatttgtgcagcggccactgcaacaatatggcgtgtgatgttctccttggctgctaacacatttgattgtacataagctgatttaacttacatgcctaagctgttgatattatgagaatgatcccttggcccgagttccgagagtgaaccctcaatctgaaggcatccgttgctcaatgttccattttcatgctttgtagtttaggtttaggggtaggtcatcccttgctcactgtaccattttcatgatttgtagtttatggggtctaaaattgctttcaatctggtaagcacacccagacacttagaagcaacaatgtttgctttgatgtgggatgacttgtataagtggttcttttcgagcttgtccactttttacaccatgctctaacgactgtctcagcatgatatgcataatgataaacaagggaaatggtttaaaatgatgtttattggcgccttttgaaataccacatgtttaaaacgatgactattggcaccttttgaaataccatatgtcaacagagtggctctt

SEQ ID NO: 212450 - DNA, 2938 bp, Zea Mays
gttagatctgatgctttgagaaagtgtacaaattgattcttccaaagctcacctttgtctgtgtcaatgacttgtttgcatgtttcttttctggtgctttgtccgcaaattctgatataaggaaatcttataaaagaagggagaagggaaaatggggaaaagaaaaattcctatatattaaagctatgcagctagacgcacagccacataggccacgtcgttcgaatttttgtaagccatccgatacaagatcgttggttaccaggcgtgggagcaaaggtagccaaccacacgacgggactcttccagatggagacgaaacaccacacggcggggaagaaaaagagggatcagatctcagacgccggcgtccgtctccgccaagctgcatcgcctcaaacgctttgtcccggccatcgcgccggccatggccgccatgtcgaagaaggcgactctccatccctttcgagttccgagctcattctcccctccgcccctagcctcacgccacgtcccgcggaccgtactatagcctccacagccgtggtcgctcggccacacgtatcggtcgcttcgcatgccatcgctgcggcgacagtcgtgatacctgccttcgtcagcaacacgtcccaacccgactaagcgtcccgggccaccgcgatacttcatttccgaaatcgctgcggcggcagcagttatgcatgccttgctccaaatatataacactgtgagactgagtagcaaatcaagttgaagtcatcggaagttgtcaaacctcttttttttctcttttttgtatgttttttagagtccaatttggctggacctaaaaataatggctacgacttggtccaccctggcttccaacatatgaaacttcttgcgtcttcattaaattgtgctaataaaatgtgtgtttcgttttgttttgtcctgctacaggggtgaactatatgtgggaacactgaacctgcaaccgagactgtagcgattcgacaatatcacaagaggatcatacttctactccatgacaactgtaacctactagagctgaaagaaatacagagcctataagaaggaaatgtatgagatgcaaccaatgtacagtaagcaacttaccatatttatttatgacaattgttccaagaattaataagtattccagtgagcgtctcaaaaatggaatcaagagatgagatggtaactagctgaaaacagtaataattagaaacccaagagcgattttgcgacgccctgctgtgagccgaccctagcagtcaaggcttcgtaaatcagatttatctgtcaggtacaatcacaggaaatgttgtggcaaaggtatggcttaagagaaatcatgtacctagatgatttgttgtctatacgattagatggtgctgttcaccttcaattttttcaaatttggcaccactccagtcaccaaccatacatagaaaagttttagtgaagtcaatgaagcaaacattttaatatttcattctatcaataaaagtgtagttttgcttacgataagacctccataaacaataaacacgggtaaatgagagtattgatggttggaatgagtggtggtagcagaatgatatctacatacattggttttaggtaccagcaccttattttttttaataaaaatatgtgtgaacttggaactttttaatatgtgaggaagatgggtagatactgttgttgtgggcagggcagggcacccgagcaaaagcatagatgcgaatggggatgaatatgggttagctctcttcccctatttattggagttggagggatacactgctgctatggtttggtctgtgatgtcgtctcattagaaaaacatttgcttggcttgtatctcatttcctttctcattagaggacttaaactgagcacatgtttggcttatgcgcaatgtatgtggcaagcaaaagcaaatattatcctattaatgtgctcctactaacctgctctgcccacaatttattatgggtagatattgttccaatttattatgcatgttggcttcttgcagggaatgaatacatcttccgtttatatcaattgtgacttagatgtatgtcagtcttagtatgactattaagttgtgacatgaatgtgaattcgataatgtatttcataacttcatctacactacagatgtattgtgttattgttcccattcaccattgaaagtagttgttagatccaaattgatttcacttttaccaagtgatgttgttgctgcttccttataagtgttgctcccatttgattcgtcagattactggcttctgctactttcgagtagtgctgctactttcgagtagtgctgctgctttcgagtggtgttgttgctttcaagttgaagtgagttgttgttgacttccacaacaagctgctacttttagcgaaagtgagtacaaaacaggttgttgttgcatctcgggcaaatagcaatgttgtttattctgctttcaaacagcagtgctggtgccaaaagaatgtttataagaaaattcaaaaccaaacaaaagttgacaacaaacatgatgccataacattctatttgctagcaccatccagaattttaaaaattcagtttgttgccatgaaacagtttgctgccaccgttcagaattcagccatgttcaagtttacaactgtgtgataaagtaaattcagtttgctaccaccatggcaccgtccaaaaatgtatattttgacaaacatacacgaccagaacgatctattttgacaactttaacgagacatggcccattttgtagagcggcaatagagtgacccattttaacaaattcctcatcaaatgaattatctccatatttacttatttcatttctatattctcatgctttttacaaggtacacctatttatcctcttttcatgttatcaaagctcat

SEQ ID NO: 212451 - DNA, 2536 bp, Zea Mays
gcagctagacgcacagccacataggccacgtcgttcgaatttttgtaagccatccgatacaagatcgttggttaccaggcgtgggagcaaaggtagccaaccacacgacgggactcttccagatggagacgaaacaccacacggcggggaagaaaaagagggatcagatctcagacgccggcgtccgtctccgccaagctgcatcgcctcaaacgctttgtcccggccatcgcgccggccatggccgccatgtcgaagaaggcgactctccatccctttcgagttccgagctcattctcccctccgcccctagcctcacgccacgtcccgcggaccgtactatagcctccacagccgtggtcgctcggccacacgtatcggtcgcttcgcatgccatcgctgcggcgacagtcgtgatacctgccttcgtcagcaacacgtcccaacccgactaagcgtcccgggccaccgcgatacttcatttccgaaatcgctgcggcggcagcagttatgcatgccttgctccaaatatataacactgggtgaactatatgtgggaacactgaacctgcaaccgagactgtagcgattcgacaatatcacaagaggatcatacttctactccatgacaactgtaacctactagagctgaaagaaatacagagcctataagaaggaaatgtatgagatgcaaccaatgtacagtaagcaacttaccatatttatttatgacaattgttccaagaattaataagtattccagtgagcgtctcaaaaatggaatcaagagatgagatggtaactagctgaaaacagtaataattagaaacccaagagcgattttgcgacgccctgctgtgagccgaccctagcagtcaaggcttcgtaaatcagatttatctgtcaggtacaatcacaggaaatgttgtggcaaaggtatggcttaagagaaatcatgtacctagatgatttgttgtctatacgattagatggtgctgttcaccttcaattttttcaaatttggcaccactccagtcaccaaccatacatagaaaagttttagtgaagtcaatgaagcaaacattttaatatttcattctatcaataaaagtgtagttttgcttacgataagacctccataaacaataaacacgggtaaatgagagtattgatggttggaatgagtggtggtagcagaatgatatctacatacattggttttaggtaccagcaccttattttttttaataaaaatatgtgtgaacttggaactttttaatatgtgaggaagatgggtagatactgttgttgtgggcagggcagggcacccgagcaaaagcatagatgcgaatggggatgaatatgggttagctctcttcccctatttattggagttggagggatacactgctgctatggtttggtctgtgatgtcgtctcattagaaaaacatttgcttggcttgtatctcatttcctttctcattagaggacttaaactgagcacatgtttggcttatgcgcaatgtatgtggcaagcaaaagcaaatattatcctattaatgtgctcctactaacctgctctgcccacaatttattatgggtagatattgttccaatttattatgcatgttggcttcttgcagggaatgaatacatcttccgtttatatcaattgtgacttagatgtatgtcagtcttagtatgactattaagttgtgacatgaatgtgaattcgataatgtatttcataacttcatctacactacagatgtattgtgttattgttcccattcaccattgaaagtagttgttagatccaaattgatttcacttttaccaagtgatgttgttgctgcttccttataagtgttgctcccatttgattcgtcagattactggcttctgctactttcgagtagtgctgctactttcgagtagtgctgctgctttcgagtggtgttgttgctttcaagttgaagtgagttgttgttgacttccacaacaagctgctacttttagcgaaagtgagtacaaaacaggttgttgttgcatctcgggcaaatagcaatgttgtttattctgctttcaaacagcagtgctggtgccaaaagaatgtttataagaaaattcaaaaccaaacaaaagttgacaacaaacatgatgccataacattctatttgctagcaccatccagaattttaaaaattcagtttgttgccatgaaacagtttgctgccaccgttcagaattcagccatgttcaagtttacaactgtgtgataaagtaaattcagtttgctaccaccatggcaccgtccaaaaatgtatattttgacaaacatacacgaccagaacgatctattttgacaactttaacgagacatggcccattttgtagagcggcaatagagtgacccattttaacaaattcctcatcaaatgaattatctccatatttacttatttcatttctatattctcatgctttttacaaggtacacctatttatcctcttttcatgttatcaaagctcat

SEQ ID NO: 212452 - DNA, 2100 bp, Zea Mays
cgcctggccacctcctccgcaggaccgcagccctaccctctatcgcagcacgcgcgcgcctgttcacctccgccgcagcactagcgcggcacgcgcctgctcgcctccatccccggccaccgcggcgtcgcccacgcacgggcacgactcactctagccgaccagctccggccgccgcccaccgccacgcaggcgtgcactccagcagtgagcggtccagcctcggccaccgctcgtgccccgtggcccacgtgcgtcgctgcatccaggatcgacccaccggcgcggtcgtccggccagccgcagctccggcccggaacccgccccgccccgcccctgccggctgtgtccagcgcggcagcgcccagtggcccagcggctggcgccccctcgattcctccacacccgctccgtctcagccccctgcccctactgccacctgcgattgtctctgcagtatgtggcaaatgttcaaatcctaggtccgccattgcacctgaagcgtagctctaggaacaagacgtgtctagttgtgtgcgttgggactgggggaggaataagggattgatggccaacagcgagtatgagtacgtgaagagggagttcgagtttgatcgctgcctcccgccctctaactggatcgttgtccgtatcgacggttgccacttccacaggttctcaaaggtccacgcctttgagaaaccaaatgatgagaacgctctaagattaatgaacgcttgtgccactgctgtgctcgagaaatttcctgacatagcctttgcttatggtgttagtgatgagtacagtttcattttcagagaggaaacagagttctatcaccggcgagaaaggtcatataaataatcagtacaatacctgcttctggatgttggtgaaatctggaaaaagtgaacaagaggcccagctagctttgaagggaacatttgcaaaggacaagaatgagctgcttgctaaacaattccaaataaactatgatgatgaactggctatgttccgcaaaggatctagtgtttaccgagagaaggtagaaacaactgtgaagattgatgactatggggagcccataaaaagaccaagattgaaagttacagtggcacatgttgataccatagggactgcgttttgggaaaaccatccacacattcttcgagaaggaaaatttatgcacgggtttgtaaagaaatttggcatcaatcacatattttcaccttgtaattggatcattgttcgcatcattgcttgccaatttgaccaattctcaacaattcattcatttgacaagccaaatgatgagactgcactaaggctgatgaatgaatctgcatctttgatgatggagcaataccctgacattgtctttggctatggttttagcaatgagtatagttttgtgttccatgagaagagtgaactataccagagacgggaaagcctaatcctttcatcatgttcttcatatttcacttctctttacatgacgaaatggaaagagttcttcccctacacagaattaatgcagacaccacactttgaggcagatgctctatgttatccaaaactaaagatcatatgtgaatacttatcatggaggcaagcagagtgtcatgctggcaaccaatacaacacatgcttttggatgctagtgaaatctggaaaaagcgaaaaagaagcccatgagatattgaagggaacgttgtctaaagataaaaacgagttgctttttcagcaattccaaatgaactacaacaatgaacctgctatgttccgaaagggttcatgtgtctatcggcgaaaggtggaagaacttgcgggggctgaggacggcggcaatggcacatcaagagagcggtggcatgtgaaggtggaccacgttgacctagggcccggtttctggcgaaagcacccgtggttaatgactaattgcactcagtagtcccgactgatacatggtttttgtactggtttatcagtgtatgtaactcttgctgacacaggtctagaaacgaaagacggttgtttgttcacacatcgaggcttctcttcaccctctattatgttctgatggttttctgagtcgtc

SEQ ID NO: 212453 - DNA, 2184 bp, Zea Mays
cgcctggccacctcctccgcaggaccgcagccctaccctctatcgcagcacgcgcgcgcctgttcacctccgccgcagcactagcgcggcacgcgcctgctcgcctccatccccggccaccgcggcgtcgcccacgcacgggcacgactcactctagccgaccagctccggccgccgcccaccgccacgcaggcgtgcactccagcagtgagcggtccagcctcggccaccgctcgtgccccgtggcccacgtgcgtcgctgcatccaggatcgacccaccggcgcggtcgtccggccagccgcagctccggcccggaacccgccccgccccgcccctgccggctgtgtccagcgcggcagcgcccagtggcccagcggctggcgccccctcgattcctccacacccgctccgtctcagccccctgcccctactgccacctgcgattgtctctgcagtatgtggcaaatgttcaaatcctaggtccgccattgcacctgaagcgtagctctaggaacaagacgtgtctagttgtgtgcgttgggactgggggaggaataagggattgatggccaacagcgagtatgagtacgtgaagagggagttcgagtttgatcgctgcctcccgccctctaactggatcgttgtccgtatcgacggttgccacttccacaggttctcaaaggtccacgcctttgagaaaccaaatgatgagaacgctctaagattaatgaacgcttgtgccactgctgtgctcgagaaatttcctgacatagcctttgcttatggtgttagtgatgagtacagtttcattttcagagaggaaacagagttctatcaccggcgagaaagcaaaattctctctttatgtgtttcctacttcacttctgtgtacgtaatgaagtggaaagacttctttcctaacaaagagctgaaggagccaccatattttgatgctcgagctgtatgttacccgaatttgaagactattcgtgattatttggcttggagacaagtggactgtcatataaataatcagtacaatacctgcttctggatgttggtgaaatctggaaaaagtgaacaagaggcccagctagctttgaagggaacatttgcaaaggacaagaatgagctgcttgctaaacaattccaaataaactatgatgatgaactggctatgttccgcaaaggatctagtgtttaccgagagaaggtagaaacaactgtgaagattgatgactatggggagcccataaaaagaccaagattgaaagttacagtggcacatgttgataccatagggactgcgttttgggaaaaccatccacacattcttcgagaaggaaaatttatgcacgggtttgtaaagaaatttggcatcaatcacatattttcaccttgtaattggatcattgttcgcatcattgcttgccaatttgaccaattctcaacaattcattcatttgacaagccaaatgatgagactgcactaaggctgatgaatgaatctgcatctttgatgatggagcaataccctgacattgtctttggctatggttttagcaatgagtatagttttgtgttccatgagaagagtgaactataccagagacgggaaagcctaatcctttcatcatgttcttcatatttcacttctctttacatgacgaaatggaaagagttcttcccctacacagaattaatgcagacaccacactttgaggcagatgctctatgttatccaaaactaaagatcatatgtgaatacttatcatggaggcaagcagagtgtcatgctggcaaccaatacaacacatgcttttggatgctagtgaaatctggaaaaagcgaaaaagaagcccatgagatattgaagggaacgttgtctaaagataaaaacgagttgctttttcagcaattccaaatgaactacaacaatgaacctgctatgttccgaaagggttcatgtgtctatcggcgaaaggtggaagaacttgcgggggctgaggacggcggcaatggcacatcaagagagcggtggcatgtgaaggtggaccacgttgacctagggcccggtttctggcgaaagcacccgtggtctagaaacgaaagacggttgtttgttcacacatcgaggcttctcttcaccctctattatgttctgatggttttctgagtcgtc

SEQ ID NO: 212454 - DNA, 2218 bp, Zea Mays
cgcctggccacctcctccgcaggaccgcagccctaccctctatcgcagcacgcgcgcgcctgttcacctccgccgcagcactagcgcggcacgcgcctgctcgcctccatccccggccaccgcggcgtcgcccacgcacgggcacgactcactctagccgaccagctccggccgccgcccaccgccacgcaggcgtgcactccagcagtgagcggtccagcctcggccaccgctcgtgccccgtggcccacgtgcgtcgctgcatccaggatcgacccaccggcgcggtcgtccggccagccgcagctccggcccggaacccgccccgccccgcccctgccggctgtgtccagcgcggcagcgcccagtggcccagcggctggcgccccctcgattcctccacacccgctccgtctcagccccctgcccctactgccacctgcgattgtctctgcagtatgtggcaaatgttcaaatcctaggtccgccattgcacctgaagcgtagctctaggaacaagacgtgtctagttgtgtgcgttgggactgggggaggaataagggattgatggccaacagcgagtatgagtacgtgaagagggagttcgagtttgatcgctgcctcccgccctctaactggatcgttgtccgtatcgacggttgccacttccacaggttctcaaaggtccacgcctttgagaaaccaaatgatgagaacgctctaagattaatgaacgcttgtgccactgctgtgctcgagaaatttcctgacatagcctttgcttatggtgttagtgatgagtacagtttcattttcagagaggaaacagagttctatcaccggcgagaaagtggaaagacttctttcctaacaaagagctgaaggagccaccatattttgatgctcgagctgtatgttacccgaatttgaagactattcgtgattatttggcttggagacaagtggactgtcatataaataatcagtacaatacctgcttctggatgttggtgaaatctggaaaaagtgaacaagaggcccagctagctttgaagggaacatttgcaaaggacaagaatgagctgcttgctaaacaattccaaataaactatgatgatgaactggctatgttccgcaaaggatctagtgtttaccgagagaaggtagaaacaactgtgaagattgatgactatggggagcccataaaaagaccaagattgaaagttacagtggcacatgttgataccatagggactgcgttttgggaaaaccatccacacattcttcgagaaggaaaatttatgcacgggtttgtaaagaaatttggcatcaatcacatattttcaccttgtaattggatcattgttcgcatcattgcttgccaatttgaccaattctcaacaattcattcatttgacaagccaaatgatgagactgcactaaggctgatgaatgaatctgcatctttgatgatggagcaataccctgacattgtctttggctatggttttagcaatgagtatagttttgtgttccatgagaagagtgaactataccagagacgggaaagcctaatcctttcatcatgttcttcatatttcacttctctttacatgacgaaatggaaagagttcttcccctacacagaattaatgcagacaccacactttgaggcagatgctctatgttatccaaaactaaagatcatatgtgaatacttatcatggaggcaagcagagtgtcatgctggcaaccaatacaacacatgcttttggatgctagtgaaatctggaaaaagcgaaaaagaagcccatgagatattgaagggaacgttgtctaaagataaaaacgagttgctttttcagcaattccaaatgaactacaacaatgaacctgctatgttccgaaagggttcatgtgtctatcggcgaaaggtggaagaacttgcgggggctgaggacggcggcaatggcacatcaagagagcggtggcatgtgaaggtggaccacgttgacctagggcccggtttctggcgaaagcacccgtggttaatgactaattgcactcagtagtcccgactgatacatggtttttgtactggtttatcagtgtatgtaactcttgctgacacaggtctagaaacgaaagacggttgtttgttcacacatcgaggcttctcttcaccctctattatgttctgatggttttctgagtcgtc

SEQ ID NO: 212455 - DNA, 1939 bp, Zea Mays
tcaattttttggtcctcgactaccctaggttcaaatcctaggtccgccattgcacctgaagcgtagctctaggaacaagacgtgtctagttgtgtgcgttgggactgggggaggaataagggattgatggccaacagcgagtatgagtacgtgaagagggagttcgagtttgatcgctgcctcccgccctctaactggatcgttgtccgtatcgacggttgccacttccacaggttctcaaaggtccacgcctttgagaaaccaaatgatgagaacgctctaagattaatgaacgcttgtgccactgctgtgctcgagaaatttcctgacatagcctttgcttatggtgttagtgatgagtacagagaggaaacagagttctatcaccggcgagaaaggtaactcattcagtttcacttttttgctgatatttcaatgtttatttgtctgccttttgtttatgagctatgggaaaatgttcatggcaccatgatattgacatctctaccaataacttcagcaaaattctctctttatgtgtttcctacttcacttctgtgtacgtaatgaagtggaaagacttctttcctaacaaagagctgaaggagccaccatattttgatgctcgagctgtatgttacccgaatttgaagactattcgtgattatttggcttggagacaagtggactgtcatataaataatcagtacaatacctgcttctggatgttggtgaaatctggaaaaagtgaacaagaggcccagctagctttgaagggaacatttgcaaaggacaagaatgagctgcttgctaaacaattccaaataaactatgatgatgaactggctatgttccgcaaaggatctagtgtttaccgagagaaggtagaaacaactgtgaagattgatgactatggggagcccataaaaagaccaagattgaaagttacagtggcacatgttgataccatagggactgcgttttgggaaaaccatccacacattcttcgagaaggaaaatttatgcacgggtttgtaaagaaatttggcatcaatcacatattttcaccttgtaattggatcattgttcgcatcattgcttgccaatttgaccaattctcaacaattcattcatttgacaagccaaatgatgagactgcactaaggctgatgaatgaatctgcatctttgatgatggagcaataccctgacattgtctttggctatggttttagcaatgagtatagttttgtgttccatgagaagagtgaactataccagagacgggaaagcctaatcctttcatcatgttcttcatatttcacttctctttacatgacgaaatggaaagagttcttcccctacacagaattaatgcagacaccacactttgaggcagatgctctatgttatccaaaactaaagatcatatgtgaatacttatcatggaggcaagcagagtgtcatgctggcaaccaatacaacacatgcttttggatgctagtgaaatctggaaaaagcgaaaaagaagcccatgagatattgaagggaacgttgtctaaagataaaaacgagttgctttttcagcaattccaaatgaactacaacaatgaacctgctatgttccgaaagggttcatgtgtctatcggcgaaaggtggaagaacttgcgggggctgaggacggcggcaatggcacatcaagagagcggtggcatgtgaaggtggaccacgttgacctagggcccggtttctggcgaaagcacccgtggttaatgactaattgcactcagtagtcccgactgatacatggtttttgtactggtttatcagtgtatgtaactcttgctgacacaggtctagaaacgaaagacggttgtttgttcacacatcgaggcttctcttcaccctctattatgttctgatggttttctgagtcgtc

SEQ ID NO: 212456 - DNA, 914 bp, Zea Mays
tccaggtttgggtgctgggattctatactcaaaagtagccaagaaaaggaaaacttgtgcctttatggctaccccaacgaaacatgggaagtaactttgccagcagaggaagttcctccagagatccctgaaccagctttgggtataaactttgctagggatggcatgaatgagaaggattggttagcgctagttgctgtccacagcgattcctggttactagcagttgcattctactttgcagcccggtttgggtttgacaaagaggccagacggcggctcttcaacatgataaataacttgcccacgatatttgaagtagtgactggggttgcaaataaacaaaacaaggagaagggccccaatagtaccagcaaaagcaacaaaacaagttcaaaaatgacatcaagacccgagtctcattccaaggcgacaaaagtggcagtgccccctaaggatgacgatgatgagagcggtgaagaatatgaagaggaagagcgtgataacaccttatgtggatcatgtggaacaaatgacggcaaggacgaattctggatctgttgtgatagttgtgagcggtggtaccatgggaagtgtgtcaagatcactcctgcacgtgctgagcacatcaagcactacaaatgcccagattgcaacaacaagagggcaagagcctagcgtcaagccctggtgtgaccctggagtgaaggctgatagaacatattatactcagaggggtagctatacttcaatatgctgatgacaccattatttgtgtaaagcatgatttggagagagcaagggatatgaagtttctgttgtacttatatgaaatgttggtaggcttaaaaatcaattttaatagaagtgaaattgtggtggtaaatgatagaaattggggtcagatatatgct

SEQ ID NO: 212457 - DNA, 1318 bp, Zea Mays
ctcaaaataaaacctcacccctccttggtctgcggccctttgtcctgtctcctcccacccttgcctccgagtcacctcctcccttggtctccgccgtcgctgcctccttgccggaaccctaaatggaccccggcgccggcgcacactactccgtccgtaccgcggaggaggttttccgcgacttccgcggccgccgcgcgggcatgatcaaggccctcaccaacgatgtggagaagttctaccagctgtgtgaccccgaaaaggaaaacttgtgcctttatggctaccccaacgaaacatgggaagtaactttgccagcagaggaagttcctccagagatccctgaaccagctttgggtataaactttgctagggatggcatgaatgagaaggattggttagcgctagttgctgtccacagcgattcctggttactagcagttgcattctactttgcagcccggtttgggtttgacaaagaggccagacggcggctcttcaacatgataaataacttgcccacgatatttgaagtagtgactggggttgcaaataaacaaaacaaggagaagggccccaatagtaccagcaaaagcaacaaaacaagttcaaaaatgacatcaagacccgagtctcattccaaggcgacaaaagtggcagtgccccctaaggatgacgatgatgagagcggtgaagaatatgaagaggaagagcgtgataacaccttatgtggatcatgtggaacaaatgacggcaaggacgaattctggatctgttgtgatagttgtgagcggtggtaccatgggaagtgtgtcaagatcactcctgcacgtgctgagcacatcaagcactacaaatgcccagattgcaacaacaagagggcaagagcctagcgtcaagccctggtgtgaccctggagtgaaacccccttctcaaaggtgtaaagatgttaagcaggggggcctattatccctagtcttgtttaattttgttgatgactggcttgactagaatggttgtcaaggcacaacataatggtttcaaaatcatttttttctctggcatggttgtcaagacccattatccttagtcttgtttcataatggtttcagggctgatagaacatattatactcagaggggtagctatacttcaatatgctgatgacaccattatttgtgtaaagcatgatttggagagagcaagggatatgaagtttctgttgtacttatatgaaatgttggtaggcttaaaaatcaattttaatagaagtgaaattgtggtggtaaatgatagaaattggggtcagatatatgct

SEQ ID NO: 212458 - DNA, 1135 bp, Zea Mays
ctttctctcaaaataaaacctcacccctccttggtctgcggccctttgtcctgtctcctcccacccttgcctccgagtcacctcctcccttggtctccgccgtcgctgcctccttgccggaaccctaaatggaccccggcgccggcgcacactactccgtccgtaccgcggaggaggttttccgcgacttccgcggccgccgcgcgggcatgatcaaggccctcaccaacgatgtggagaagttctaccagctgtgtgaccccgaaaaggaaaacttgtgcctttatggctaccccaacgaaacatgggaagtaactttgccagcagaggaagttcctccagagatccctgaaccagctttgggtataaactttgctagggatggcatgaatgagaaggattggttagcgctagttgctgtccacagcgattcctggttactagcagttgcattctactttgcagcccggtttgggtttgacaaagaggccagacggcggctcttcaacatgataaataacttgcccacgatatttgaagtagtgactggggttgcaaataaacaaaacaaggagaagggccccaatagtaccagcaaaagcaacaaaacaagttcaaaaatgacatcaagacccgagtctcattccaaggcgacaaaagtggcagtgccccctaaggatgacgatgatgagagcggtgaagaatatgaagaggaagagcgtgataacaccttatgtggatcatgtggaacaaatgacggcaaggacgaattctggatctgttgtgatagttgtgagcggtggtaccatgggaagtgtgtcaagatcactcctgcacgtgctgagcacatcaagcactacaaatgcccagattgcaacaacaagagggcaagagcctagcgtcaagccctggtgtgaccctggagtgaaggctgatagaacatattatactcagaggggtagctatacttcaatatgctgatgacaccattatttgtgtaaagcatgatttggagagagcaagggatatgaagtttctgttgtacttatatgaaatgttggtaggcttaaaaatcaattttaatagaagtgaaattgtggtggtaaatgatagaaattggggtcagatatatgct

SEQ ID NO: 212459 - DNA, 2401 bp, Zea Mays
ccaaaatcgacgataaggtttggggtcgagagctacgatgagatggttgatgtacttcagcagaatgagaagttagaggatgcacttaagctgttcgatagaatgatgtaggagcacgaccctccacctccactgcgtccgcgcgcgccagcgcaaagaactttcgaacagcagagacgccaaccgagccccaccacggttcttgaagatagactggtcggtctatttcttggctttctagactagaaaagggaatccaactagccaaggtccaagtgaccatcacgtttcagtttcattctctgggtaggggagctgctgcagccgtgtgtatggcgtcctcttcctcctccctgacgcggttatttatcccgcctcaccgagcgcaccatgaggcagccatggccgcttcggccggcgcctctctgcgtaacggcggcgggatgcagatgctgacgaaggatcttgtgatgcagaggtgggccgagatggtgttgtgctgcggcgcggattggaattgcgtgtcgcagctgtggaacagggtggtgctgcgcaagtggctaaacatcggcgcggggtccggggattccgacttcagcgccgacgagcacgatacctcggagggcgagaccgaccgcgaaggcatgtctggtttgaatcatgccctatgtaacgaagaaaggatattaggtggattgggtgcaagcacgactggtgacgaaatgagcgatttaccttactgccttagaatgcacagatcagagatcagtcgtgctcagtatgttgatgttagagaactcaggatttatgtagggacatggaatgttggaggcagatttccacccagtgacttggacattgaagaatggctggctacggaggagccagctgaaatttatgttatcggctttcaagagattgttccactcaatgctgggaatatatttggtgctgaagacaatcgtccagttgcagtatgggagcacatcatccgtgaaactttgaataagaattgttcagataaatcagggtttaagtgccatagtgatcctctttcaccatcaaggtttaatccatcagatgttgttctttccatggaacatggattgcttagtgagtctgacaaggatagtgatggggagcttcatccattgattgaacgagaccataattgtggacttcaagctaaaacaaatgaaaatcttgaagctttcccagaagataatttagcctgtgatgccatcattgataatagaacaaaaaggaaaaggccagagtttgtacgtataataagcaagcaaatggtcgggatatttctttcgatttgggttcggagaagcctgcggaagcacattaagaatttgagagtatcaacagttggtgtaggcgcaataggttatattggtaacaagggatcaatatcggtcagcatgtctgtacatgagactcctttctgctttgtttgttgccacctgactgctggtgaaaaagatggagatgacctaaaaaggaattcaaatgccgaagaaatacttcgaagaacagtgtttaacccagagaatgttgtaggcatgcctatgagaatatatgaccataagcggattatatggttaggagacctcaactatcggatcaacttatcctatgaaagggcacatgaactaatctccaaacaggactgggatggattgttcgagagggatcagctgaaaagagaattgaggaaaggatgcacatttgacggttggttcgaaggagttatcagctttgccccaacatacaaatatgagtttgactcagaaaactatgtaagcgatgagagtgaatctgggagaagaactcctgcatggtgtgaccgcattctctcatacgggaagggaatcaggctactttcgtacaagaggggggagcttacactttctgatcaccgccctgtggctgcagtctacgtggcagagattgaagttttccactgatgcagagagcaggaccatctatcatcagagaaggatggatggactggttgaacaaagaggtcgccgaaccacgagatatgcaatttcctagcacaagttccaagtgaggtggtgccatgccaatgacagtttttagaattcagtcagacattgttgatttgcattattgtatcatccttcacaagcagcatatttgccatggattattttttctgcacgcttgtttgatgaagagcatctcaagcactatgctccatgacatagtatcctttgaaaaaaatgtcaaatttgttcatataatgttcttttcttgttttgaactaggaagggatggttcaacatgcttcgtgtgtcgtgcttgccaaataaccatgtttgcacgataatatgattgtctgctgctcaaaccaagacaccatccaaaa

SEQ ID NO: 212460 - DNA, 4069 bp, Zea Mays
cggaaacgcccccgaaagcgccaccacctgacctgccgcggccgtaccccccccccccccccccttccacgagacaaaatccagaaccaggccggcggcccactcccaccgccgcgcctacgccttcccccgccccccgcgcggaggagggtgccgccggcgatggagacgacggccgcgggcgcgccaagagcgcagacgctgcgggacctcgcggaggagggcaagaagcggggcgtcctgctcctcgtcttcgccttcgggctggccttcctcatgtcccttacgagctcgtcagtttggtttaatctgccatttgccatagctctgattgttttgttccgctacatatcgcttgattatggccttcgtagaaagagcgtaactagaacagatcatgccagtcattcactcgtcaaaacaaaaggtactgaggtaaagaaagtcattcatcagactgaaacggatggaaaaatagattggaggagcaaggttaactcgcctccagttgaagcagcattcgaacagttcacaaggcaccttatctcagaatgggtaacagatctgtggtactcgcgcgtaacacctgacaaggaaggtccagaggaactcatcgatgtagtcaatactgtccttggggagatttcagttcgggcaagaaatgttaaccttatcaatctgctgatcagggatttggtcgatcttatatgcaataatttggaactttatcatttctgtcaagccaagattggaagagagaagtttgtgggccttccttcagagcgtcgtgatgctgaactgaaaatgatccttttagctgaaaacaagttgcatcctgctttattttcagctggcgctgaatacaaggtattgaaaagtcttgctgacgggttgatctcaatcacagtgaagcctcaggatctacaatgtactttcttccggtgtacagcgcgggaacttctcgcttgtgcagttttgagacctgttgtgaacttagcaaatccaaggtttataaatgaaagaatcgaatcctttgctctttcgcatgccaataagttggagaaaggaactgcagaatccttggatgttgtcacaactgttaagcacagggaaccacatatgccctctgttgatgaattttcggcactaatagaccactcaagttcaggtgttgagctcgttcaatttcgtcagggtcaatcgaaaactgcatcagatatacaacctggaaaaagtacaaatccatatagtctaaaattagaatcctctcatgcacctttagtcagtagttcacacccactggagtcaacaagtttagcttcgtcttcccacgttacttctgataatgggttttcgttgcataccaaaagcagcaacagagcaactgcaaatggtcatggtagagagtgtgcacagcccttgggtatcagttctgagcgtgcacatcaagctttagcacttgagcaccttgagaatatgtggacaaagggaaagaactacaaaccagaaaatgtagaacatgtcgcaaaagtgtctgttggatctgcttctctgggctcgacttcagttcagcaatcagttccttgcagcacttcagtttgttacaatcaaagtaattctgaaagaccaacagcgtcatctcagtcaaaggaccagcatttggtaagacactcaactacacctacatatgtaacatatccaaatggcaccccgaaaagcctatctgcagaaatggcagaacatgccggtccagaagactttgcagtagagagtgagagttcatatgccactgaggacgatgaattcaacaatgtgactggacttgattctcctgttaccagagtttgggaaagcaaaagtaaaggaaatgctaccttatcacatatacatcacccactcgaatctcctggtttccatagagcaaagaagaacagaagtcatgtgggaaaactgaagatgtcaagaacttcttcaggaagaaaaaggtcaaggtcaaatgctcagaagcctcctatctggcaagaagtggagagatcctctttctctgttggtgatagtatggacatactaaatacatctgcaaatgatctaaagacgcatgagctagacgaggatcctgaggtggaaagtatggctaggatgtttagtagttcaaatacttcatctttattgttgccatcaagtgactctgcatattcttcaaattattgtggtgccaatgtgctacaagactcttatttgaagttaagatgcgaggtggtaggagctagcattgtcaaaagcgggtctggcatgttttgctgtgtattctatttccgtgaccgacgccaatggtaatagttggtccattaagaggaggtttcgtcattttgaagacctgcatcggcgtctaaaagagtatgctcagtacaatcttcatttacctccaaaacatttcctctcatcaggtttagaggtttctgttgttcgagagagatgcaagctgctcgacatatatctgaagaaccttctgcaaattcctattgtttcaagctgcatagaagtctgggattttctgagtgtggattcacagacatatattttcacggacactctctcagtcatccaaacattgtcagtcagtttagatgaaagatcaaatgggaaaaatataaaagcattgaactcttctggagctttgaatggaaattctatctctggaggtcaatctttgcatggacatatagacgacaccgtacataaggattcagacatcgcttgtgatggtttgagatttaggaaagggaatgtgaacaagaacttgggaaacggtgttagccacacaacagatagtgttagcaacacaactgccaatcattatcaggacaattctggaagtgatccagagcagaatgatcattccttttcaatagattcattaaatcctaagaagttgcgttcaactgaaaccaatgacacatctcaaattccagagtctggaggattttcagtatctcctaatgattggatggccccgaatcttagtgttcccttgtttcatcttgttgatgtggtctttcagctccaagatggaggctggataaggcgtcaagcattttgggtagcaaagcaaatactgcaattgggaatgggagacacgtttgatgactggcttgttgacaaaatccaattacttaggaaagggaggataattgcttttgctgttaagcgcattgaacaaattctctggcctgatggaattttcatgacaaaacatccaaagagaaattcgcctccacctcctcctggtgctcagagcaatggcatgggaaactatctaagcgatgaacaacggatagaagctgctcatcgtgcaaattttgtccgtgaactgataatagataaagccccatctccactagtgagtcttgttggtcgaaaggattatgaaagatgtgctcatgatatctatttctttcttcagtccccggtttgtttgaagcagctagcgttcgaactccttgagctgcttgttctttcttcatttccggagttggatggcactgtgaggaagtggcacgaagataaagagcaattctgcgcccaagtggtgtggcctgtgaattctgcgaaaataaggtggtggcttcagaggagtgcccgtggatatctcagtttgaagtgggtggtggctttgtgcagtgtgaatatggttagatagtgcgaggatatggtccctttttccaccgggccatggcagaacggtttttgtgcccgatagagttcatttttccccctccagatttggtatacgtaatgctgctgcctgaaaggaaagagatggtggcgcattttttttgcacccgttttggtggtacactggtacccgtcttgtgtaaatctgcatagagataaatgaagtttcgaggtggtcaatgaatgataatagctctctggcatcgtgatgattcgttgtggctccgccttgctgtacgtttttttggtgctgcccctgcgaatcatctcggcactattttgtgatgataaaaaaaaagtaatatgcgctggagattcgtttattcaaatttcc

SEQ ID NO: 212461 - DNA, 3245 bp, Zea Mays
agcgccaccacctgacctgccgcggccgtaccccccccccccccccccttccacgagacaaaatccagaaccaggccggcggcccactcccaccgccgcgcctacgccttcccccgccccccgcgcggaggagggtgccgccggcgatggagacgacggccgcgggcgcgccaagagcgcagacgctgcgggacctcgcggaggagggcaagaagcggggcgtcctgctcctcgtcttcgccttcgggctggccttcctcatgtcccttacgagctcgtcagtttggtttaatctgccatttgccatagctctgattgttttgttccgctacatatcgcttgattatggccttcgtagaaagagcgtaactagaacagatcatgccagtcattcactcgtcaaaacaaaaggtactgaggtaaagaaagtcattcatcagactgaaacggatggaaaaatagattggaggagcaaggttaactcgcctccagttgaagcagcattcgaacagttcacaaggcaccttatctcagaatgggtaacagatctgtggtactcgcgcgtaacacctgacaaggaaggtccagaggaactcatcgatgtagtcaatactgtccttggggagatttcagttcgggcaagaaatgttaaccttatcaatctgctgatcagggatttggtcgatcttatatgcaataatttggaactttatcatttctgtcaagccaagattggaagagagaagtttgtgggccttccttcagagcgtcgtgatgctgaactgaaaatgatccttttagctgaaaacaagttgcatcctgctttattttcagctggcgctgaatacaaggtattgaaaagtcttgctgacgggttgatctcaatcacagtgaagcctcaggatctacaatgtactttcttccggtgtacagcgcgggaacttctcgcttgtgcagttttgagacctgttgtgaacttagcaaatccaaggtttataaatgaaagaatcgaatcctttgctctttcgcatgccaataagttggagaaaggaactgcagaatccttggatgttgtcacaactgttaagcacagggaaccacatatgccctctgttgatgaattttcggcactaatagaccactcaagttcaggtgttgagctcgttcaatttcgtcagggtcaatcgaaaactgcatcagatatacaacctggaaaaagtacaaatccatatagtctaaaattagaatcctctcatgcacctttagtcagtagttcacacccactggagtcaacaagtttagcttcgtcttcccacgttacttctgataatgggttttcgttgcataccaaaagcagcaacagagcaactgcaaatggtcatggtagagagtgtgcacagcccttgggtatcagttctgagcgtgcacatcaagctttagcacttgagcaccttgagaatatgtggacaaagggaaagaactacaaaccagaaaatgtagaacatgtcgcaaaagtgtctgttggatctgcttctctgggctcgacttcagttcagcaatcagttccttgcagcacttcagtttgttacaatcaaagtaattctgaaagaccaacagcgtcatctcagtcaaaggaccagcatttggtaagacactcaactacacctacatatgtaacatatccaaatggcaccccgaaaagcctatctgcagaaatggcagaacatgccggtccagaagactttgcagtagagagtgagagttcatatgccactgaggacgatgaattcaacaatgtgactggacttgattctcctgttaccagagtttgggaaagcaaaagtaaaggaaatgctaccttatcacatatacatcacccactcgaatctcctggtttccatagagcaaagaagaacagaagtcatgtgggaaaactgaagatgtcaagaacttcttcaggaagaaaaaggtcaaggtcaaatgctcagaagcctcctatctggcaagaagtggagagatcctctttctctgttggtgatagtatggacatactaaatacatctgcaaatgatctaaagacgcatgagctagacgaggatcctgaggtggaaagtatggctaggatgtttagtagttcaaatacttcatctttattgttgccatcaagtgactctgcatattcttcaaattattgtggtgccaatgtgctacaagactcttatttgaagttaagatgcgaggtggtaggagctagcattgtcaaaagcgggtctggcatgttttgctgtgtattctatttccgtgaccgacgccaatggtaatagttggtccattaagaggaggtttcgtcattttgaagacctgcatcggcgtctaaaagagtatgctcagtacaatcttcatttacctccaaaacatttcctctcatcaggtttagaggtttctgttgttcgagagagatgcaagctgctcgacatatatctgaagaaccttctgcaaattcctattgtttcaagctgcatagaagtctgggattttctgagtgtggattcacagacatatattttcacggacactctctcagtcatccaaacattgtcagtcagtttagatgaaagatcaaatgggaaaaatataaaagcattgaactcttctggagctttgaatggaaattctatctctggaggtcaatctttgcatggacatatagacgacaccgtacataaggattcagacatcgcttgtgatggtttgagatttaggaaagggaatgtgaacaagaacttgggaaacggtgttagccacacaacagatagtgttagcaacacaactgccaatcattatcaggacaattctggaagtgatccagagcagaatgatcattccttttcaatagattcattaaatcctaagaagttgcgttcaactgaaaccaatgacacatctcaaattccagagtctggaggattttcagtatctcctaatgattggatggccccgaatcttagtgttcccttgtttcatcttgttgatgtggtctttcagctccaagatggaggctggataaggcgtcaagcattttgggtagcaaagcaaatactgcaattgggaatgggagacacgtttgatgactggcttgttgacaaaatccaattacttaggaaagggaggataattgcttttgctgttaagcgcattgaacaagatcaccccccataatttagtctgtattttctctgcgtaca

SEQ ID NO: 212462 - DNA, 4096 bp, Zea Mays
agcgccaccacctgacctgccgcggccgtaccccccccccccccccccttccacgagacaaaatccagaaccaggccggcggcccactcccaccgccgcgcctacgccttcccccgccccccgcgcggaggagggtgccgccggcgatggagacgacggccgcgggcgcgccaagagcgcagacgctgcgggacctcgcggaggagggcaagaagcggggcgtcctgctcctcgtcttcgccttcgggctggccttcctcatgtcccttacgagctcgtcagtttggtttaatctgccatttgccatagctctgattgttttgttccgctacatatcgcttgattatggccttcgtagaaagagcgtaactagaacagatcatgccagtcattcactcgtcaaaacaaaaggtactgaggtaaagaaagtcattcatcagactgaaacggatggaaaaatagattggaggagcaaggttaactcgcctccagttgaagcagcattcgaacagttcacaaggcaccttatctcagaatgggtaacagatctgtggtactcgcgcgtaacacctgacaaggaaggtccagaggaactcatcgatgtagtcaatactgtccttggggagatttcagttcgggcaagaaatgttaaccttatcaatctgctgatcagggatttggtcgatcttatatgcaataatttggaactttatcatttctgtcaagccaagattggaagagagaagtttgtgggccttccttcagagcgtcgtgatgctgaactgaaaatgatccttttagctgaaaacaagttgcatcctgctttattttcagctggcgctgaatacaaggtattgaaaagtcttgctgacgggttgatctcaatcacagtgaagcctcaggatctacaatgtactttcttccggtgtacagcgcgggaacttctcgcttgtgcagttttgagacctgttgtgaacttagcaaatccaaggtttataaatgaaagaatcgaatcctttgctctttcgcatgccaataagttggagaaaggaactgcagaatccttggatgttgtcacaactgttaagcacagggaaccacatatgccctctgttgatgaattttcggcactaatagaccactcaagttcaggtgttgagctcgttcaatttcgtcagggtcaatcgaaaactgcatcagatatacaacctggaaaaagtacaaatccatatagtctaaaattagaatcctctcatgcacctttagtcagtagttcacacccactggagtcaacaagtttagcttcgtcttcccacgttacttctgataatgggttttcgttgcataccaaaagcagcaacagagcaactgcaaatggtcatggtagagagtgtgcacagcccttgggtatcagttctgagcgtgcacatcaagctttagcacttgagcaccttgagaatatgtggacaaagggaaagaactacaaaccagaaaatgtagaacatgtcgcaaaagtgtctgttggatctgcttctctgggctcgacttcagttcagcaatcagttccttgcagcacttcagtttgttacaatcaaagtaattctgaaagaccaacagcgtcatctcagtcaaaggaccagcatttggtaagacactcaactacacctacatatgtaacatatccaaatggcaccccgaaaagcctatctgcagaaatggcagaacatgccggtccagaagactttgcagtagagagtgagagttcatatgccactgaggacgatgaattcaacaatgtgactggacttgattctcctgttaccagagtttgggaaagcaaaagtaaaggaaatgctaccttatcacatatacatcacccactcgaatctcctggtttccatagagcaaagaagaacagaagtcatgtgggaaaactgaagatgtcaagaacttcttcaggaagaaaaaggtcaaggtcaaatgctcagaagcctcctatctggcaagaagtggagagatcctctttctctgttggtgatagtatggacatactaaatacatctgcaaatgatctaaagacgcatgagctagacgaggatcctgaggtggaaagtatggctaggatgtttagtagttcaaatacttcatctttattgttgccatcaagtgactctgcatattcttcaaattattgtggtgccaatgtgctacaagactcttatttgaagttaagatgcgaggtggtaggagctagcattgtcaaaagcgggtctggcatgttttgctgtgtattctatttccgtgaccgacgccaatggtttcgtcattttgaagacctgcatcggcgtctaaaagagtatgctcagtacaatcttcatttacctccaaaacatttcctctcatcaggtttagaggtttctgttgttcgagagagatgcaagctgctcgacatatatctgaagaaccttctgcaaattcctattgtttcaagctgcatagaagtctgggattttctgagtgtggattcacagacatatattttcacggacactctctcagtcatccaaacattgtcagtcagtttagatgaaagatcaaatgggaaaaatataaaagcattgaactcttctggagctttgaatggaaattctatctctggaggtcaatctttgcatggacatatagacgacaccgtacataaggattcagacatcgcttgtgatggtttgagatttaggaaagggaatgtgaacaagaacttgggaaacggtgttagccacacaacagatagtgttagcaacacaactgccaatcattatcaggacaattctggaagtgatccagagcagaatgatcattccttttcaatagattcattaaatcctaagaagttgcgttcaactgaaaccaatgacacatctcaaattccagagtctggaggattttcagtatctcctaatgattggatggccccgaatcttagtgttcccttgtttcatcttgttgatgtggtctttcagctccaagatggaggctggataaggcgtcaagcattttgggtagcaaagcaaatactgcaattgggaatgggagacacgtttgatgactggcttgttgacaaaatccaattacttaggaaagggaggataattgcttttgctgttaagcgcattgaacaaattctctggcctgatggaattttcatgacaaaacatccaaagagaaattcgcctccacctcctcctggtgctcagagcaatggcatgggaaactatctaagcgatgaacaacggatagaagctgctcatcgtgcaaattttgtccgtgaactgataatagataaagccccatctccactagtgagtcttgttggtcgaaaggattatgaaagatgtgctcatgatatctatttctttcttcagtccccggtttgtttgaagcagctagcgttcgaactccttgagctgcttgttctttcttcatttccggagttggatggcactgtgaggaagtggcacgaagataaagagcaattctgcgcccagtaatgtttatcaaacgtttgaatttgtcacgggcggtgtttgtttccaacacatatcgtctttccagagtggtgtggcctgtgaattctgcgaaaataaggtggtggcttcagaggagtgcccgtggatatctcagtttgaagtgggtggtggctttgtgcagtgtgaatatggttagatagtgcgaggatatggtccctttttccaccgggccatggcagaacggtttttgtgcccgatagagttcatttttccccctccagatttggtatacgtaatgctgctgcctgaaaggaaagagatggtggcgcattttttttgcacccgttttggtggtacactggtacccgtcttgtgtaaatctgcatagagataaatgaagtttcgaggtggtcaatgaatgataatagctctctggcatcgtgatgattcgttgtggctccgccttgctgtacgtttttttggtgctgcccctgcgaatcatctcggcactattttgtgatgataaaaaaaaagtaatatgcgctggagattcgtttattcaaatttcc

SEQ ID NO: 212463 - DNA, 3735 bp, Zea Mays
agcgccaccacctgacctgccgcggccgtaccccccccccccccccccttccacgagacaaaatccagaaccaggccggcggcccactcccaccgccgcgcctacgccttcccccgccccccgcgcggaggagggtgccgccggcgatggagacgacggccgcgggcgcgccaagagcgcagacgctgcgggacctcgcggaggagggcaagaagcggggcgtcctgctcctcgtcttcgccttcgggctggccttcctcatgtcccttacgagctcgtcagtttggtttaatctgccatttgccatagctctgattgttttgttccgctacatatcgcttgattatggccttcgtagaaagagcgtaactagaacagatcatgccagtcattcactcgtcaaaacaaaaggtactgaggtaaagaaagtcattcatcagactgaaacggatggaaaaatagattggaggagcaaggttaactcgcctccagttgaagcagcattcgaacagttcacaaggcaccttatctcagaatgggtaacagatctgtggtactcgcgcgtaacacctgacaaggaaggtccagaggaactcatcgatgtagtcaatactgtccttggggagatttcagttcgggcaagaaatgttaaccttatcaatctgctgatcagggatttggtcgatcttatatgcaataatttggaactttatcatttctgtcaagccaagattggaagagagaagtttgtgggccttccttcagagcgtcgtgatgctgaactgaaaatgatccttttagctgaaaacaagttgcatcctgctttattttcagctggcgctgaatacaaggtattgaaaagtcttgctgacgggttgatctcaatcacagtgaagcctcaggatctacaatgtactttcttccggtgtacagcgcgggaacttctcgcttgtgcagttttgagacctgttgtgaacttagcaaatccaaggtttataaatgaaagaatcgaatcctttgctctttcgcatgccaataagttggagaaaggaactgcagaatccttggatgttgtcacaactgttaagcacagggaaccacatatgccctctgttgatgaattttcggcactaatagaccactcaagttcaggtgttgagctcgttcaatttcgtcagggtcaatcgaaaactgcatcagatatacaacctggaaaaagtacaaatccatatagtctaaaattagaatcctctcatgcacctttagtcagtagttcacacccactggagtcaacaagtttagcttcgtcttcccacgttacttctgataatgggttttcgttgcataccaaaagcagcaacagagcaactgcaaatggtcatggtagagagtgtgcacagcccttgggtatcagttctgagcgtgcacatcaagctttagcacttgagcaccttgagaatatgtggacaaagggaaagaactacaaaccagaaaatgtagaacatgtcgcaaaagtgtctgttggatctgcttctctgggctcgacttcagttcagcaatcagttccttgcagcacttcagtttgttacaatcaaagtaattctgaaagaccaacagcgtcatctcagtcaaaggaccagcatttggtaagacactcaactacacctacatatgtaacatatccaaatggcaccccgaaaagcctatctgcagaaatggcagaacatgccggtccagaagactttgcagtagagagtgagagttcatatgccactgaggacgatgaattcaacaatgtgactggacttgattctcctgttaccagagtttgggaaagcaaaagtaaaggaaatgctaccttatcacatatacatcacccactcgaatctcctggtttccatagagcaaagaagaacagaagtcatgtgggaaaactgaagatgtcaagaacttcttcaggaagaaaaaggtcaaggtcaaatgctcagaagcctcctatctggcaagaagtggagagatcctctttctctgttggtgatagtatggacatactaaatacatctgcaaatgatctaaagacgcatgagctagacgaggatcctgaggtggaaagtatggctaggatgtttagtagttcaaatacttcatctttattgttgccatcaagtgactctgcatattcttcaaattattgtggtgccaatgtgctacaagactcttatttgaagttaagatgcgaggtggtaggagctagcattgtcaaaagcgggtctggcatgttttgctgtgtattctatttccgtgaccgacgccaatggtaatagttggtccattaagaggaggtttcgtcattttgaagacctgcatcggcgtctaaaagagtatgctcagtacaatcttcatttacctccaaaacatttcctctcatcaggtttagaggtttctgttgttcgagagagatgcaagctgctcgacatatatctgaagaaccttctgcaaattcctattgtttcaagctgcatagaagtctgggattttctgagtgtggattcacagacatatattttcacggacactctctcagtcatccaaacattgtcagtggatggccccgaatcttagtgttcccttgtttcatcttgttgatgtggtctttcagctccaagatggaggctggataaggcgtcaagcattttgggtagcaaagcaaatactgcaattgggaatgggagacacgtttgatgactggcttgttgacaaaatccaattacttaggaaagggaggataattgcttttgctgttaagcgcattgaacaaattctctggcctgatggaattttcatgacaaaacatccaaagagaaattcgcctccacctcctcctggtgctcagagcaatggcatgggaaactatctaagcgatgaacaacggatagaagctgctcatcgtgcaaattttgtccgtgaactgataatagataaagccccatctccactagtgagtcttgttggtcgaaaggattatgaaagatgtgctcatgatatctatttctttcttcagtccccggtttgtttgaagcagctagcgttcgaactccttgagctgcttgttctttcttcatttccggagttggatggcactgtgaggaagtggcacgaagataaagagcaattctgcgcccagtaatgtttatcaaacgtttgaatttgtcacgggcggtgtttgtttccaacacatatcgtctttccagagtggtgtggcctgtgaattctgcgaaaataaggtggtggcttcagaggagtgcccgtggatatctcagtttgaagtgggtggtggctttgtgcagtgtgaatatggttagatagtgcgaggatatggtccctttttccaccgggccatggcagaacggtttttgtgcccgatagagttcatttttccccctccagatttggtatacgtaatgctgctgcctgaaaggaaagagatggtggcgcattttttttgcacccgttttggtggtacactggtacccgtcttgtgtaaatctgcatagagataaatgaagtttcgaggtggtcaatgaatgataatagctctctggcatcgtgatgattcgttgtggctccgccttgctgtacgtttttttggtgctgcccctgcgaatcatctcggcactattttgtgatgataaaaaaaaagtaatatgcgctggagattcgtttattcaaatttcc

SEQ ID NO: 212464 - DNA, 3985 bp, Zea Mays
agcgccaccacctgacctgccgcggccgtaccccccccccccccccccttccacgagacaaaatccagaaccaggccggcggcccactcccaccgccgcgcctacgccttcccccgccccccgcgcggaggagggtgccgccggcgatggagacgacggccgcgggcgcgccaagagcgcagacgctgcgggacctcgcggaggagggcaagaagcggggcgtcctgctcctcgtcttcgccttcgggctggccttcctcatgtcccttacgagctcgtcagtttggtttaatctgccatttgccatagctctgattgttttgttccgctacatatcgcttgattatggccttcgtagaaagagcgtaactagaacagatcatgccagtcattcactcgtcaaaacaaaaggtactgaggtaaagaaagtcattcatcagactgaaacggatggaaaaatagattggaggagcaaggttaactcgcctccagttgaagcagcattcgaacagttcacaaggcaccttatctcagaatgggtaacagatctgtggtactcgcgcgtaacacctgacaaggaaggtccagaggaactcatcgatgtagtcaatactgtccttggggagatttcagttcgggcaagaaatgttaaccttatcaatctgctgatcagggatttggtcgatcttatatgcaataatttggaactttatcatttctgtcaagccaagattggaagagagaagtttgtgggccttccttcagagcgtcgtgatgctgaactgaaaatgatccttttagctgaaaacaagttgcatcctgctttattttcagctggcgctgaatacaaggtattgaaaagtcttgctgacgggttgatctcaatcacagtgaagcctcaggatctacaatgtactttcttccggtgtacagcgcgggaacttctcgcttgtgcagttttgagacctgttgtgaacttagcaaatccaaggtttataaatgaaagaatcgaatcctttgctctttcgcatgccaataagttggagaaaggaactgcagaatccttggatgttgtcacaactgttaagcacagggaaccacatatgccctctgttgatgaattttcggcactaatagaccactcaagttcaggtgttgagctcgttcaatttcgtcagggtcaatcgaaaactgcatcagatatacaacctggaaaaagtacaaatccatatagtctaaaattagaatcctctcatgcacctttagtcagtagttcacacccactggagtcaacaagtttagcttcgtcttcccacgttacttctgataatgggttttcgttgcataccaaaagcagcaacagagcaactgcaaatggtcatggtagagagtgtgcacagcccttgggtatcagttctgagcgtgcacatcaagctttagcacttgagcaccttgagaatatgtggacaaagggaaagaactacaaaccagaaaatgtagaacatgtcgcaaaagtgtctgttggatctgcttctctgggctcgacttcagttcagcaatcagttccttgcagcacttcagtttgttacaatcaaagtaattctgaaagaccaacagcgtcatctcagtcaaaggaccagcatttggtaagacactcaactacacctacatatgtaacatatccaaatggcaccccgaaaagcctatctgcagaaatggcagaacatgccggtccagaagactttgcagtagagagtgagagttcatatgccactgaggacgatgaattcaacaatgtgactggacttgattctcctgttaccagagtttgggaaagcaaaagtaaaggaaatgctaccttatcacatatacatcacccactcgaatctcctggtttccatagagcaaagaagaacagaagtcatgtgggaaaactgaagatgtcaagaacttcttcaggaagaaaaaggtcaaggtcaaatgctcagaagcctcctatctggcaagaagtggagagatcctctttctctgttggtgatagtatggacatactaaatacatctgcaaatgatctaaagacgcatgagctagacgaggatcctgaggtggaaagtatggctaggatgtttagtagttcaaatacttcatctttattgttgccatcaagtgactctgcatattcttcaaattattgtggtgccaatgtgctacaagactcttatttgaagttaagatgcgaggtggtaggagctagcattgtcaaaagcgggtctggcatgttttgctgtgtattctatttccgtgaccgacgccaatggtaatagttggtccattaagaggaggtttcgtcattttgaagacctgcatcggcgtctaaaagagtatgctcagtacaatcttcatttacctccaaaacatttcctctcatcaggtttagaggtttctgttgttcgagagagatgcaagctgctcgacatatatctgaagaaccttctgcaaattcctattgtttcaagctgcatagaagtctgggattttctgagtgtggattcacagacatatattttcacggacactctctcagtcatccaaacattgtcagtcagtttagatgaaagatcaaatgggaaaaatataaaagcattgaactcttctggagctttgaatggaaattctatctctggaggtcaatctttgcatggacatatagacgacaccgtacataaggattcagacatcgcttgtgatggtttgagatttaggaaagggaatgtgaacaagaacttgggaaacggtgttagccacacaacagatagtgttagcaacacaactgccaatcattatcaggacaattctggaagtgatccagagcagaatgatcattccttttcaatagattcattaaatcctaagaagttgcgttcaactgaaaccaatgacacatctcaaattccagagtctggaggattttcagtatctcctaatgattggatggccccgaatcttagtgttcccttgtttcatcttgttgatgtggtctttcagctccaagatggaggctggataagattctctggcctgatggaattttcatgacaaaacatccaaagagaaattcgcctccacctcctcctggtgctcagagcaatggcatgggaaactatctaagcgatgaacaacggatagaagctgctcatcgtgcaaattttgtccgtgaactgataatagataaagccccatctccactagtgagtcttgttggtcgaaaggattatgaaagatgtgctcatgatatctatttctttcttcagtccccggtttgtttgaagcagctagcgttcgaactccttgagctgcttgttctttcttcatttccggagttggatggcactgtgaggaagtggcacgaagataaagagcaattctgcgcccagtaatgtttatcaaacgtttgaatttgtcacgggcggtgtttgtttccaacacatatcgtctttccagagtggtgtggcctgtgaattctgcgaaaataaggtggtggcttcagaggagtgcccgtggatatctcagtttgaagtgggtggtggctttgtgcagtgtgaatatggttagatagtgcgaggatatggtccctttttccaccgggccatggcagaacggtttttgtgcccgatagagttcatttttccccctccagatttggtatacgtaatgctgctgcctgaaaggaaagagatggtggcgcattttttttgcacccgttttggtggtacactggtacccgtcttgtgtaaatctgcatagagataaatgaagtttcgaggtggtcaatgaatgataatagctctctggcatcgtgatgattcgttgtggctccgccttgctgtacgtttttttggtgctgcccctgcgaatcatctcggcactattttgtgatgataaaaaaaaagtaatatgcgctggagattcgtttattcaaatttcc

SEQ ID NO: 212465 - DNA, 4012 bp, Zea Mays
cacgagacaaaatccagaaccaggccggcggcccactcccaccgccgcgcctacgccttcccccgccccccgcgcggaggagggtgccgccggcgatggagacgacggccgcgggcgcgccaagagcgcagacgctgcgggacctcgcggaggagggcaagaagcggggcgtcctgctcctcgtcttcgccttcgggctggccttcctcatgtcccttacgagctcgtcagtttggtttaatctgccatttgccatagctctgattgttttgttccgctacatatcgcttgattatggccttcgtagaaagagcgtaactagaacagatcatgccagtcattcactcgtcaaaacaaaaggtactgaggtaaagaaagtcattcatcagactgaaacggatggaaaaatagattggaggagcaaggttaactcgcctccagttgaagcagcattcgaacagttcacaaggcaccttatctcagaatgggtaacagatctgtggtactcgcgcgtaacacctgacaaggaaggtccagaggaactcatcgatgtagtcaatactgtccttggggagatttcagttcgggcaagaaatgttaaccttatcaatctgctgatcagattggaagagagaagtttgtgggccttccttcagagcgtcgtgatgctgaactgaaaatgatccttttagctgaaaacaagttgcatcctgctttattttcagctggcgctgaatacaaggtattgaaaagtcttgctgacgggttgatctcaatcacagtgaagcctcaggatctacaatgtactttcttccggtgtacagcgcgggaacttctcgcttgtgcagttttgagacctgttgtgaacttagcaaatccaaggtttataaatgaaagaatcgaatcctttgctctttcgcatgccaataagttggagaaaggaactgcagaatccttggatgttgtcacaactgttaagcacagggaaccacatatgccctctgttgatgaattttcggcactaatagaccactcaagttcaggtgttgagctcgttcaatttcgtcagggtcaatcgaaaactgcatcagatatacaacctggaaaaagtacaaatccatatagtctaaaattagaatcctctcatgcacctttagtcagtagttcacacccactggagtcaacaagtttagcttcgtcttcccacgttacttctgataatgggttttcgttgcataccaaaagcagcaacagagcaactgcaaatggtcatggtagagagtgtgcacagcccttgggtatcagttctgagcgtgcacatcaagctttagcacttgagcaccttgagaatatgtggacaaagggaaagaactacaaaccagaaaatgtagaacatgtcgcaaaagtgtctgttggatctgcttctctgggctcgacttcagttcagcaatcagttccttgcagcacttcagtttgttacaatcaaagtaattctgaaagaccaacagcgtcatctcagtcaaaggaccagcatttggtaagacactcaactacacctacatatgtaacatatccaaatggcaccccgaaaagcctatctgcagaaatggcagaacatgccggtccagaagactttgcagtagagagtgagagttcatatgccactgaggacgatgaattcaacaatgtgactggacttgattctcctgttaccagagtttgggaaagcaaaagtaaaggaaatgctaccttatcacatatacatcacccactcgaatctcctggtttccatagagcaaagaagaacagaagtcatgtgggaaaactgaagatgtcaagaacttcttcaggaagaaaaaggtcaaggtcaaatgctcagaagcctcctatctggcaagaagtggagagatcctctttctctgttggtgatagtatggacatactaaatacatctgcaaatgatctaaagacgcatgagctagacgaggatcctgaggtggaaagtatggctaggatgtttagtagttcaaatacttcatctttattgttgccatcaagtgactctgcatattcttcaaattattgtggtgccaatgtgctacaagactcttatttgaagttaagatgcgaggtggtaggagctagcattgtcaaaagcgggtctggcatgttttgctgtgtattctatttccgtgaccgacgccaatggtaatagttggtccattaagaggaggtttcgtcattttgaagacctgcatcggcgtctaaaagagtatgctcagtacaatcttcatttacctccaaaacatttcctctcatcaggtttagaggtttctgttgttcgagagagatgcaagctgctcgacatatatctgaagaaccttctgcaaattcctattgtttcaagctgcatagaagtctgggattttctgagtgtggattcacagacatatattttcacggacactctctcagtcatccaaacattgtcagtcagtttagatgaaagatcaaatgggaaaaatataaaagcattgaactcttctggagctttgaatggaaattctatctctggaggtcaatctttgcatggacatatagacgacaccgtacataaggattcagacatcgcttgtgatggtttgagatttaggaaagggaatgtgaacaagaacttgggaaacggtgttagccacacaacagatagtgttagcaacacaactgccaatcattatcaggacaattctggaagtgatccagagcagaatgatcattccttttcaatagattcattaaatcctaagaagttgcgttcaactgaaaccaatgacacatctcaaattccagagtctggaggattttcagtatctcctaatgattggatggccccgaatcttagtgttcccttgtttcatcttgttgatgtggtctttcagctccaagatggaggctggataaggcgtcaagcattttgggtagcaaagcaaatactgcaattgggaatgggagacacgtttgatgactggcttgttgacaaaatccaattacttaggaaagggaggataattgcttttgctgttaagcgcattgaacaaattctctggcctgatggaattttcatgacaaaacatccaaagagaaattcgcctccacctcctcctggtgctcagagcaatggcatgggaaactatctaagcgatgaacaacggatagaagctgctcatcgtgcaaattttgtccgtgaactgataatagataaagccccatctccactagtgagtcttgttggtcgaaaggattatgaaagatgtgctcatgatatctatttctttcttcagtccccggtttgtttgaagcagctagcgttcgaactccttgagctgcttgttctttcttcatttccggagttggatggcactgtgaggaagtggcacgaagataaagagcaattctgcgcccagtaatgtttatcaaacgtttgaatttgtcacgggcggtgtttgtttccaacacatatcgtctttccagagtggtgtggcctgtgaattctgcgaaaataaggtggtggcttcagaggagtgcccgtggatatctcagtttgaagtgggtggtggctttgtgcagtgtgaatatggttagatagtgcgaggatatggtccctttttccaccgggccatggcagaacggtttttgtgcccgatagagttcatttttccccctccagatttggtatacgtaatgctgctgcctgaaaggaaagagatggtggcgcattttttttgcacccgttttggtggtacactggtacccgtcttgtgtaaatctgcatagagataaatgaagtttcgaggtggtcaatgaatgataatagctctctggcatcgtgatgattcgttgtggctccgccttgctgtacgtttttttggtgctgcccctgcgaatcatctcggcactattttgtgatgataaaaaaaaagtaatatgcgctggagattcgtttattcaaatttcc

SEQ ID NO: 212466 - DNA, 3987 bp, Zea Mays
cacgagacaaaatccagaaccaggccggcggcccactcccaccgccgcgcctacgccttcccccgccccccgcgcggaggagggtgccgccggcgatggagacgacggccgcgggcgcgccaagagcgcagacgctgcgggacctcgcggaggagggcaagaagcggggcgtcctgctcctcgtcttcgccttcgggctggccttcctcatgtcccttacgagctcgtcagtttggtttaatctgccatttgccatagctctgattgttttgttccgctacatatcgcttgattatggccttcgtagaaagagcgtaactagaacagatcatgccagtcattcactcgtcaaaacaaaaggtactgaggtaaagaaagtcattcatcagactgaaacggatggaaaaatagattggaggagcaaggttaactcgcctccagttgaagcagcattcgaacagttcacaaggcaccttatctcagaatgggtaacagatctgtggtactcgcgcgtaacacctgacaaggaaggtccagaggaactcatcgatgtagtcaatactgtccttggggagatttcagttcgggcaagaaatgttaaccttatcaatctgctgatcagattggaagagagaagtttgtgggccttccttcagagcgtcgtgatgctgaactgaaaatgatccttttagctgaaaacaagttgcatcctgctttattttcagctggcgctgaatacaaggtattgaaaagtcttgctgacgggttgatctcaatcacagtgaagcctcaggatctacaatgtactttcttccggtgtacagcgcgggaacttctcgcttgtgcagttttgagacctgttgtgaacttagcaaatccaaggtttataaatgaaagaatcgaatcctttgctctttcgcatgccaataagttggagaaaggaactgcagaatccttggatgttgtcacaactgttaagcacagggaaccacatatgccctctgttgatgaattttcggcactaatagaccactcaagttcaggtgttgagctcgttcaatttcgtcagggtcaatcgaaaactgcatcagatatacaacctggaaaaagtacaaatccatatagtctaaaattagaatcctctcatgcacctttagtcagtagttcacacccactggagtcaacaagtttagcttcgtcttcccacgttacttctgataatgggttttcgttgcataccaaaagcagcaacagagcaactgcaaatggtcatggtagagagtgtgcacagcccttgggtatcagttctgagcgtgcacatcaagctttagcacttgagcaccttgagaatatgtggacaaagggaaagaactacaaaccagaaaatgtagaacatgtcgcaaaagtgtctgttggatctgcttctctgggctcgacttcagttcagcaatcagttccttgcagcacttcagtttgttacaatcaaagtaattctgaaagaccaacagcgtcatctcagtcaaaggaccagcatttggtaagacactcaactacacctacatatgtaacatatccaaatggcaccccgaaaagcctatctgcagaaatggcagaacatgccggtccagaagactttgcagtagagagtgagagttcatatgccactgaggacgatgaattcaacaatgtgactggacttgattctcctgttaccagagtttgggaaagcaaaagtaaaggaaatgctaccttatcacatatacatcacccactcgaatctcctggtttccatagagcaaagaagaacagaagtcatgtgggaaaactgaagatgtcaagaacttcttcaggaagaaaaaggtcaaggtcaaatgctcagaagcctcctatctggcaagaagtggagagatcctctttctctgttggtgatagtatggacatactaaatacatctgcaaatgatctaaagacgcatgagctagacgaggatcctgaggtggaaagtatggctaggatgtttagtagttcaaatacttcatctttattgttgccatcaagtgactctgcatattcttcaaattattgtggtgccaatgtgctacaagactcttatttgaagttaagatgcgaggtggtaggagctagcattgtcaaaagcgggtctggcatgttttgctgtgtattctatttccgtgaccgacgccaatggtttcgtcattttgaagacctgcatcggcgtctaaaagagtatgctcagtacaatcttcatttacctccaaaacatttcctctcatcaggtttagaggtttctgttgttcgagagagatgcaagctgctcgacatatatctgaagaaccttctgcaaattcctattgtttcaagctgcatagaagtctgggattttctgagtgtggattcacagacatatattttcacggacactctctcagtcatccaaacattgtcagtcagtttagatgaaagatcaaatgggaaaaatataaaagcattgaactcttctggagctttgaatggaaattctatctctggaggtcaatctttgcatggacatatagacgacaccgtacataaggattcagacatcgcttgtgatggtttgagatttaggaaagggaatgtgaacaagaacttgggaaacggtgttagccacacaacagatagtgttagcaacacaactgccaatcattatcaggacaattctggaagtgatccagagcagaatgatcattccttttcaatagattcattaaatcctaagaagttgcgttcaactgaaaccaatgacacatctcaaattccagagtctggaggattttcagtatctcctaatgattggatggccccgaatcttagtgttcccttgtttcatcttgttgatgtggtctttcagctccaagatggaggctggataaggcgtcaagcattttgggtagcaaagcaaatactgcaattgggaatgggagacacgtttgatgactggcttgttgacaaaatccaattacttaggaaagggaggataattgcttttgctgttaagcgcattgaacaaattctctggcctgatggaattttcatgacaaaacatccaaagagaaattcgcctccacctcctcctggtgctcagagcaatggcatgggaaactatctaagcgatgaacaacggatagaagctgctcatcgtgcaaattttgtccgtgaactgataatagataaagccccatctccactagtgagtcttgttggtcgaaaggattatgaaagatgtgctcatgatatctatttctttcttcagtccccggtttgtttgaagcagctagcgttcgaactccttgagctgcttgttctttcttcatttccggagttggatggcactgtgaggaagtggcacgaagataaagagcaattctgcgcccagtaatgtttatcaaacgtttgaatttgtcacgggcggtgtttgtttccaacacatatcgtctttccagagtggtgtggcctgtgaattctgcgaaaataaggtggtggcttcagaggagtgcccgtggatatctcagtttgaagtgggtggtggctttgtgcagtgtgaatatggttagatagtgcgaggatatggtccctttttccaccgggccatggcagaacggtttttgtgcccgatagagttcatttttccccctccagatttggtatacgtaatgctgctgcctgaaaggaaagagatggtggcgcattttttttgcacccgttttggtggtacactggtacccgtcttgtgtaaatctgcatagagataaatgaagtttcgaggtggtcaatgaatgataatagctctctggcatcgtgatgattcgttgtggctccgccttgctgtacgtttttttggtgctgcccctgcgaatcatctcggcactattttgtgatgataaaaaaaaagtaatatgcgctggagattcgtttattcaaatttcc

SEQ ID NO: 212467 - DNA, 1330 bp, Zea Mays
ctaagatctctcattagttatgatatcattcgactccctaggctcttcaggtttcttcaaagaccactggccaaacttatttctacttttagagctcctaagagtaaagaagggtatgcttcaattggtggtgggtcgccgttaaggaaaattactgatgaacaggcgaatgctttgaagattgccctggaaaagaaaaaattgaacgcaaacatatatgttgggatgcggtattggtaccctttcacagaagaggccattgatcaaattaaaaaggataagattaccaagctcgttgttcttcccctttaccctcagtactccatatcaacaagtgggtcaagcattcgtgttctccaagacattgtcaaggaagattcatatttttctggtttgccaatttccattattgaatcatggtaccaacgagatggctatgtgaaatcaatgtctgacctaattgaaaaggagctctccgccttctccaatcctgaagaggttatgatattcttcagtgcacatggtgtgccacttacctatgttgaggatgctggagatccttacagagatcagatggaggattgtattgctttgatcatgggggagttaagatcaagaggaatcttaaatagtcacactttggcgtaccagagtcgggtggggccagttcaatggctgaagccatatactgatgaagttttagtagaacttggtcaaaagggtgtgaagagcctcctggctgttccagtaagctttgtgagtgagcacatcgagacattggaagaaattgacatggagtacaaggagttggctctggaatcaggcatcaagaactggggtcgggttcctgctcttggatgcacttcaacattcatctccgaccttgcagatgctgtcgtcgaagccctgccctctgcttcagcgctcgcgaccagaaagcctgacgacatcgattccagcatggacctgacgcattacctcaccaagatgctgtttggctcaatcttggcatttgtcctgctgctatcaccaaggctagtttccgccttccggagcaccatgctttaagtttttctccaaagcactaaatttgagattgagaatgagatatttcattttggacctttttttcctccttaatagaatgatgtgcagttcttctgctcgttccagagaaaaaaataactgctaggaactcacaaggtagtaggggattgcaaaagggatgtgaacagctgttttgatcgaagttgtctataaataccgtgctcacggactctgtattttaatggtttcttgtgctcgactaattttgttgttcttgtccaag

SEQ ID NO: 212468 - DNA, 1654 bp, Zea Mays
ctcaaatcaagatatgttactggaaggtcatggggcaaaacaacctccacaagttttactggttctaccaccaaacatgagcagagcttgcatggaaatgttaagccgttgcaattggcggcaaatgaatcctctcgtttggcttacagaagtccagcacttaaaaaccagtggaatcttcctgctagttcttcctccactaatgtggttaccacctttgatgataacgaacacgtgtcttccagtgttattgaagaaaaagttggagtactgttattaaaccttggtggtccagagacacttgacgatgttcaaccatttttattcaacctatttgctgatccagatatcattcgactccctaggctcttcaggtttcttcaaagaccactggccaaacttatttctacttttagagctcctaagagtaaagaagggtatgcttcaattggtggtgggtcgccgttaaggaaaattactgatgaacaggcgaatgctttgaagattgccctggaaaagaaaaaattgaacgcaaacatatatgttgggatgcggtattggtaccctttcacagaagaggccattgatcaaattaaaaaggataagattaccaagctcgttgttcttcccctttaccctcagtactccatatcaacaagtgggtcaagcattcgtgttctccaagacattgtcaaggaagattcatatttttctggtttgccaatttccattattgaatcatggtaccaacgagatggctatgtgaaatcaatgtctgacctaattgaaaaggagctctccgccttctccaatcctgaagaggttatgatattcttcagtgcacatggtgtgccacttacctatgttgaggatgctggagatccttacagagatcagatggaggattgtattgctttgatcatgggggagttaagatcaagaggaatcttaaatagtcacactttggcgtaccagagtcgggtggggccagttcaatggctgaagccatatactgatgaagttttagtagaacttggtcaaaagggtgtgaagagcctcctggctgttccagtaagctttgtgagtgagcacatcgagacattggaagaaattgacatggagtacaaggagttggctctggaatcaggcatcaagaactggggtcgggttcctgctcttggatgcacttcaacattcatctccgaccttgcagatgctgtcgtcgaagccctgccctctgcttcagcgctcgcgaccagaaagcctgacgacatcgattccagcatggacctgacgcattacctcaccaagatgctgtttggctcaatcttggcatttgtcctgctgctatcaccaaggctagtttccgccttccggagcaccatgctttaagtttttctccaaagcactaaatttgagattgagaatgagatatttcattttggacctttttttcctccttaatagaatgatgtgcagttcttctgctcgttccagagaaaaaaataactgctaggaactcacaaggtagtaggggattgcaaaagggatgtgaacagctgttttgatcgaagttgtctataaataccgtgctcacggactctgtattttaatggtttcttgtgctcgactaattttgttgttcttgtccaag

SEQ ID NO: 212469 - DNA, 1742 bp, Zea Mays
ctcaaatcaagatatgttactggaaggtcatggggcaaaacaacctccacaagttttactggttctaccaccaaacatgagcagagcttgcatggaaatgttaagccgttgcaattggcggcaaatgaatcctctcgtttggcttacagaagtccagcacttaaaaaccagtggaatcttcctgctagttcttcctccactaatgtggttaccacctttgatgataacgaacacgtgtcttccagtgttattgaagaaaaagttggagtactgttattaaaccttggtggtccagagacacttgacgatgttcaaccatttttattcaacctatttgctgatccagatatcattcgactccctaggctcttcaggtttcttcaaagaccactggccaaacttatttctacttttagagctcctaagagtaaagaagggtatgcttcaattggtggtgggtcgccgttaaggaaaattactgatgaacaggcgaatgctttgaagattgccctggaaaagaaaaaattgaacgcaaacatatatgttgggatgcggtattggtaccctttcacagaagaggccattgatcaagtacatttttgcagccttcattgtttcagacggatcctctgtgattgaattcaaaaggagaataatttttttgagagaaattgacaaaattaaaaaggataagattaccaagctcgttgttcttcccctttaccctcagtactccatatcaacaagtgggtcaagcattcgtgttctccaagacattgtcaaggaagattcatatttttctggtttgccaatttccattattgaatcatggtaccaacgagatggctatgtgaaatcaatgtctgacctaattgaaaaggagctctccgccttctccaatcctgaagaggttatgatattcttcagtgcacatggtgtgccacttacctatgttgaggatgctggagatccttacagagatcagatggaggattgtattgctttgatcatgggggagttaagatcaagaggaatcttaaatagtcacactttggcgtaccagagtcgggtggggccagttcaatggctgaagccatatactgatgaagttttagtagaacttggtcaaaagggtgtgaagagcctcctggctgttccagtaagctttgtgagtgagcacatcgagacattggaagaaattgacatggagtacaaggagttggctctggaatcaggcatcaagaactggggtcgggttcctgctcttggatgcacttcaacattcatctccgaccttgcagatgctgtcgtcgaagccctgccctctgcttcagcgctcgcgaccagaaagcctgacgacatcgattccagcatggacctgacgcattacctcaccaagatgctgtttggctcaatcttggcatttgtcctgctgctatcaccaaggctagtttccgccttccggagcaccatgctttaagtttttctccaaagcactaaatttgagattgagaatgagatatttcattttggacctttttttcctccttaatagaatgatgtgcagttcttctgctcgttccagagaaaaaaataactgctaggaactcacaaggtagtaggggattgcaaaagggatgtgaacagctgttttgatcgaagttgtctataaataccgtgctcacggactctgtattttaatggtttcttgtgctcgactaattttgttgttcttgtccaag

SEQ ID NO: 212470 - DNA, 1770 bp, Zea Mays
aattccttatggaagctgaagaagtagcgtggatttgtcatctcgcgctgccacgtttgactttggacttgctgccacgtttggtagttgctacttgctacaccggaggaagaagaacaagtagtgcttttcttctcttgtcacgttcacggggcggccgatcgaccgttcacctcgcccgacggcccaagcagcccatgtcttcgtcgggcccctccccggcgacgggaatccacgcgtcgccgccgttgggccttttgccggcgacgggaacccatcacaccaggtcatggggcaaaacaacctccacaagttttactggttctaccaccaaacatgagcagagcttgcatggaaatgttaagccgttgcaattggcggcaaatgaatcctctcgtttggcttacagaagtccagcacttaaaaaccagtggaatcttcctgctagttcttcctccactaatgtggttaccacctttgatgataacgaacacgtgtcttccagtgttattgaagaaaaagttggagtactgttattaaaccttggtggtccagagacacttgacgatgttcaaccatttttattcaacctatttgctgatccagcgaatgctttgaagattgccctggaaaagaaaaaattgaacgcaaacatatatgttgggatgcggtattggtaccctttcacagaagaggccattgatcaaattaaaaaggataagattaccaagctcgttgttcttcccctttaccctcagtactccatatcaacaagtgggtcaagcattcgtgttctccaagacattgtcaaggaagattcatatttttctggtttgccaatttccattattgaatcatggtaccaacgagatggctatgtgaaatcaatgtctgacctaattgaaaaggagctctccgccttctccaatcctgaagaggttatgatattcttcagtgcacatggtgtgccacttacctatgttgaggatgctggagatccttacagagatcagatggaggattgtattgctttgatcatgggggagttaagatcaagaggaatcttaaatagtcacactttggcgtaccagagtcgggtggggccagttcaatggctgaagccatatactgatgaagttttagtagaacttggtcaaaagggtgtgaagagcctcctggctgttccagtaagctttgtgagtgagcacatcgagacattggaagaaattgacatggagtacaaggagttggctctggaatcaggcatcaagaactggggtcgggttcctgctcttggatgcacttcaacattcatctccgaccttgcagatgctgtcgtcgaagccctgccctctgcttcagcgctcgcgaccagaaagcctgacgacatcgattccagcatggacctgacgcattacctcaccaagatgctgtttggctcaatcttggcatttgtcctgctgctatcaccaaggctagtttccgccttccggagcaccatgctttaagtttttctccaaagcactaaatttgagattgagaatgagatatttcattttggacctttttttcctccttaatagaatgatgtgcagttcttctgctcgttccagagaaaaaaataactgctaggaactcacaaggtagtaggggattgcaaaagggatgtgaacagctgttttgatcgaagttgtctataaataccgtgctcacggactctgtattttaatggtttcttgtgctcgactaattttgttgttcttgtccaag

SEQ ID NO: 212471 - DNA, 1475 bp, Zea Mays
cttctaggtttctgcttgctgattggttatatttgtgctgcagtgctgtaaatattgactggccactagctgatgcggagggcgcaaagaggcagcccatgattgagctgctcaaggagcacggtggattgacatatgggaaaactggaagccattttgaaccaaagacgattccaccacctctaacaaataaggctgactgggagattaacccacttgaattggacttcacaaaagcaactgttatcggaaagggctctttcggtgaaattctgaaagcaaattggcgaggaacacctattgctgtcaagcgcattcttccatccttatctgatgacaggctggtgatccaagattttaagcatgaagtcaacttgctaataaagctgagacatccaaatgttgtccagttccttggagcagttacagaaaccaagcctctaatgctaattactgagtttctacgaggaggtgatcttcatcaatatctgaaggacaaaggtgcactcaacccacttaccgctgttaattttgcactggatattgcaagaggaatggcatatcttcataatgagcctaatgttgtgattcaccgagatttaaaaccaagaaacattcttctggtgaattctgctgccaaccacttgaaggttggagacttcggccttagcaagatcatcaaagcgcagcatgcgaatgatgtatacaagatgactggagagacaggaagctatcggtacatggcccctgaagttttcaagcaccggaaatatgacaagaaagttgatatcttctcttttgccatgattctatatgagatgctggaaggtgattcacccttctccaactacgaaccttatgaggctgctaagtacgtggcagatgggcatcgtccggttttccgtaaaaatcataccactgagttgaaggatttggttgagctatgttggtctggggacatcagtctgaggccatctttcttggagatcctcaagaggcttgagaagctcaaggagcattattcacacgagaaccactggcatttgttccagtagcagtgcgtatatttttttactatgactgttgtcatgattggggatttctcgggagatctgacattgatgaatgtacaaaattgggtgcctctagaaaggtccactgagactgaaaatcttcttgctgttttacgtttatgctatttctggtaaaaaaaacagaagctttctttgtaccacatcctctacaactttgtctttaggcttctctccgtaaatgatggaaaatcttgaactatgttctgcagcatttaggttgatgtggtgttctatatagatcggttgattttctttttctattcttttctgttgccaggatctttatatgcttagactcattggctatgggaagtgtttttaccgtgcatattctgcaagtgttacttgtcatagaagttactgtaaactttataaagggaa

SEQ ID NO: 212472 - DNA, 1535 bp, Zea Mays
gtcaaatgtgccgttgctacaatgatcggttcattccgctctttaaagcatccactagctgatgcggagggcgcaaagaggcagcccatgattgagctgctcaaggagcacggtggattgacatatgtatgtggtcgataacttgatttaacaggtattccaattccacctgtcactgtatggtatggatttagtgggggaaaactggaagccattttgaaccaaagacgattccaccacctctaacaaataaggctgactgggagattaacccacttgaattggacttcacaaaagcaactgttatcggaaagggctctttcggtgaaattctgaaagcaaattggcgaggaacacctattgctgtcaagcgcattcttccatccttatctgatgacaggctggtgatccaagattttaagcatgaagtcaacttgctaataaagctgagacatccaaatgttgtccagttccttggagcagttacagaaaccaagcctctaatgctaattactgagtttctacgaggaggtgatcttcatcaatatctgaaggacaaaggtgcactcaacccacttaccgctgttaattttgcactggatattgcaagaggaatggcatatcttcataatgagcctaatgttgtgattcaccgagatttaaaaccaagaaacattcttctggtgaattctgctgccaaccacttgaaggttggagacttcggccttagcaagatcatcaaagcgcagcatgcgaatgatgtatacaagatgactggagagacaggaagctatcggtacatggcccctgaagttttcaagcaccggaaatatgacaagaaagttgatatcttctcttttgccatgattctatatgagatgctggaaggtgattcacccttctccaactacgaaccttatgaggctgctaagtacgtggcagatgggcatcgtccggttttccgtaaaaatcataccactgagttgaaggatttggttgagctatgttggtctggggacatcagtctgaggccatctttcttggagatcctcaagaggcttgagaagctcaaggagcattattcacacgagaaccactggcatttgttccagtagcagtgcgtatatttttttactatgactgttgtcatgattggggatttctcgggagatctgacattgatgaatgtacaaaattgggtgcctctagaaaggtccactgagactgaaaatcttcttgctgttttacgtttatgctatttctggtaaaaaaaacagaagctttctttgtaccacatcctctacaactttgtctttaggcttctctccgtaaatgatggaaaatcttgaactatgttctgcagcatttaggttgatgtggtgttctatatagatcggttgattttctttttctattcttttctgttgccaggatctttatatgcttagactcattggctatgggaagtgtttttaccgtgcatattctgcaagtgttacttgtcatagaagttactgtaaactttataaagggaa

SEQ ID NO: 212473 - DNA, 1464 bp, Zea Mays
gtcaaatgtgccgttgctacaatgatcggttcattccgctctttaaagcatccactagctgatgcggagggcgcaaagaggcagcccatgattgagctgctcaaggagcacggtggattgacatatgggaaaactggaagccattttgaaccaaagacgattccaccacctctaacaaataaggctgactgggagattaacccacttgaattggacttcacaaaagcaactgttatcggaaagggctctttcggtgaaattctgaaagcaaattggcgaggaacacctattgctgtcaagcgcattcttccatccttatctgatgacaggctggtgatccaagattttaagcatgaagtcaacttgctaataaagctgagacatccaaatgttgtccagttccttggagcagttacagaaaccaagcctctaatgctaattactgagtttctacgaggaggtgatcttcatcaatatctgaaggacaaaggtgcactcaacccacttaccgctgttaattttgcactggatattgcaagaggaatggcatatcttcataatgagcctaatgttgtgattcaccgagatttaaaaccaagaaacattcttctggtgaattctgctgccaaccacttgaaggttggagacttcggccttagcaagatcatcaaagcgcagcatgcgaatgatgtatacaagatgactggagagacaggaagctatcggtacatggcccctgaagttttcaagcaccggaaatatgacaagaaagttgatatcttctcttttgccatgattctatatgagatgctggaaggtgattcacccttctccaactacgaaccttatgaggctgctaagtacgtggcagatgggcatcgtccggttttccgtaaaaatcataccactgagttgaaggatttggttgagctatgttggtctggggacatcagtctgaggccatctttcttggagatcctcaagaggcttgagaagctcaaggagcattattcacacgagaaccactggcatttgttccagtagcagtgcgtatatttttttactatgactgttgtcatgattggggatttctcgggagatctgacattgatgaatgtacaaaattgggtgcctctagaaaggtccactgagactgaaaatcttcttgctgttttacgtttatgctatttctggtaaaaaaaacagaagctttctttgtaccacatcctctacaactttgtctttaggcttctctccgtaaatgatggaaaatcttgaactatgttctgcagcatttaggttgatgtggtgttctatatagatcggttgattttctttttctattcttttctgttgccaggatctttatatgcttagactcattggctatgggaagtgtttttaccgtgcatattctgcaagtgttacttgtcatagaagttactgtaaactttataaagggaa

SEQ ID NO: 212474 - DNA, 1456 bp, Zea Mays
cgcgatcagctggctccgcagcttttcaacctactattggctgccactagctgatgcggagggcgcaaagaggcagcccatgattgagctgctcaaggagcacggtggattgacatatgggaaaactggaagccattttgaaccaaagacgattccaccacctctaacaaataaggctgactgggagattaacccacttgaattggacttcacaaaagcaactgttatcggaaagggctctttcggtgaaattctgaaagcaaattggcgaggaacacctattgctgtcaagcgcattcttccatccttatctgatgacaggctggtgatccaagattttaagcatgaagtcaacttgctaataaagctgagacatccaaatgttgtccagttccttggagcagttacagaaaccaagcctctaatgctaattactgagtttctacgaggaggtgatcttcatcaatatctgaaggacaaaggtgcactcaacccacttaccgctgttaattttgcactggatattgcaagaggaatggcatatcttcataatgagcctaatgttgtgattcaccgagatttaaaaccaagaaacattcttctggtgaattctgctgccaaccacttgaaggttggagacttcggccttagcaagatcatcaaagcgcagcatgcgaatgatgtatacaagatgactggagagacaggaagctatcggtacatggcccctgaagttttcaagcaccggaaatatgacaagaaagttgatatcttctcttttgccatgattctatatgagatgctggaaggtgattcacccttctccaactacgaaccttatgaggctgctaagtacgtggcagatgggcatcgtccggttttccgtaaaaatcataccactgagttgaaggatttggttgagctatgttggtctggggacatcagtctgaggccatctttcttggagatcctcaagaggcttgagaagctcaaggagcattattcacacgagaaccactggcatttgttccagtagcagtgcgtatatttttttactatgactgttgtcatgattggggatttctcgggagatctgacattgatgaatgtacaaaattgggtgcctctagaaaggtccactgagactgaaaatcttcttgctgttttacgtttatgctatttctggtaaaaaaaacagaagctttctttgtaccacatcctctacaactttgtctttaggcttctctccgtaaatgatggaaaatcttgaactatgttctgcagcatttaggttgatgtggtgttctatatagatcggttgattttctttttctattcttttctgttgccaggatctttatatgcttagactcattggctatgggaagtgtttttaccgtgcatattctgcaagtgttacttgtcatagaagttactgtaaactttataaagggaa

SEQ ID NO: 212475 - DNA, 1460 bp, Zea Mays
acacccactagctgatgcggagggcgcaaagaggcagcccatgattgagctgctcaaggagcacggtggattgacatatgtattccaattccacctgtcactgtatggtatggatttagtgggggaaaactggaagccattttgaaccaaagacgattccaccacctctaacaaataaggctgactgggagattaacccacttgaattggacttcacaaaagcaactgttatcggaaagggctctttcggtgaaattctgaaagcaaattggcgaggaacacctattgctgtcaagcgcattcttccatccttatctgatgacaggctggtgatccaagattttaagcatgaagtcaacttgctaataaagctgagacatccaaatgttgtccagttccttggagcagttacagaaaccaagcctctaatgctaattactgagtttctacgaggaggtgatcttcatcaatatctgaaggacaaaggtgcactcaacccacttaccgctgttaattttgcactggatattgcaagaggaatggcatatcttcataatgagcctaatgttgtgattcaccgagatttaaaaccaagaaacattcttctggtgaattctgctgccaaccacttgaaggttggagacttcggccttagcaagatcatcaaagcgcagcatgcgaatgatgtatacaagatgactggagagacaggaagctatcggtacatggcccctgaagttttcaagcaccggaaatatgacaagaaagttgatatcttctcttttgccatgattctatatgagatgctggaaggtgattcacccttctccaactacgaaccttatgaggctgctaagtacgtggcagatgggcatcgtccggttttccgtaaaaatcataccactgagttgaaggatttggttgagctatgttggtctggggacatcagtctgaggccatctttcttggagatcctcaagaggcttgagaagctcaaggagcattattcacacgagaaccactggcatttgttccagtagcagtgcgtatatttttttactatgactgttgtcatgattggggatttctcgggagatctgacattgatgaatgtacaaaattgggtgcctctagaaaggtccactgagactgaaaatcttcttgctgttttacgtttatgctatttctggtaaaaaaaacagaagctttctttgtaccacatcctctacaactttgtctttaggcttctctccgtaaatgatggaaaatcttgaactatgttctgcagcatttaggttgatgtggtgttctatatagatcggttgattttctttttctattcttttctgttgccaggatctttatatgcttagactcattggctatgggaagtgtttttaccgtgcatattctgcaagtgttacttgtcatagaagttactgtaaactttataaagggaa

SEQ ID NO: 212476 - DNA, 1941 bp, Zea Mays
gtgattagctcgctcggacgctacacagtcacgggtcagatccgattcagatctcgcgcacagcacgcgagccgagggggacaaatagtaggatttccagagagacagaaacaaacggagacgcagagaaaccctttccacccagattcgttcggttcggttcggttccgaccacgcgggcgcgggagagagtggggagatgagcgcggctgcggaggacgcggctgcggccgaagggggatccggaggcgggagcagcggcgcggggtcgtcggaagggggcgcgcggcgccggttcgacgacaagggcctcgtcgcccgcacctcgctcatcctgtggcacacgcaccagaacgacgtcggcgccgtgcggaagctgctggaggaggacgccgcgctcgtcaacgcccgggactacgacagccgcacgccgctccacgtcgccgcgctccacggctggcacgacgtcgccgagtgcctcgtcgccaacggcgccgacgtcaacgcccaggaccgctggcagaacacccactagctgatgcggagggcgcaaagaggcagcccatgattgagctgctcaaggagcacggtggattgacatatgggaaaactggaagccattttgaaccaaagacgattccaccacctctaacaaataaggctgactgggagattaacccacttgaattggacttcacaaaagcaactgttatcggaaagggctctttcggtgaaattctgaaagcaaattggcgaggaacacctattgctgtcaagcgcattcttccatccttatctgatgacaggctggtgatccaagattttaagcatgaagtcaacttgctaataaagctgagacatccaaatgttgtccagttccttggagcagttacagaaaccaagcctctaatgctaattactgagtttctacgaggaggtgatcttcatcaatatctgaaggacaaaggtgcactcaacccacttaccgctgttaattttgcactggatattgcaagaggaatggcatatcttcataatgagcctaatgttgtgattcaccgagatttaaaaccaagaaacattcttctggtgaattctgctgccaaccacttgaaggttggagacttcggccttagcaagatcatcaaagcgcagcatgcgaatgatgtatacaagatgactggagagacaggaagctatcggtacatggcccctgaagttttcaagcaccggaaatatgacaagaaagttgatatcttctcttttgccatgattctatatgagatgctggaaggtgattcacccttctccaactacgaaccttatgaggctgctaagtacgtggcagatgggcatcgtccggttttccgtaaaaatcataccactgagttgaaggatttggttgagctatgttggtctggggacatcagtctgaggccatctttcttggagatcctcaagaggcttgagaagctcaaggagcattattcacacgagaaccactggcatttgttccagtagcagtgcgtatatttttttactatgactgttgtcatgattggggatttctcgggagatctgacattgatgaatgtacaaaattgggtgcctctagaaaggtccactgagactgaaaatcttcttgctgttttacgtttatgctatttctggtaaaaaaaacagaagctttctttgtaccacatcctctacaactttgtctttaggcttctctccgtaaatgatggaaaatcttgaactatgttctgcagcatttaggttgatgtggtgttctatatagatcggttgattttctttttctattcttttctgttgccaggatctttatatgcttagactcattggctatgggaagtgtttttaccgtgcatattctgcaagtgttacttgtcatagaagttactgtaaactttataaagggaa

SEQ ID NO: 212477 - DNA, 948 bp, Zea Mays
ctccgcttacccgccacagtcagcgggaggttccatcttcaaacattgcattgcacagcgcgcactgcgctcggaaccttcagaagtgcgaacattgcgatgaattgctcactttgcaaacacacagtagagcgcgagctatgggatcttcatacaggcatacaatgcccacaaaggatgctcgcgtgccaatactgtcagtttgaactgcctgcagttgatctttttgaacatcaggatctgtgtggaaatcggacagaatattgtcaaagttgcaggaagtatatcagacttcgtgaatggattggacatgaactccagttccatacgattttgaatgctgcatcagaactttcaaggactcgagcagcagcagagcagccagtaccaaagccagcccgacctgctactggttcgcttcacaaacaactgctcttgacggttgcagtaactggagttgcagttttgattggatcaatactgtaccaaggtaaggggaagtagttccggggatagtaatttcacgccccttgatgtgtaaattccctcataaccaaaagagtacagtttagaccccagttgagggaaacaaaaaagaagaaagaaagagagagtacagctgagattacaacatttatggaaggaccaatgaagctatgtcgttgttctatgtaaatggtaattttcccatcaaacttgtgggcgtttggtaacctatgcaaaatttgttacaactgcaaaagttgtaatatcttatggattcatggacaaactgtgatgtgcagtcagtcaaaaataacttatcctaatacatttgccacccaaaagttctcgtcgttttcgttttgtttatgtaaagcttttcctttcatttgtcttctgcaagaatgtagagctgacatcaaaactttagatgcagcttggcattcgtctccatctgaaatcctg

SEQ ID NO: 212478 - DNA, 1477 bp, Zea Mays
cactttgtatatatgagccttttttcggggaggggacctggccatttctgcaccagagctctctttatcgtggagttggcctgtcttcaaaaggtcgaagaccaggagcagatgatattgatgcttcttctcgtcttccacttctcaacaatgtttactacagagatattcttggtgaatttggagctttctttgctcttgccaacagaattgaccgaatacacaaaaattcttggatagggtttcagtcctggagaggtacagcaagaaaggcaaacttatcaaacaatgccgaatttgcaatcttagaagctgttcaatctcaaaagcatggagattccttctatttttgggttcggatggatcaagatccaagaaaccacacatataaagatttttggtccttctgtgatgcgatcaatgctgggaactgcaggttagctgttttggaggccttccaaaggatgtatggtgtacaccttgatcatgacctggattctctgttacatatgcctaatgatggagacacatggtctgtgatgcaaagttgggttttgcctacacggtcattcctagaatttgttatgttttcaagaatgtttgttgatgcactggatgcacaaatgtacgacaaacaccatcaaactgggcattgcatcttgagtcttcacaaggaccggcactgctactctcgtgtcctggagttgattgtgaatgtttgggcattccacagtgcacgacggatggtctatgttaatcctcagactggtgcaatgcaggagcagcaccatctcagtggcaggagaggtcaaatgtcagtgcagtttttctcctacaccactctgaagagcatggacgaggagcttgcagaagagtttgacttggatcatccggacaggaggtggctctggccacaaactggagaggtcttctggcagggtctctatcagagggagcggatcatgcggcagcaggagaaggagcggcggaagcagcagagcagagagaagatccagagaatcaagaatagagctcggcaaaagacgctgggaaagtatataaagccaccgcctgatgatacaggtggctcgaacgatacaacatcagtagatttgtagcattttgaccatgatgattcttaccgtggggaatttggttcattatttgtaacggctgtccttggtcctcactgagaacccccggacggttgtgaatattttgtcagttttgtcgtgccctctggtgtctgggtgctttacaggcgattttgtaacatatctaggccattgagttgtgaagctgccatcttaggtgtaaatttgggtttccgtagggttgtttttgtccatttcgcttatgagcttctctataacagacagttaacacttaacagctgctccgcatttgcagtctccttggtacaaaatgagtcgactgatggtatcaatctgtcaagatatatttgggtgaacctgtg

SEQ ID NO: 212479 - DNA, 1230 bp, Zea Mays
tttcagtcctggagaggtacagcaagaaaggcaaacttatcaaacaatgccgaatttgcaatcttagaagctgttcaatctcaaaagcatggagattccttctatttttgggttcggatggatcaagatccaagaaaccacacatataaagatttttggtccttctgtgatgcgatcaatgctgggaactgcagctgttttggaggccttccaaaggatgtatggtgtacaccttgatcatgacctggattctctgttacatatgcctaatgatggagacacatggtctgtgatgcaaagttgggttttgcctacacggtcattcctagaatttgttatgttttcaagaatgtttgttgatgcactggatgcacaaatgtacgacaaacaccatcaaactgggcattgcatcttgagtcttcacaaggaccggcactgctactctcgtgtcctggagttgattgtgaatgtttgggcattccacagtgcacgacggatggtctatgttaatcctcagactggtgcaatgcaggagcagcaccatctcagtggcaggagaggtcaaatgtcagtgcagtttttctcctacaccactctgaagagcatggacgaggagcttgcagaagagtttgacttggatcatccggacaggaggtggctctggccacaaactggagaggtcttctggcagggtctctatcagagggagcggatcatgcggcagcaggagaaggagcggcggaagcagcagagcagagagaagatccagagaatcaagaatagagctcggcaaaagacgctgggaaagtatataaagccaccgcctgatgatacaggtggctcgaacgatacaacatcagtagatttgtagcattttgaccatgatgattcttaccgtggggaatttggttcattatttgtaacggctgtccttggtcctcactgagaacccccggacggttgtgaatattttgtcagttttgtcgtgccctctggtgtctgggtgctttacaggcgattttgtaacatatctaggccattgagttgtgaagctgccatcttaggtgtaaatttgggtttccgtagggttgtttttgtccatttcgcttatgagcttctctataacagacagttaacacttaacagctgctccgcatttgcagtctccttggtacaaaatgagtcgactgatggtatcaatctgtcaagatatatttgggtgaacctgtg

SEQ ID NO: 212480 - DNA, 1525 bp, Zea Mays
cttcactcgctcgctgcagccgcgcggcgatgacggccaccgccagctgcttctccagccccgtcgcgtgggcgcggcctcgcgccggccccgcaggcgcgagtgcggccttgcgcgtgggccggtgtcccgcggccgcggtagcggcgcacgacgtggcgttccacccggacgtgtcccgcgcggcggattcgctgcaggcggagttccgcgccgtggaccgcgccatcgctctcaactcctcccgcgtggccgccgccttccgtcgcgcgcgcgtcgccccgcaccatttcggtgggtccacggggtacggccacgacgacggtggcggccgggaagcgttggactccgtcttcgccgacattgttggtgcggaggctgccattgtgcgcccgcagttcttctcaggtacccacgccattgcctgtgcgttgtttgcgcttctgaggcctgggcatgagctcctggcagtcgctgggcccccgtacgacaccttggaggaggtgattgggatcagggggtcggccaatgtagggtcactcaaggatttcggagtgacgtaccgagaagttccgcttgtagcagatggtggccttgattgggatgctcttgcttgctccatcaggccggaaactgggtgtgccttcatacagagatcgtgtggatattcgtggcgcaagagcttaagtgtagcagatattcacaaagctataggtttgatcaagatgcaaaatccaaactgcatggtgatggttgataattgctatggtgaatttgttgagatatcggaacctgcaatggtggtatgtccatgattttcactttctcctgaagacgatctctatttcatcttgtgtttcatggcagggagcagacttgattgctggaagtttgataaagaatccaggtggaactattgcgccttgtggtggttatgttgctgggaaggagcatttagtcgaagcagctgcagcccgtctatctgcacctggccttggggtggaatttgggtcaacacctggccatgttatgcgtgcgctgtttcaaggcctgtttcttggtccgcaaatggttggagaagcagtaaaaggaggtttgctcattgcggaagtcatgtcagccaagggatacaaagttgaaccacttccgagggttcctcgtcatgatattgtgcaggcagtggagcttggcagcagggaaagactcatagcattctgtgaagtagtgcaacaaacttgtccagtaggatctttcatcaaaccaactgctggggaaacgcctggctatgcttcagaggtcattttcgccgacgggacattcatagatggaagcacaagcgaactgtcatgtgatgggcccttgagagatccatatgccgtcttttgccagggaggaacacattggacgcagtgggcacttgtccttgcttcgtcaaagacacgcggaaaagaagaggaagggggaggcgactcgaccgaggcccggtttcgatctctggtcctccgattgcgtccagatctaccag

SEQ ID NO: 212481 - DNA, 1742 bp, Zea Mays
tcgctcgctgcagccgcgcggcgatgacggccaccgccagctgcttctccagccccgtcgcgtgggcgcggcctcgcgccggccccgcaggcgcgagtgcggccttgcgcgtgggccggtgtcccgcggccgcggtagcggcgcacgacgtggcgttccacccggacgtgtcccgcgcggcggattcgctgcaggcggagttccgcgccgtggaccgcgccatcgctctcaactcctcccgcgtggccgccgccttccgtcgcgcgcgcgtcgccccgcaccatttcggtgggtccacggggtacggccacgacgacggtggcggccgggaagcgttggactccgtcttcgccgacattgttggtgcggaggctgccattgtgcgcccgcagttcttctcaggtacccacgccattgcctgtgcgttgtttgcgcttctgaggcctgggcatgagctcctggcagtcgctgggcccccgtacgacaccttggaggaggtgattgggatcagggggtcggccaatgtagggtcactcaaggatttcggagtgacgtaccgagaagttccgcttgtagcagatggtggccttgattgggatgctcttgcttgctccatcaggccggaaactgggtgtgccttcatacagagatcgtgtggatattcgtggcgcaagagcttaagtgtagcagatattcacaaagctataggtttgatcaagatgcaaaatccaaactgcatggtgatggttgataattgctatggtgaatttgttgagatatcggaacctgcaatggtgggagcagacttgattgctggaagtttgataaagaatccaggtggaactattgcgccttgtggtggttatgttgctgggaaggagcatttagtcgaagcagctgcagcccgtctatctgcacctggccttggggtggaatttgggtcaacacctggccatgttatgcgtgcgctgtttcaaggcctgtttcttggtccgcaaatggttggagaagcagtaaaaggaggtttgctcattgcggaagtcatgtcagccaagggatacaaagttgaaccacttccgagggttcctcgtcatgatattgtgcaggcagtggagcttggcagcagggaaagactcatagcattctgtgaagtagtgcaacaaacttgtccagtaggatctttcatcaaaccaactgctggggaaacgcctggctatgcttcagaggtcattttcgccgacgggacattcatagatggaagcacaagcgaactgtcatgtgatgggcccttgagagatccatatgccgtcttttgccagggaggaacacattggacgcagtgggcacttgtccttggtaatgttctgaaggaatggtggatactcactccgtctcagtttataaggctttataaggcgtaactactttttattcttgtcccataatataaggcgtgctctctctaggctgaagaggcaggcgtcactaatatgcgagcgcttgcacttcagtggatacggacaacgacaagctgtcgttagtgttacccgactactacctcccctgctgctcatgtggacaaatcaccagcgacctcaccaccagtgaccccacttttaacctccctatttactcaccaccagatattttttagggactcaaacatgatgtatgatttagcatatgatctatgagcacaaagaatatgcaaattgctgtattgtgtatatagaggtttgttt

SEQ ID NO: 212482 - DNA, 1755 bp, Zea Mays
atgacggccaccgccagctgcttctccagccccgtcgcgtgggcgcggcctcgcgccggccccgcaggcgcgagtgcggccttgcgcgtgggccggtgtcccgcggccgcggtagcggcgcacgacgtggcgttccacccggacgtgtcccgcgcggcggattcgctgcaggcggagttccgcgccgtggaccgcgccatcgctctcaactcctcccgcgtggccgccgccttccgtcgcgcgcgcgtcgccccgcaccatttcggtgggtccacggggtacggccacgacgacggtggcggccgggaagcgttggactccgtcttcgccgacattgttggtgcggaggctgccattgtgcgcccgcagctcctggcagtcgctgggcccccgtacgacaccttggaggaggtgattgggatcagggggtcggccaatgtagggtcactcaaggatttcggagtgacgtaccgagaagttccgatggtggccttgattgggatgctcttgcttgctccatcaggccggaaactgggtgtgccttcatacagagatcgtgtggatattcgtggcgcaagagcttaagtgtagcagatattcacaaagctataggtttgatcaagatgcaaaatccaaactgcatggtgatggttgataattgctatggtgaatttgttgagatatcggaacctgcaatggtgggagcagacttgattgctggaagtttgataaagaatccaggtggaactattgcgccttgtggtggttatgttgctgggaaggagcatttagtcgaagcagctgcagcccgtctatctgcacctggccttggggtggaatttgggtcaacacctggccatgttatgcgtgcgctgtttcaaggcctgtttcttggtccgcaaatggttggagaagcagtaaaaggaggtttgctcattgcggaagtcatgtcagccaagggatacaaagttgaaccacttccgagggttcctcgtcatgatattgtgcaggcagtggagcttggcagcagggaaagactcatagcattctgtgaagtagtgcaacaaacttgtccagtaggatctttcatcaaaccaactgctggggaaacgcctggctatgcttcagaggtcattttcgccgacgggacattcatagatggaagcacaagcgaactgtcatgtgatgggcccttgagagatccatatgccgtcttttgccagggaggaacacattggacgcagtgggcacttgtccttggtaatgttctgaaggaatggtggatactcactccgtctcagtttataaggctttataaggcgtaactactttttattcttgtcccataatataaggcgtgctctctctaggcgtacgtacatcaatgcagtagtatagagaaaattaaatgtatttcttgatttttgaactagaggtggttacaccttatatattgagacgcagcgggtattgtgcaacagtgaagaggcaggcgtcactaatatgcgagcgcttgcacttcagtggatacggacaacgacaagctgtcgttagtgttacccgactactacctcccctgctgctcatgtggacaaatcaccagcgacctcaccaccagtgaccccacttttaacctccctatttactcaccaccagatattttttagggactcaaacatgatgtatgatttagcatatgatctatgagcacaaagaatatgcaaattgctgtattgtgtatatagaggtttgttt

SEQ ID NO: 212483 - DNA, 1814 bp, Zea Mays
atgacggccaccgccagctgcttctccagccccgtcgcgtgggcgcggcctcgcgccggccccgcaggcgcgagtgcggccttgcgcgtgggccggtgtcccgcggccgcggtagcggcgcacgacgtggcgttccacccggacgtgtcccgcgcggcggattcgctgcaggcggagttccgcgccgtggaccgcgccatcgctctcaactcctcccgcgtggccgccgccttccgtcgcgcgcgcgtcgccccgcaccatttcggtgggtccacggggtacggccacgacgacggtggcggccgggaagcgttggactccgtcttcgccgacattgttggtgcggaggctgccattgtgcgcccgcagttcttctcaggtacccacgccattgcctgtgcgttgtttgcgcttctgaggcctgggcatgagctcctggcagtcgctgggcccccgtacgacaccttggaggaggtgattgggatcagggggtcggccaatgtagggtcactcaaggatttcggagtgacgtaccgagaagttccgcttgtagcagatggtggccttgattgggatgctcttgcttgctccatcaggccggaaactgggtgtgccttcatacagagatcgtgtggatattcgtggcgcaagagcttaagtgtagcagatattcacaaagctataggtttgatcaagatgcaaaatccaaactgcatggtgatggttgataattgctatggtgaatttgttgagatatcggaacctgcaatggtgggagcagacttgattgctggaagtttgataaagaatccaggtggaactattgcgccttgtggtggttatgttgctgggaaggagcatttagtcgaagcagctgcagcccgtctatctgcacctggccttggggtggaatttgggtcaacacctggccatgttatgcgtgcgctgtttcaaggcctgtttcttggtccgcaaatggttggagaagcagtaaaaggaggtttgctcattgcggaagtcatgtcagccaagggatacaaagttgaaccacttccgagggttcctcgtcatgatattgtgcaggcagtggagcttggcagcagggaaagactcatagcattctgtgaagtagtgcaacaaacttgtccagtaggatctttcatcaaaccaactgctggggaaacgcctggctatgcttcagaggtcattttcgccgacgggacattcatagatggaagcacaagcgaactgtcatgtgatgggcccttgagagatccatatgccgtcttttgccagggaggaacacattggacgcagtgggcacttgtccttggaatggtggatactcactccgtctcagtttataaggctttataaggcgtaactactttttattcttgtcccataatataaggcgtgctctctctaggcgtacgtacatcaatgcagtagtatagagaaaattaaatgtatttcttgatttttgaactagaggtggttacaccttatatattgagacgcagcgggtattgtgcaacagtgaagaggcaggcgtcactaatatgcgagcgcttgcacttcagtggatacggacaacgacaagctgtcgttagtgttacccgactactacctcccctgctgctcatgtggacaaatcaccagcgacctcaccaccagtgaccccacttttaacctccctatttactcaccaccagatattttttagggactcaaacatgatgtatgatttagcatatgatctatgagcacaaagaatatgcaaattgctgtattgtgtatatagaggtttgttt

SEQ ID NO: 212484 - DNA, 684 bp, Zea Mays
gaattcctaggttcgctggagcctggtccgagggatggccgccgcctcgctcgcgttggcgagtcctctccggcttctcctccgcgtccgtcacccgcgcggagccatcgccgtcccgtgctacttcatctcgcgaggacggtatagcaccgccattgccgttgcagcagcgagggatttggcggtgaaaggaagcgtggacaggaattcagcggaggaagtcaggaacattctgaatatggcagaaagggcttcccaacgaagaaatgtttttcacaccaattttcttactccacctatagtgaaagaggctatgctggcacttgaaaagtttgcagataccaaagcagtagctcagggtggctaccctcaggctgagaggtgccgaatatctgttggacacccggacgtcatgacaagtaacccagatgtggttgctgctttgagcatctcagggaatttccggttggaatcttgttctcatggtgactttcttggtgctattcttgggacaggaataacaagggagaaagttggagatattcttttgcaggtggggaaagttggtgtttcatgcactcagattcctttgcttgctctagaatatgaaccaccaaggaccaattcatttaaaactgtagaatcatcgctcagggttgatgcccttgccagtgcaggatttaa

SEQ ID NO: 212485 - DNA, 4351 bp, Zea Mays
cggcaacgggccgagcacgccacaggcatcatgggctctcagcaagatggagacgccaccgccggtgaggtcgtctacctccacggcgtcctggaagcgacagtgttcgacgccgagcacctccgcaacgccgtccacggccggatcatgcagatcttgtgcacagtgagtcagtgaccaatggcggcacgtgttctgttgacgacggacaggccatggagaagatgcaggagtccctgggcgtgcactgcctccagcacagccggctctacgtagacgtcgacgtcggcgcggcgcgggtggcgcgcacccgcgaggtggagttccaccccaccagcccggcctggaaccagtcgttccgcctgcactgcgcctaccccgccgcggcggtcaccttcacggtcaagaatcagcaccttatcggcgcgggcgttctcggcgccggatccgttcccgccgcgcgcgtcgcctccggacagccgctggagtgcttgctcgacctccgcggcggcgagcacgcccacgagacgcacacgccgagcctccgcgtccgcctccagttctttggcgtggagcgcgacccgttctggggcgccggcgtccgcctccctgacttcgcgggcgtcaagcccgcgttcttcccggagcggacaaactgcagcgtcacgctgtaccagaacgcgcacctgtccgacgcgttcgacccgggggtccgcctcgacggcgggctggcgtaccggccggcgcggctctgggaggacctctacgccgccatccgcgacgcgcggcggttcgtgtacgtcgcggggtggtcggtgaacacggagatcacgctggtccgcgacgcgggccgtcgggcggttcccggcgccgagggcgacactctgggcgagctgctgaagcgcaaggccgacgaaggggtggccgtgctggtgatgccgtggcaggacaacacgtcagtgtcgttcctcggcaacgccggcctgatgaagacgcacgacgaggagacccggaggttcttcgagggcacaaacgtaaggtgcttcctctgcccgcgcaacgccgacgcgtcgctgaccatggtgcagcacgtcgagaccagcgccgagttcacgcaccaccagaagaccgtcacgctcgacgcagccacgccgggcaccgacgaacgccacgtcgtcagcttcatcggcggcatagacctctgcgacggccggtacgacgacgagaaccacacgctgttcagggacctcgacaccacgtactcccacgacttcatgcagaacaactacaagcacgcctccctgcggcgcggcggcccgcgggagccgtggcacgatgtgcactgcagattgaaaggccccgtggcgtgggacgtgctcgccaactttgagcagcggtggaggaagcaggcaccggatgacatgcgcggctgcctgctcgatctgagcccggcggcgttccccgaccccgtcagcttcgacggcaacgacccgtggaacgtgcaggtgttccggtccatcgacgacgcgtccgtcgtggggttcccctccgacgcggccgaggccgccgcgatggggctgacgagcggcaaggacgtgactgtggaccgcagcatacagatcggctacgtcgaggccgtccggcgcgcgcagcggttcatctacatcgagaaccagtacttcctcggtggctgcgcgtcgtgggcggcggacagggacgccgggtgcctgaacctggtgcccgtcgagatcgcgctcaaggtcgccgccaagatccggtgcggcgagcggttcgcagtgtacgttgtgacgccgatgtggcccgagggcgtgccggctggtgaggccgtgcaggccatcctgctctggaacaggcgcaccgtggaaatgatgtacggcatcgtcgcgaaggccatcgacgacgccgggttgcgcggccaggcgcacccctgcgactacctcaacttcttctgcctggggaaccgggaggcgccgctccctggcgagtactcgccgccggagacgccggatgaggacacggactactggcgcgcgcaggtgaatcgccgcggccccatctacgtgcacgccaagctcatgatcgtggacgacgagtatgtcatggttggctcggcgaacctgaacgagcgctcgctggccggtaaccgggacagcgagatcgcgcaggggagctaccaaccggcgcacctgaacgggccaggcggccgggcgcgtgggcaagtgtacgggttcaggatgtctctgtggcacgagcatttcatgggacgccatgccagtgaggacgccgacgacggagccttgttcctggagccagagagcttggagtgcgtacgcgccgtgcggcgagcggcggagaggctgtgggattcgtacacgcaggacagggtggaggacctgccggggcacctgctcccgttcccgatcaccgtgtcagagttcggcgaggtggctgacctgccggccgacgggtgcttcccggacacgagggcgccggtgagggggacgaaagcggtgaagctcccggacatcctgacaacctgatatgcttgtttaatttgcttgtatggttacgtcagttgtaagcgcactcccaaagaacgtttctagttcattagttatagcatactaaaacatagtggtgtgccaatagaattaagaaagaggggatgtaatggtttgagggtgtttggtttatttaatcaccctcctaaatttagtgacaaaacttaagtttctaaaatttctatttgggatacctcttttagtcacatcatcaccctctttagcagtttagggattaaaagcgactaaactttatagcaactcatgtgaaccaatccaaaaagaacttttacagtaagaagtcttctctaccgcgtccaacaactcccgtatttctcccaatcttttggcgattacacaaaccgagctcatcctcccgcaaatatccaggagggatcgaaggagctatggagcggtgccgtgaggggcgtctgcggcgctggtgtgagggtttgattcggaggcagcagtggatcggcttaggagacaatgtggcctagctcgacaagaacaagtccgtcgcattggcgaccagttcctttgtcgggtccaatcgcccgacggcgatagaaggtttgaaagatccgatggtgaagacctaggctttaccggcgttgaagaaattgcaggtgagatgcaaggtcatgtttcgttgcaaaaaatcctggttttacgccgccgtaccggggcaacggcgcctcctcagcaagatttcaacacatagacatgggcaacacatttatcaatgggaatggattttttccaacatgatgatggatggaagcatgcaaggggatgtagataactataccaacacaagtgttgcacagtattcacaagcaaaacctgttgggacaccagctcttattgcaaggccaaaccataagacatccaaaaaagttagtgatcagaaagatgaagtactggtttccgcatggttgaatgtaagtttggatcctgtggtagggaaatataaaaaaggtggcaggtattggtctcatatttatgagtacttcaatgaacacaagccatgccaatcacagtgtaccattaattctttaatgcaccgatgggagaccattcagaaatgcaagaataatttttgtggttgtcttgcacggattgagctacgacattagagtggcaccacaatgccggataaggttgtgaaggcatgtgccttatataaatctgaagatgaacaacataaggcatttcaattcatgcattgttggaaaaagttgaggacacaaccaaaatggcttgctaaatttgacaaattggttgctgctaaaacttagaacaagagacagaagactagtcctgatggtgatgctactgcaagggtaccaagtgaaacatgagcaggtgaggtccaaggcgtagaggatattcagttgacaaggcctagtggaaagaaaaaaaagctaaagcaacaccgttacaagagaagaagaaaagtgtgacaacaacattggaaaatatgtgggcacaaaagagagaaactgatgttgagaaagagctaaaaaagaggagtggttcaataaagcctttgcacttgaacaggagtgagttaacaatgaaaaagaacttgtggaggtgaggaaagaggaggttcaattgcagaaacaaagagatgaagagtggattatgactatatgtcctccatgtgtaactaatatacttgtgcatatgtatcatgtttttgtgtatgcatcatttgcaggctctagtacctagggagaacacgaacctgttatgggaaggag

SEQ ID NO: 212486 - DNA, 4087 bp, Zea Mays
cggcaacgggccgagcacgccacaggcatcatgggctctcagcaagatggagacgccaccgccggtgaggtcgtctacctccacggcgtcctggaagcgacagtgttcgacgccgagcacctccgcaacgccgtccacggccggatcatgcagatcttgtgcacagtgagtcagtgaccaatggcggcacgtgttctgttgacgacggacaggccatggagaagatgcaggagtccctgggcgtgcactgcctccagcacagccggctctacgtagacgtcgacgtcggcgcggcgcgggtggcgcgcacccgcgaggtggagttccaccccaccagcccggcctggaaccagtcgttccgcctgcactgcgcctaccccgccgcggcggtcaccttcacggtcaagaatcagcaccttatcggcgcgggcgttctcggcgccggatccgttcccgccgcgcgcgtcgcctccggacagccgctggagtgcttgctcgacctccgcggcggcgagcacgcccacgagacgcacacgccgagcctccgcgtccgcctccagttctttggcgtggagcgcgacccgttctggggcgccggcgtccgcctccctgacttcgcgggcgtcaagcccgcgttcttcccggagcggacaaactgcagcgtcacgctgtaccagaacgcgcacctgtccgacgcgttcgacccgggggtccgcctcgacggcgggctggcgtaccggccggcgcggctctgggaggacctctacgccgccatccgcgacgcgcggcggttcgtgtacgtcgcggggtggtcggtgaacacggagatcacgctggtccgcgacgcgggccgtcgggcggttcccggcgccgagggcgacactctgggcgagctgctgaagcgcaaggccgacgaaggggtggccgtgctggtgatgccgtggcaggacaacacgtcagtgtcgttcctcggcaacgccggcctgatgaagacgcacgacgaggagacccggaggttcttcgagggcacaaacgtaaggtgcttcctctgcccgcgcaacgccgacgcgtcgctgaccatggtgcagcacgtcgagaccagcgccgagttcacgcaccaccagaagaccgtcacgctcgacgcagccacgccgggcaccgacgaacgccacgtcgtcagcttcatcggcggcatagacctctgcgacggccggtacgacgacgagaaccacacgctgttcagggacctcgacaccacgtactcccacgacttcatgcagaacaactacaagcacgcctccctgcggcgcggcggcccgcgggagccgtggcacgatgtgcactgcagattgaaaggccccgtggcgtgggacgtgctcgccaactttgagcagcggtggaggaagcaggcaccggatgacatgcgcggctgcctgctcgatctgagcccggcggcgttccccgaccccgtcagcttcgacggcaacgacccgtggaacgtgcaggtgttccggtccatcgacgacgcgtccgtcgtggggttcccctccgacgcggccgaggccgccgcgatggggctgacgagcggcaaggacgtgactgtggaccgcagcatacagatcggctacgtcgaggccgtccggcgcgcgcagcggttcatctacatcgagaaccagtacttcctcggtggctgcgcgtcgtgggcggcggacagggacgccgggtgcctgaacctggtgcccgtcgagatcgcgctcaaggtcgccgccaagatccggtgcggcgagcggttcgcagtgtacgttgtgacgccgatgtggcccgagggcgtgccggctggtgaggccgtgcaggccatcctgctctggaacaggcgcaccgtggaaatgatgtacggcatcgtcgcgaaggccatcgacgacgccgggttgcgcggccaggcgcacccctgcgactacctcaacttcttctgcctggggaaccgggaggcgccgctccctggcgagtactcgccgccggagacgccggatgaggacacggactactggcgcgcgcaggtgaatcgccgcggccccatctacgtgcacgccaagctcatgatcgtggacgacgagtatgtcatggttggctcggcgaacctgaacgagcgctcgctggccggtaaccgggacagcgagatcgcgcaggggagctaccaaccggcgcacctgaacgggccaggcggccgggcgcgtgggcaagtgtacgggttcaggatgtctctgtggcacgagcatttcatgggacgccatgccagtgaggacgccgacgacggagccttgttcctggagccagagagcttggagtgcgtacgcgccgtgcggcgagcggcggagaggctgtgggattcgtacacgcaggacagggtggaggacctgccggggcacctgctcccgttcccgatcaccgtgtcagagttcggcgaggtggctgacctgccggccgacgggtgcttcccggacacgagggcgccggtgagggggacgaaagcggtgaagctcccggacatcctgacaacctgatatgcttgtttaatttgcttgtatggttacgtcagttgtaagcgcactcccaaagaacgtttctagttcattagttatagcatactaaaacatagtggtgtgccaatagaattaagaaagaggggatgtaatggtttgagggtgtttggtttatttaatcaccctcctaaatttagtgacaaaacttaagtttctaaaatttctatttgggatacctcttttagtcacatcatcaccctctttagcagtttagggattaaaagcgactaaactttatagcaactcatgtgaaccaatccaaaaagaacttttacagtaagaagtcttctctaccgcgtccaacaactcccgtatttctcccaatcttttggcgattacacaaaccgagctcatcctcccgcaaatatccaggagggatcgaaggagctatggagcggtgccgtgaggggcgtctgcggcgctggtgtgagggtttgattcggaggcagcagtggatcggcttaggagacaatgtggcctagctcgacaagaacaagtccgtcgcattggcgaccagttcctttgtcgggtccaatcgcccgacggcgatagaaggtttgaaagatccgatggtgaagacctaggctttaccggcgttgaagaaattgcaggtgagatgcaaggtcatgtttcgttgcaaaaaatcctggttttacgccgccgtaccggggcaacggcgcctcctcagcaagatttcaacacatagacatgggcaacacatttatcaatgggaatggattttttccaacatgatgatggatggaagcatgcaaggggatgtagataactataccaacacaagtgttgcacagtattcacaagcaaaacctgttgggacaccagctcttattgcaaggccaaaccataagacatccaaaaaagttgtgaaggcatgtgccttatataaatctgaagatgaacaacataaggcatttcaattcatgcattgttggaaaaagttgaggacacaaccaaaatggcttgctaaatttgacaaattggttgctgctaaaacttagaacaagagacagaagactagtcctgatggtgatgctactgcaagggtaccaagtgaaacatgagcaggtgaggtccaaggcgtagaggatattcagttgacaaggcctagtggaaagaaaaaaaagctaaagcaacaccgttacaagagaagaagaaaagtgtgacaacaacattggaaaatatgtgggcacaaaagagagaaactgatgttgagaaagagctaaaaaagaggagtggttcaataaagcctttgcacttgaacaggagtgagttaacaatgaaaaagaacttgtggaggtgaggaaagaggaggttcaattgcagaaacaaagagatgaagagtggattatgactatatgtcctccatgtgtaactaatatacttgtgcatatgtatcatgtttttgtgtatgcatcatttgcaggctctagtacctagggagaacacgaacctgttatgggaaggag

SEQ ID NO: 212487 - DNA, 818 bp, Zea Mays
ctgttctatagcactagaacctgctgattcctcgtcgccagcttctctttcccccaccacaaccccccgccggcgcggctcccggtgtcccttccactctccaccctctccttcccttcggcgccaagtccatccgcccctccgaatctccgattgccgccgtccagttttggcaggtgccggccgacagttgagaatgggactgaggcgcctgatgagatgctgctgctgcattgcaaagcacgcggacgacggcgacaagatcgatttcggaggtggcaatgttcatgttgtcacaagcaaagaggactgggaccaaagaattgccgaggcaaacaaggatgggaaaaccgtggttgcaaacttcagcgcttcctggtgtgggccgtgccgtgtcatcgcacctgtctacgccgaaatgtcgcagacgtaccctcagctcatgttcctgacgatcgatgttgatgacttgatggagttcagctcgtcgtgggacatccgcgcgaccccgaccttcttcttcctcaagaacgagcagcaggtggacaagctggtcggcgccaacaagcctgagctggagaagaaagtggccgccgtcgccgacgcggccggcagcaagacagtgtagtgtaggcaaagacccgcctagcttgttgacctggccctgtacatcgttatatcctattgttgctgtgtgtttctttcttggcaccgtgcgcatgcgtcgatctgtcggcggtaatgtcttccgccatgtgctgattgtaagagttgcccggtaatggtaatggtaatggtaatggtgtcttacggtttct

SEQ ID NO: 212488 - DNA, 821 bp, Zea Mays
ctgttctatagcactagaacctgctgattcctcgtcgccagcttctctttcccccaccacaaccccccgccggcgcggctcccggtgtcccttccactctccaccctctccttcccttcggcgccaagtccatccgcccctccgaatctccgattgccgccgtccagttttggcaggtgccggccgacagttgagaatgggactgaggcgcctgatgagatgctgctgctgcattgcaaagcagcacgcggacgacggcgacaagatcgatttcggaggtggcaatgttcatgttgtcacaagcaaagaggactgggaccaaagaattgccgaggcaaacaaggatgggaaaaccgtggttgcaaacttcagcgcttcctggtgtgggccgtgccgtgtcatcgcacctgtctacgccgaaatgtcgcagacgtaccctcagctcatgttcctgacgatcgatgttgatgacttgatggagttcagctcgtcgtgggacatccgcgcgaccccgaccttcttcttcctcaagaacgagcagcaggtggacaagctggtcggcgccaacaagcctgagctggagaagaaagtggccgccgtcgccgacgcggccggcagcaagacagtgtagtgtaggcaaagacccgcctagcttgttgacctggccctgtacatcgttatatcctattgttgctgtgtgtttctttcttggcaccgtgcgcatgcgtcgatctgtcggcggtaatgtcttccgccatgtgctgattgtaagagttgcccggtaatggtaatggtaatggtaatggtgtcttacggtttct

SEQ ID NO: 212489 - DNA, 1490 bp, Zea Mays
gaggacctcgtaaagggaatatccacagacctctctgtctctccctctcccgtgggtagcagggtgggtagctctcctcctcctcctccccctccccggccgtggtccgtgggtatggaggagaatcaagagaagtttgctccggagagcagcggcggcgacggtggtggctcggtgagaacgatctgcgtcttctgcggcagcaggccggggaaccggccgtccttcagcgctgcggcgctcgacctggggaagcagctggtcgagaggcagatgaacctggtgtacggcggcggcagcggcgggctgatgggcctggtgtccaaggccgtctacgaaggcggccgccacgtcctcggggtcatccctaccgccctcctacctgaagaggtagtaatgccgaatctccgtcgttctggcctgtcgtcgcacgagctagctaggaaaccacctgcacgggtttcagtgtgtgtgtgtgtgcgcgcgcatgaactaaacgtgtacgtgtgtgtgtggacgacctgctgcaggtgtcaggggagacattgggagaggtgaaagtggtcagggacatgcatcagcgcaaggcggaaatggcgaaacatgccgacgctttcatcgccctgccaggtggttacgggacaatcgaagaactgctggagatcatagcgtgggcgcagctgggcatccacagcaaaccggtaacctagcttgtcgtatttaactgccatttaatttaaataaatacgcctcatgcatgccctcatctatagtttctagcacattatattatatagttaagcgccggccggccggccggcatgccccacgcatctctgttgtgcccaataataatcttaatctcctctagctatagttgctgatcgacgcgaaagagagaggtgtgtggtttaaaggaggaactaatcaatcaacgctgcgttacgtacgtggccgtcgtcggcgcatgcatgcatcaggtggggttgctcaacgtggacggctactacaacagcctgctctcgctgttcgacaaggctgtcgaggagggcttcatcgacaccaaggcacggaacatcttcgtcctcgctgacaccgccgccgacctgctgactaggctcaccatgatggcgcgcctggcagccgacgacgacgatgctactactacccccagaggagacggagacggagacggagacgaacacaagggggccaccaccgctgcaggcgtcaaaaggaaaaggggctagatcgattatagttgttgctgttgttgttgtattcttgtgcctatccatccgtgcatgcatgcatgtatcctctctagctttctagtaggtttcgttcctgcatgcaatctgtggatcctgctgtaaccaagctagtacgtatctcctaagtactaactactagtgaagctgcagtgtgtacctgtcgtgattaattaataataagccatgcagctacatatttatttgatgtacatctaa

SEQ ID NO: 212490 - DNA, 2308 bp, Zea Mays
ggctcggccgcaccccccgtcgcgcacgttctggctcctcaggtgatccggtgcgtgcgttgcgacttgcgacgtcctccgaactcccgcccgagtcacgtggcgccggacgcggcaggcgataatcgccggccggccgaccgagacgacaggctaggtttctcgtagcacacgcttacagttctcgcggattctcggtgtgcgcggcccggccgcacattggacggccatccagtctcgccgccgcgtggtttgatccatcgatcccggatcgatcgtccgtgggaagaagaagaaccgaacggctggttcatggcggcgccagcgaccagggtgatcggatccaagccagcggactgcttccagttccaagaccctaacacctggacctgcgtatcggagctcgcaagcgatgtggtcgtcgaagtaggagatacgtccttccacctacacaagaagcttgtgaacgagtccaccggcgatggcagcaaaccgtgcaccgtgcgtctggacgacgtccccggcggggcggaggccttcctgctggccgccaggttctgctacgacgtccagacggagctgaacgcgggcaacgccgtgccgctgcggtgcgcggcggagcgcctcgccatgacggaggactacggcgaagggaacctcgtggagcaggcggagtcgttcctgtccgaggtgctggccggctggagcgacacggtgcgcgcgttgggcacgtgcgacgacgccgtgctccctgccgccgaggacctgctcatcgtgcagcggtgcatcgactcgctggcggacaaggcgtgcgccgacccgacgctctccgggtggccgatgctggagtacttcacggccaagagcctcgaggagacggcgatctggaccggcatcggcgccgccgggaggccgcggtcgcccggcgcgggctggtggtacgaccaggcgtcctcgttaccgctgccgctctacaagcggctcattgcggcggtgcggtccaggggcatgagccccgagaacgtcgccggctcgctgatgcactacgccaggcgccacctctccgggctcaggcgcctcggagacaacagcgacggcagcagccgcgggggggctgcggccgtgctctcgggcggcgaccagaggacactactggaggagattgtcgcgatgctcccagtcgagaagggcgtcgcaccgacgcggttcctgctcggtctgctccgcgtcgcgacggtcctgcacgccgccgcggcatgccgggacgcgctggagaggagggccggcgaccagctggaggaggccgcgctggaggacctgctgatacccaacaccggatactccgcggagacgctctacgacgtggacagcgtgcagcggatgctggagcagttcatgatgacaaccccgcctgcgttcgccgtgttaccggagaccacggacgagggacagctggtcgacgctccgccgggcgagctcatgccagtcagctcggtaggcaagctagtcgacgggtacctcgcggaggtcgggacggacgccaacctcaagccgtccaagttccagaccatcgcggcgctcgtcccagactacgcccgggcgatcgacgacggcctctaccgcgccattgatatctacctcaaggcgcacccgtggctgacggactcggagcgggagcagctgtgccggctgatgaactgccagaagttgtcgctcgaggcgtgcacgcacgcggcgcagaacgagcggctgccgctgcgggtggtggtacaggtgctcttcttcgagcagctgcggctgcgcaccacggtgtccgggtggttcttcgtgtcggacaacgccgaccagggctccagctccgataactgcgtactgccgcggaggcccgacgacgatctggacctggcagcccggtccgaggtgacgacggacgaggacggctccgcggcggcccagcacgagccgtcgccggcgatgagcgtcgcggagatccaccgcccggggaagcccaagagcaccctgagccggctgttagggaagctcgggctcggcgggaggtcgtcgtcgcggcagcgccagcagcaaccgccgctgccgggcgccagtgacaagaggcgcaggtccttcgatttcgggtgttaataataacaatggaagatttagacgtgcgttaattaatttgttcgagatgtagcaatacgatttgatgatggcattactcgtaggtacaaagctcatgggttcattcttttcggattgttttgctggaaaagtttctatttagaccgtttgtaatttttttagacca

SEQ ID NO: 212491 - DNA, 2434 bp, Zea Mays
  misc_feature (2434)..(2434): n is a, c, g, or t
ctccgtcgtgttctgcctcccctctcgttctgcctcccgcgcctccgataaggctctccctgttcggccatacgcacaaccgctctctctccctctcgaagcgacgcagaaccgctcgccagtgtcgcagtcgcctcctgtccctctcctctctctttgccgctgccctcctctaagcatctccctctcctactccctcctctcaaagcacttgttggccccccaccgccgcatctgcatcccataatcgcctacgccatcgccgccgccttcgggtccttctcgctcagcctcgactgctcgctcatcttcaccgaggcgctcctcacccccgccatcccctccgtgtcggcgtgcgccggcggcatcttgcccagtctcagccgatttatccttcggtctgttagggccttatcaaaccgccgccacggcgaactcgcgccgctgccatgttcgcctcgcgcacccaccatctcctcaacaacgttcaaaccgccaaccacgacatcctcctccacaacccgacctctcacgcatcccaacttggtgcggcgtaaacgcgcagcagcacttcgcctcggtcgaccacggcctgcccccaggcgttgacatccagatccatctcgctccgatctacattcgagaagtttgtctctggcatcgattccccaatccgaatcattgccgacgtcttctttgggtggacggtcgaagtcacgcgcacgcacatcccacacttgttcctccccggcggtgcattcagcaacaccgtcttcttctccgtgtcggagcacctcgggccataggggcagacccgtgaacgacattcttttggcgtgtcacgacctcctgtcgcaagctcgatgctctccccatcgacacgtgagccccttggagggagccccgacctagattttactgagagtttctcctcatcaacctagatctcagtttctctggactttactgagcactcaacattgtgttttttggttgctggtaaattgctcatttactgctatagttgattagtaaatataccggtattagtatttatatagttactggttacttgtaatacaaacatttttcattgaagcgcgtatatggtttgtaaaataccagaacaaggtcagtacttttatcattggcgagtatcttttatgtgagtaatatttttatttccatgtttatctacttagttctcgtggcatgctgccttttcagtattggacaatgctaatggagttacaactccaaggacaggaaggtatagtgcagatggagcaggtggtgatgcttctgtagagcttacacggccgtgcaggcacgcagctgccgcgcttggtgatttgatatttgtgtatgacggtttacgtggaggtgccgatccatagatttagcttgaagagaaaatagcagcagaagaaaaagttggcgctcgacaattttttcgaaatcatcttaaaaggctgaccatcaaataaaaaccaggctaaaaacacaaaatgtaatatatatgtcaaggaattccatccttgtgtttgcatggacctagaaaatgcagatttaagaatgatgcgagtgatggaggcctatcaggtcaaggaatttcatcctgatgtttgcaaggacccagaaattgcagatttaagaatgagcgagcgatggaggtctatcagggagtgttcttcgttgctatccattgtgaaacatgtcctacagtatcccttgccaaccagctcctgtatctgttgcctgctcgattcgttgaagcacagaagactacagtgttgtgttgtgttggttcactgtaccacaaacaatattgaagaggactgatgaagagcgcaaagtttatagcatagtcgaagattttgaattgcaattcaaggagaaagaggattgctaaaggtcttcataatacttcttgttttcattttagttggtgggttcttcagtaaagctcacaaaatatttattttttctcaaagctttcttttcaatttaggatgaccttcaaaacaaaaaaaagctcattaaagaacatgggcattatgaaagcacaataggatccaaagaggtaggtccctttttgtcacttatttaatattcctgaataacctgtgttcggtctgaaagagcacataattgcactcctatttttaatccttacatgattactgcataactgtttatcagtttgtggtctacaggtatcaggctcgctcgcaccacagatatctttgagttattttttactgcattgcgactaattttaggcctccaatttgacaaacagaattaagtagcttatgtatcccttgtttcttgtttcctcagtatatatacacactttccaatatgacgcaggtagcattgttgtagaattgcggttcacggaaacacaaggctagcgcttttgtgcaacaan

SEQ ID NO: 212492 - DNA, 2237 bp, Zea Mays
  misc_feature (2237)..(2237): n is a, c, g, or t
ctccctctcgaagcgacgcagaaccgctcgccagtgtcgcagtcgcctcctgtccctctcctctctctttgccgctgccctcctctaagcatctccctctcctactccctcctctcaaagcacttgttggccccccaccgccgcatctgcatcccataatcgcctacgccatcgccgccgccttcgggtccttctcgctcagcctcgactgctcgctcatcttcaccgaggcgctcctcacccccgccatcccctccgtgtcggcgtgcgccggcggcatcttgcccagtctcagccgatttatccttcggtctgttagggccttatcaaaccgccgccacggcgaactcgcgccgctgccatgttcgcctcgcgcacccaccatctcctcaacaacgttcaaaccgccaaccacgacatcctcctccacaacccgacctctcacgcatcccaacttggtgcggcgtaaacgcgcagcagcacttcgcctcggtcgaccacggcctgcccccaggcgttgacatccagatccatctcgctccgatctacattcgagaagtttgtctctggcatcgattccccaatccgaatcattgccgacgtcttctttgggtggacggtcgaagtcacgcgcacgcacatcccacacttgttcctccccggcggtgcattcagcaacaccgtcttcttctccgtgtcggagcacctcgggccataggggcagacccgtgaacgacattcttttggcgtgtcacgacctcctgtcgcaagctcgatgctctccccatcgacactattggacaatgctaatggagttacaactccaaggacaggaaggtatagtgcagatggagcaggtggtgatgcttctgtagagcttacacggccgtgcaggcacgcagctgccgcgcttggtgatttgatatttgtgtatgacggtttacgtggaggtcaaggaattccatccttgtgtttgcatggacctagaaaatgcagatttaagaatgatgcgagtgatggaggcctatcaggtcaaggaatttcatcctgatgtttgcaaggacccagaaattgcagatttaagaatgagcgagcgatggaggtctatcagggagtgttcttcgttgctatccattgtgaaacatgtcctacagtatcccttgccaaccagctcctgtatctgttgcctgctcgattcgttgaagcacagagtatggagaaaacacaacatatatcgcatggattatgatttgttagtgcatgtgttacatattgacttatcgttttgagttgtcaataggtccaaggtactaaattgttgatgcacggatttctaattttatcaatttgttttgtgggctgcgatttattttaagtcgctctaagatctcaattattcctcttttttgttattttttatgccttagctgtaatgtttgttttgaatatttattattggaaaatttgatattttataggtgagacattaattaagccattttcataaaagaacactcctgtggtgacaattagacaagaatactaataatcagattaacatacttaaccttgactgcacatatagagactacagtgttgtgttgtgttggttcactgtaccacaaacaatattgaagaggactgatgaagagcgcaaagtttatagcatagtcgaagattttgaattgcaattcaaggagaaagaggattgctaaaggtcttcataatacttcttgttttcattttagttggtgggttcttcagtaaagctcacaaaatatttattttttctcaaagctttcttttcaatttaggatgaccttcaaaacaaaaaaaagctcattaaagaacatgggcattatgaaagcacaataggatccaaagaggtaggtccctttttgtcacttatttaatattcctgaataacctgtgttcggtctgaaagagcacataattgcactcctatttttaatccttacatgattactgcataactgtttatcagtttgtggtctacaggtatcaggctcgctcgcaccacagatatctttgagttattttttactgcattgcgactaattttaggcctccaatttgacaaacagaattaagtagcttatgtatcccttgtttcttgtttcctcagtatatatacacactttccaatatgacgcaggtagcattgttgtagaattgcggttcacggaaacacaaggctagcgcttttgtgcaacaan

SEQ ID NO: 212493 - DNA, 2996 bp, Zea Mays
tcgcaacaaatcgcggagcactcgccgtcgtccgtcaccgggctgtccaacctacgtcgactccggacgcatcgctcgccatacgatcagccctccgttcgctgtacgggctcgcgggttgcgaccctaatagctgactgattctaggcgccatgtcactgcccgtcgacgccgccatcatccagttcacccagatcctattctcccatgcgccagccggccccgtgggccgtgagtccgtgatccagcgtcccaggacccaggctcccagtaccagcctcttctatccggcatccagcgagcagcaaatccagagacctcgactcctcctaaccctagccgccaggctccagtgctccaccgctccagcagatcccggacccggaagcagcgaggaaacacagggcgaccaaggcccgtctggactctggatccgccggtccgccactccgcccctcatctccgacctgagcgcgccgccctgccccgccccgcctctccctcgagcgctgtccgcgcctccgcgcctccgcggtccgcgtccggccgtccgcccagggcccaggcagttgctgcctgctggcttgctgccgtccgccaggccgcctaggcacacagcacactacttctacagttctacggccagcgcccagcggtccagtccagcttccaaatggctagtgaggactcgaaagatatgctgaagaacgtggactggaagaccgtgggcggtgctgtgactactgaatctagccagccagttgtcaagaaacgccttccgaagaagatcagacaagtccctgagtgctattttctgcctcggcgatctttgccttctgcactggcaatctatggtgccgtgtgtgctgctggagttggtgcaggaatgctgatcgaggtgtggataaacaaaaagatcaaagaggatagtgctattatctgggagatggataaatgatgtgcagttctgcaccacactttgatatggtggaagcagtttcggcactgcgatatttgctagctctcaagttaagaattttgtttataggattccttcgtccgtttgttttattttgattgaggtattgccaagatggattcaagaacgttcatccgcagttcatttaccagaacacgagtaaaaactctggctgctgaaaatatagctccaccacaactctaaaataacttataatttgaaatcgaggaagtatttctgttatcatgctaaataaaatgttgtatattctagttttttttcacatgactccctcggttccttggaagtgcaacacagcacttgcttgtttcaggtttttctctctcttttgcctctattctccacaaatgagaaccgatgctaagggcatgtacaatccacactgtatcttaagggatatatgagggtgtaaatgaaaaaaagaatgatatatgaggttttaaatgaaaaaaaaagaaacatatcttggttaaggaatgtctatgtcacagttttctaagtctaaggtacggttctacacttctacttatacaattcaaataaatgagttatcttttaagtgattctagtgaataagataaaaaaatttagatacattaggttgtatgaagagtttcttagatgtatctagtgcttggagaactataacatagtaattaagttgtacatgctctaggaacatgtttggctgagctataggataggttgtgctcggtagatcgtttatatggtcattgcactgtatattactctgtttaaaaaaatgaagtttgaaataggtggtgtggtggtaggtgggataggaagtctgctagagatagcctttatgaaaatgttggtgtgcattatggacttttaaaaattgttttgaagtctaagctatgagagaaagttaaaaatgtgtttaattaaacatttgatttttgataaacctgttgtaagtctctcttacgagcggaatccacatctcatccatagtcctcccaacttggggcaggattgagtgctgcagcagggcccattggcaggaccagtgaaaagggatctgggatatgctacacttacagctgcagcaaaggtgccttcgttggtgtttcactggaagggaatgtggtgacaactagaatggaaaccaatctccgcttctacggtgatgcataccagacggcaacccatatcctgtttgggagggtggagcggccccgagctgctcagcccttgtttgctagccgatttagggcttcttaagggtggattgaagatgattagagaggattaaatcgattgatagtcaaattaaatagaaagagagttaatccccctcaatccttttctatccgcatgcaaccgatccatgctttagatcattggatggtttcactactgacaccagtccacacattaaatattagcagagtatttagtgttagattattgtagaaattacgatttagacttgtttctaaatgaataattttatatataattagaagatcatgatcggttgagagatccaacgcacacaattgatcctttcttttttatatatctaatgctttcttttatcgtaatctcttttaacgttcctgctgtccttaatttgacaactagaatgacactctactagtcttcctggccgacctaggacaaccaggcgccgttctcgttctcacatgctacttgcggtcgattggttttgtggatgattgtttatcttctagagattagcatcagccagcatgacatttctctgctctgttctgtaatctgttccgctgacccgctccgctagcaggcaagccactgccgccgcaaactactagtacgatacaatagacgccaagcccagtgaagaagcagcgtcgatctgggcggatcgatcaagattgctcggaacaattcttggctgcttttatttattatttgcacttggttacaagtatcagtgtagactaaggccccgtttcaatctcacgggataaactttagcttcctg

SEQ ID NO: 212494 - DNA, 2547 bp, Zea Mays
aacaaatcgcggagcactcgccgtcgtccgtcaccgggctgtccaacctacgtcgactccggacgcatcgctcgccatacgatcagccctccgttcgctgtacgggctcgcgggttgcgaccctaatagctgactgattctaggcgccatgtcactgcccgtcgacgccgccatcatccagttcacccagatcctattctcccatgcgccagccggccccgtgggccgtgagtccgtgatccagcgtcccaggacccaggctcccagtaccagcctcttctatccggcatccagcgagcagcaaatccagagacctcgactcctcctaaccctagccgccaggctccagtgctccaccgctccagcagatcccggacccggaagcagcgaggaaacacagggcgaccaaggcccgtctggactctggatccgccggtccgccactccgcccctcatctccgacctgagcgcgccgccctgccccgccccgcctctccctcgagcgctgtccgcgcctccgcgcctccgcggtccgcgtccggccgtccgcccagggcccaggcagttgctgcctgctggcttgctgccgtccgccaggccgcctaggcacacagcacactacttctacagttctacggccagcgcccagcggtccagtccagcttccaaatggctagtgaggactcgaaagatatgctgaagaacgtggactggaagaccgtgggcggtgctgtgactactgaatctagccagccagttgtcaagaaacgccttccgaagaagatcagacaagtccctgagtgctattttctgcctcggcgatctttgccttctgcactggcaatctatggtgccgtgtgtgctgctggagttggtgcaggaatgctgatcgaggtgtggataaacaaaaagatcaaagaggatagtgctattatctgggagatggataaatgatgtgcagttctgcaccacactttgatatggtggaagcagtttcggcactgcgatatttgctagctctcaagttaagaattttgtttataggattccttcgtccgtttgttttattttgattgaggtattgccaagatggattcaagaacgttcatccgcagttcatttaccagaacacgagtaaaaactctggctgctgaaaatatagctccaccacaactctaaaataacttataatttgaaatcgaggaagtatttctgttatcatgctaaataaaatgttgtatattctagttttttttcacatgactccctcggttccttggaagtgcaacacagcacttgcttgtttcaggtttttctctctcttttgcctctattctccacaaatgagaaccgatgctaagggcatgtacaatccacactgtatcttaagggatatatgagggtgtaaatgaaaaaaagaatgatatatgaggttttaaatgaaaaaaaaagaaacatatcttggttaaggaatgtctatgtcacagttttctaagtctaaggtacggttctacacttctacttatacaattcaaataaatgagttatcttttaagtgattctagtgaataagataaaaaaatttagatacattaggttgtatgaagagtttcttagatgtatctagtgcttggagaactataacatagtaattaagttgtacatgctctaggaacatgtttggctgagctataggataggttgtgctcggtagatcgtttatatggtcattgcactgtatattactctgtttaaaaaaatgaagtttgaaataggtggtgtggtggtaggtgggataggaagtctgctagagatagcctttatgaaaatgttggtgtgcattatggacttttaaaaattgttttgaagtctaagctatgagagaaagttaaaaatgtgtttaattaaacatttgatttttgataaacctgttgtaagtctctcttacgagcggaatccacatctcatccatagtcctcccaacttggggcaggattgagtgctgcagcagggcccattggcaggaccagtgaaaagggatctgggatatgctacacttacagctgcagcaaaggtgccttcgttggtgtttcactggaagggaatgtggtgacaactagaatggaaaccaatctccgcttctacggtgatgcataccagacggcaaccctctactagtcttcctggccgacctaggacaaccaggcgccgttctcgttctcacatgctacttgcggtcgattggttttgtggatgattgtttatcttctagagattagcatcagccagcatgacatttctctgctctgttctgtaatctgttccgctgacccgctccgctagcaggcaagccactgccgccgcaaactactagtacgatacaatagacgccaagcccagtgaagaagcagcgtcgatctgggcggatcgatcaagattgctcggaacaattcttggctgcttttatttattatttgcacttggttacaagtatcagtgtagactaaggccccgtttcaatctcacgggataaactttagcttcctg

SEQ ID NO: 212495 - DNA, 1309 bp, Zea Mays
acttactttgatacggcccttcgttcttatccacatccccttttgccagccactgctcccgtcccacccgccacaccgtccaccggcacgtccaccggctcccatggcgctccacgccgtctcctccgcggcggtctcctccccgttgcgcgccctctcacgcagcctcccccagcgcccaggctgtggttgtttaccaaagcagtccgtcatgatttactccacaaaatttgcaagacctcaggctggaccggtggacttcgctggcaggcctctggttcttggacgctcggacaagagagcagttttgatgcatgccactattgaagaaatcgaagcggagaaatccctcatcgaagaccaagctaaagaaaagatggagaaggcaatcgaaacagtccaagctaacttcaacactgtgaggacaggacgtgcaaacccggccatgcttgaccggattgaggttgagtactacggaactccagtaaacttgaagagcattgcacagataagcactccagatgcaacttctcttcttattcaaccatatgataagtcaagcctcaagcttattgagaaaactatagttgctgcaaatcttggtgtgacaccaagcaatgatggagaagtaatacgagtgactgtcccaccattgacatctgatcgcagaaaggaattatcaaagacagtagctaaattagctgaagatggcaagtaagtgttttttttttgcaggttgctataaggaacataagaagagatgcaatcaaagcttatgataaactagagaaggaaaagaagctttctgaggacaatgtgaaagatttatcagctgatctacaaaaagtcacagatgagtacatgaaaaagatcgaatccatccagaagcagaaggaacaggaactgatgaaaatttagacctcaagctgactgtatggctggtgaggagtaaccgcctccgtgaagcatggacccctgcatatgttggtgtttctgaagcaatttgtttggttcatggctttggcgtctcggcgctgcgccagggatgcacgttttgaatcaggcgctttgctggaacttttgggtgcacacaagttgagactgctgctgctgctgtgtgtgtgttttgagattaagacaatgctgctgtgttttttctttgagattaagacaatgctgttgcgtgtgttcttctcgttttctgtaatgttcgtaaatagtctcttcgtcgccgtgttgtctgactgctacattgtcaatatttcaaaacatacgtctctgaatcaaatgtctggattggttctgccta

SEQ ID NO: 212496 - DNA, 4745 bp, Zea Mays
gctgcccctcaatacgtgagcctttcagactttatccctcagtacgtgagtcattcggctgctaccccaaatacgttttttcccttcaaaatttaccctttccagttttcttaagtacttttgctgttttctttttttccctctgacctcaaattaccaaattacccttcatgacctgaacgaagtctcagcattatttttccgtcttctcttaagttctcgtgttctgtctctatccatttgtttactcccgatccccatcagccatggcgataaaaagcacccagagaacaaatgagatagggattaactctgatgtcacatatacagtatgtgttcagtttggtcaattcattgctaaatttgatgacggtagttgtgttcttgtgccacacaaatacgatgaatgggttgtggattatcagcgatgctcactagcaagcttgcaaaaggactttgctgccagggtgaactggggcagcaaccaagaggtagaggtgtcagtatttgacaagagcatcaatctagaaacaaggctggagaatgattccgtattgcgtgcatttttcgacaggtgtgttgataggaggttgtacttgtttgctgatgtggtagataaatcggctcaggtgattagtaattctggtctcacagttgttagtcacagtggtgtggaaagtgcagcatatgcatgttcaaatagtcaactagaaagcgcatctaatgtgatatctccaaatgttgatgtaccttttgttgattgggatgctcttgagattgttcctattacagaagagctggttggttctatagttcccgttgttgatgaagacaatttttatgaacacattggtcttcgagccgaggatgagagagtagagaaaggcaaagatagactaccagatgaagttgcatgtgaaggtgcacttgatgttgaaggtgcagccataccttgtactgatacaataccgggtgaggatgctatcttttatgataaggaggaccctccaatgactgttggcagcacatatgcaagcatgaatgagttcagatcagcagtaagacaacatgctataaagggtcagtttgaggtgtggacaaggaaatctgatacatgtaggtttaggggttattgcatagctaagggttgcccatggtttattgtggcaagattaatgcatgatgagaagtctgttagggttactatgaacaattttgatcacttatgtgcttctaccggtagagtgaagaccagaatgacaacataccgttggatagcagagaagtcaatcccatttttgaagaaggatccaaatatgggcgcaaaaaagttacaagaggagctagaggataaatataatgtgaagctaggatactcaacagtgtgggctggtagacagaaggcggtggaacaaatatttggaacatgggaagaaagttttgcagatttgtataggttcaaggcagagattgacgcaaaaatgcctggaagtgttgtcgatttagagaccgtttttgagcgtagactccacagcgctcaatggcagatggaatgggcagttttctgaaaaggaagagtcacgccaaacaagggcgaccattaggatcagcaagtacttgcacgcccaaaaggcaaaaagttgtgcaaaacgagtcaactaatattagtccggggcctgttacaagaagccaatcggcgttatcaacgattggtgaaggctcaagccaggaaatggccacacccaaaaggcaacaagttgtgacaaatcaatcaactaatattagtcctgtccctgtcacaaggaggcaattggcattatcaatgctcgatgaaagcacaagtcaggaattggccacaccttcgagggcaaccaaatccccttccaagcctacatcaaggattgcaaggaagatcactccaagaaaattcaaaaagtgaatgtttttgtgtctacaaaactatgatattggatgcttttgtaatcttaattaattagaacggaggcatttggatgatattttggcatatgtatggattgttgacattaaacttgttattgtgcttgctgttatgcttctgtatgggattattgacatttggatgacatttgggcttaatatttaaatcaaacttgctattatgcttgaacgtggtgcacatgtgtgcacgttgctacaattttttaatgcatgagtttgtattttctaccatacctattcttctttttttacattttttattcgtaatgtcttttatactttgggcaaactctgattatactttgggcaaactctgatgtggatgaggaggaccaaacggcgcagctctaatgtgcacaagcagaagggtactttggtcatttgaggtcagagggaaaaaagaaaacagcaaaagtacttaagaaagctgaaaagggtaaattttgaagggaaaaacgtatttggggtagcagccgaatggctaacgtactaagggataaagtctgaaaggctaacgtattgaggggcagcagctgaaaattctctatattaggccccgattctgatgaggcccatatgtcccggcacgtaattacgagcacctcccagtccgacctgttcggatacggagcccacgaggccacgaacgaagccctaatcatccgctccaaactccccgcaccggcagagatcagccgtccacgagagcatcacggctagggtttccgatttcaactaggacccctggatctatgattctatgaaccagaggcgagacgagtggccgcagcatcaggaccgtctccaactcgccagtactcagccgccgcaatcagggacagggagctcgagcgcgcgccccacctgcgccgacgcgatgcgggccaaggttttcgccgtgggctgtgggtggccagaggcgacaatcccagcgaggtggtggcgttgggcgccgcatccgccttggccgtcttgctggccgccgctgcccctgccgcagggggaaggacgacacggaggagtccaggtacaaggccccgactgcaggtccctggttcaagcccaaacgaaacaaaatactcaaaccaactctcgccgccgccgccgatgacatcggaggagcatccctcgtctacgtcctcggacggcagcacgaccatcggctccgacgaacatcttgattccccgccatcaccttcgacgttcttcgactctcctcctgaatccgatgactccgccgcctcctcgctgctctcggacggctcttcagagtccgagcccatcattttcaagaaaccccgcccacccgtgcgctcgtggccggcctccgacgagatcgcgatcctcgagaccgtcgcgtcgcaccggcagaagcacgggcgacttcccctggcagacgacctcgccgccgcggtgcggggccgcctcagcgcgggggaccgcctcagcgccgcgcagatcaccaggcggctgtgcgcgctccgcaaccgggggaggatagagaagaagacccgtgtgcccgacgcgcgcaatgacccaagagggttcgacgatctggccgagctgtacccttgcctctccgcggaggtggaggcgattggtgcgaggtgcggctacggggcgctgaagagggcattcgggcgcatcggtgacgacacggcggcgcggctggaggcgaagctgaagaggcagcggatggcggagaccagggcgagcggaaagcttgaccggctgaggtcgagagtcgccaaggcgcttcagggatttaacaagtgaaatggtatagggacattctgttggctgtcatcgtttcatgctacttcaagttgtttcttttcacaatgatggtttgggagtttccatcatctgttatattcatcgttgaaatgtttgttttctagtcagtgggatgcatatatacattagtaacagtcttgttgttccgcagtttccaaaagcccattgtttcgtggtctgcttactagcgcatgcagcaaaatacttgacccagcgatggatccttggaacgacatgagcctactcgtccacatcatcctcgagcttcaagcacggccctaatcttcggatggactgttctggtgcttctagagacgtttaggtatattgtgccctgattgatgagccttgccatttcctacccagaaaaaaaaccaaattagagttgcttaatgattcaaacaaagctgcttaatcacgcaactgatttaatagtagggctttatataacgagaggggagaccatatgtctctaccaagatacttttcgtgtactcatgttacagtggtttggacttcatgctctaacaatattataaagtaagaccactgcttcacctgttttacatctcccctctcgggacaaaagaaattggattcttgtgtttttgcagataggaattaatttaggctccctttggaacaaaggaaagaatatagaaaacctactgcccctttggaaagtagaaatttcataacagtcgtgttgaattgatgattcagttttttttttgtaaaaataggggaaaaaatccatatgagcctccttggaacaaagggttggatttctacatatcctatacggtcttatataatagcttgctgcatagggggttagcagtaattctaatcccatgaacctcacgaaaagttttttttgtgtcactccctctcactgatttcctatttcttttctgttcgaacatatcaaagcggctgtggagaaaccatacttgcttaactcaaac

SEQ ID NO: 212497 - DNA, 3623 bp, Zea Mays
gctgcccctcaatacgtgagcctttcagactttatccctcagtacgtgagtcattcggctgctaccccaaatacgttttttcccttcaaaatttaccctttccagttttcttaagtacttttgctgttttctttttttccctctgacctcaaattaccaaattacccttcatgacctgaacgaagtctcagcattatttttccgtcttctcttaagttctcgtgttctgtctctatccatttgtttactcccgatccccatcagccatggcgataaaaagcacccagagaacaaatgagatagggattaactctgatgtcacatatacagtatgtgttcagtttggtcaattcattgctaaatttgatgacggtagttgtgttcttgtgccacacaaatacgatgaatgggttgtggattatcagcgatgctcactagcaagcttgcaaaaggactttgctgccagggtgaactggggcagcaaccaagaggtgtgttgataggaggttgtacttgtttgctgatgtggtagataaatcggctcagaagagctggttggttctatagttcccgttgttgatgaagacaatttttatgaacacattggtcttcgagccgaggatgagagagtagagaaaggcaaagatagactaccagatgaagttgcatgtgaaggtgcacttgatgttgaaggtgcagccataccttgtactgatacaataccgggtgaggatgctatcttttatgataaggaggaccctccaatgactgttggcagcacatatgcaagcatgaatgagttcagatcagcagtaagacaacatgctataaagggtcagtttgaggtgtggacaaggaaatctgatacatgtaggtttaggggttattgcatagctaagggttgcccatggtttattgtggcaagattaatgcatgatgagaagtctgttagggttactatgaacaattttgatcacttatgtgcttctaccggtagagtgaagaccagaatgacaacataccgttggatagcagagaagtcaatcccatttttgaagaaggatccaaatatgggcgcaaaaaagttacaagaggagctagaggataaatataatgtgaagctaggatactcaacagtgtgggctggtagacagaaggcggtggaacaaatatttggaacatgggaagaaagttttgcagatttgtataggttcaaggcagagattgacgcaaaaatgcctggaagtgttgtcgatttagaggtgcaggaggaagaggatgaccgtttttgagcgtagactccacagcgctcaatggcagatggaatgggcagttttctgaaaagagtcacgccaaacaagggcgaccattaggatcagcaagtacttgcacgcccaaaaggcaaaaagttgtgcaaaacgagtcaactaatattagtccggggcctgttacaagaagccaatcggcgttatcaacgattggtgaaggctcaagccaggaaatggccacacccaaaaggcaacaagttgtgacaaatcaatcaactaatattagtcctgtccctgtcacaaggaggcaattggcattatcaatgctcgatgaaagcacaagtcaggaattggccacaccttcgagggcaaccaaatccccttccaagcctacatcaaggattgcaaggaagatcactccaagaaaattcaaaaagtgaatgtttttgtgtctacaaaactatgatattggatgcttttgtaatcttaattaattagaacggaggcatttggatgatattttggcatatgtatggattgttgacattaaacttgttattgtgcttgctgttatgcttctgtatgggattattgacatttggatgacatttgggcttaatatttaaatcaaacttgctattatgcttgaacgtggtgcacatgtgtgcacgttgctacaattttttaatgcatgagtttgtattttctaccatacctattcttctttttttacattttttattcgtaatgtcttttatactttgggcaaactctgattatactttgggcaaactctgatgtggatgaggaggaccaaacggcgcagctctaatgtgcacaagcagaagggtactttggtcatttgaggtcagagggaaaaaagaaaacagcaaaagtacttaagaaagctgaaaagggtaaattttgaagggaaaaacgtatttggggtagcagccgaatggctaacgtactaagggataaagtctgaaaggctaacgtattgaggggcagcagctgaaaattctctatattaggccccgattctgatgaggcccatatgtcccggcacgtaattacgagcacctcccagtccgacctgttcggatacggagcccacgaggccacgaacgaagccctaatcatccgctccaaactccccgcaccggcagagatcagccgtccacgagagcatcacggctagggtttccgatttcaactaggacccctggatctatgattctatgaaccagaggcgagacgagtggccgcagcatcaggaccgtctccaactcgccagtactcagccgccgcaatcagggacagggagctcgagcgcgcgccccacctgcgccgacgcgatgcgggccaaggtatagggacattctgttggctgtcatcgtttcatgctacttcaagttgtttcttttcacaatgatggtttgggagtttccatcatctgttatattcatcgttgaaatgtttgttttctagtcagtgggatgcatatatacattagtaacagtcttgttgttccgcagtttccaaaagcccattgtttcgtggtctgcttactagcgcatgcagcaaaatacttgacccagcgatggatccttggaacgacatgagcctactcgtccacatcatcctcgagcttcaagcacggccctaatcttcggatggactgttctggtgcttctagagacgtttaggtatattgtgccctgattgatgagccttgccatttcctacccagaaaaaaaaccaaattagagttgcttaatgattcaaacaaagctgcttaatcacgcaactgatttaatagtagggctttatataacgagaggggagaccatatgtctctaccaagatacttttcgtgtactcatgttacagtggtttggacttcatgctctaacaatattataaagtaagaccactgcttcacctgttttacatctcccctctcgggacaaaagaaattggattcttgtgtttttgcagataggaattaatttaggctccctttggaacaaaggaaagaatatagaaaacctactgcccctttggaaagtagaaatttcataacagtcgtgttgaattgatgattcagttttttttttgtaaaaataggggaaaaaatccatatgagcctccttggaacaaagggttggatttctacatatcctatacggtcttatataatagcttgctgcatagggggttagcagtaattctaatcccatgaacctcacgaaaagttttttttgtgtcactccctctcactgatttcctatttcttttctgttcgaacatatcaaagcggctgtggagaaaccatacttgcttaactcaaac

SEQ ID NO: 212498 - DNA, 3147 bp, Zea Mays
ctgctaccccaaatacgttttttcccttcaaaatttaccctttccagttttcttaagtacttttgctgttttctttttttccctctgacctcaaattaccaaattacccttcatgacctgaacgaagtctcagcattatttttccgtcttctcttaagttctcgtgttctgtctctatccatttgtttactcccgatccccatcagccatggcgataaagtgagggttccaggcggccgccgcttcagggagggctcgcggcggagacaggctcggcgctcgcgcggtcggcaggagctcgcagcgggcaagggctggctctcgggcaggaggtgctcgcagcacggtgctggcaggggtggctcgtggcgcaggcaaggagaagctcacgacaggggcggctaagacttcggtgcgggcacagttgcaggttgcagcagccactcgttgaagatgtttccctctgacgtcgagttactatgaacaattttgatcacttatgtgcttctaccggtagagtgaagaccagaatgacaacataccgttggatagcagagaagtcaatcccatttttgaagaaggatccaaatatgggcgcaaaaaagttacaagaggagctagaggataaatataatgtgaagctaggatactcaacagtgtgggctggtagacagaaggcggtggaacaaatatttggaacatgggaagaaagttttgcagatttgtataggttcaaggcagagattgacgcaaaaatgcctggaagtgttgtcgatttagaggtgcaggaggaagaggatgaccgtttttgagcgtagactccacagcgctcaatggcagatggaatgggcagttttctgaaaaggaagagtcacgccaaacaagggcgaccattaggatcagcaagtacttgcacgcccaaaaggcaaaaagttgtgcaaaacgagtcaactaatattagtccggggcctgttacaagaagccaatcggcgttatcaacgattggtgaaggctcaagccaggaaatggccacacccaaaaggcaacaagttgtgacaaatcaatcaactaatattagtcctgtccctgtcacaaggaggcaattggcattatcaatgctcgatgaaagcacaagtcaggaattggccacaccttcgagggcaaccaaatccccttccaagcctacatcaaggattgcaaggaagatcactccaagaaaattcaaaaagtgaatgtttttgtgtctacaaaactatgatattggatgcttttgtaatcttaattaattagaacggaggcatttggatgatattttggcatatgtatggattgttgacattaaacttgttattgtgcttgctgttatgcttctgtatgggattattgacatttggatgacatttgggcttaatatttaaatcaaacttgctattatgcttgaacgtggtgcacatgtgtgcacgttgctacaattttttaatgcatgagtttgtattttctaccatacctattcttctttttttacattttttattcgtaatgtcttttatactttgggcaaactctgattatactttgggcaaactctgatgtggatgaggaggaccaaacggcgcagctctaatgtgcacaagcagaagggtactttggtcatttgaggtcagagggaaaaaagaaaacagcaaaagtacttaagaaagctgaaaagggtaaattttgaagggaaaaacgtatttggggtagcagccgaatggctaacgtactaagggataaagtctgaaaggctaacgtattgaggggcagcagctgaaaattctctatattaggccccgattctgatgaggcccatatgtcccggcacgtaattacgagcacctcccagtccgacctgttcggatacggagcccacgaggccacgaacgaagccctaatcatccgctccaaactccccgcaccggcagagatcagccgtccacgagagcatcacggctagggtttccgatttcaactaggacccctggatctatgattctatgaaccagaggcgagacgagtggccgcagcatcaggaccgtctccaactcgccagtactcagccgccgcaatcagggacagggagctcgagcgcgcgccccacctgcgccgacgcgatgcgggccaaggtatagggacattctgttggctgtcatcgtttcatgctacttcaagttgtttcttttcacaatgatggtttgggagtttccatcatctgttatattcatcgttgaaatgtttgttttctagtcagtgggatgcatatatacattagtaacagtcttgttgttccgcagtttccaaaagcccattgtttcgtggtctgcttactagcgcatgcagcaaaatacttgacccagcgatggatccttggaacgacatgagcctactcgtccacatcatcctcgagcttcaagcacggccctaatcttcggatggactgttctggtgcttctagagacgtttaggtatattgtgccctgattgatgagccttgccatttcctacccagaaaaaaaaccaaattagagttgcttaatgattcaaacaaagctgcttaatcacgcaactgatttaatagtagggctttatataacgagaggggagaccatatgtctctaccaagatacttttcgtgtactcatgttacagtggtttggacttcatgctctaacaatattataaagtaagaccactgcttcacctgttttacatctcccctctcgggacaaaagaaattggattcttgtgtttttgcagataggaattaatttaggctccctttggaacaaaggaaagaatatagaaaacctactgcccctttggaaagtagaaatttcataacagtcgtgttgaattgatgattcagttttttttttgtaaaaataggggaaaaaatccatatgagcctccttggaacaaagggttggatttctacatatcctatacggtcttatataatagcttgctgcatagggggttagcagtaattctaatcccatgaacctcacgaaaagttttttttgtgtcactccctctcactgatttcctatttcttttctgttcgaacatatcaaagcggctgtggagaaaccatacttgcttaactcaaac

SEQ ID NO: 212499 - DNA, 826 bp, Zea Mays
ttgtcatacctcttttggtgagagatgagcttgaacaattattggatgacgacgatgacatggctgatctttatttgtctagaaagttggctggggcatcttcccctgtcagtggttctggtggaccaaattggttccctgcctccccaactattggttcaaaaatatcaagagcaagcagagccagtgcagctactgtgcatggaaatgagaatgatgttgaagagctagagatgttgctggaggcatatttcatgcaagttgatggcacattaaacaaattgacaacgttgagagagtacatcgatgacacggaagattacatcaatatccagcttgataaccaccgtaatcagttgattcagctagagttattcttgagttctggtaccgtctgtctgtcgctgtactcattagttgctggagtctttggtatgaatattccgtatacctggaatgacggccacggatacatcttcaaatggggcttttttgtgcctttatatttgtctccattgttgcttacgcacgacacaaggggctcgtcggatcctgaatagctgaaataaccgcgtacttgcttccctcaactgtaaatttgagccagtgagcatcgactttgcggggtgattcatctgttgtaccaaattcggtagtatcaaattggggatgttgaataggaactgtaataggaaaaagttaatgcaaaagaaatatgttatgattgcccccggttttataaagtttgcaccgaaagattcaaacaaatatgttattaaccaggtgcctctttctgaaatgattttcatagctatgcacaagtcca

SEQ ID NO: 212500 - DNA, 3491 bp, Zea Mays
cgctgcccccgccgccgccgccgccgccgccgccgccgccgccgccgccactacagaggccgtccatcagccaggccgagcgagcccaacagcctcttcatcgcattcgctgcagcgcaggaaagggaaggaaaggaaaaggcagggcagtggtacgtgcgtgtatcgctgtatcacacacacgtacgcaggcctcgtgccggcgcgccattgcatcgcaccagccagcctgcctgcctgctctgagcagaggagacagccagacagggcagcgaaggaccgagaagctagcaacggcaacgagcagaggcccggcacttgcgctccgcttccccctccctccaccacctctccaggccgccagcccacgccaccactgaccacccgttgcctgtccgccgaccacgcctcgcgcgacctgaattctttctcgtcttccatcgtccctccgcgccccgccccgccccggccgggcctcttaatttaatctatccgcaccgccgcgccgccgccgccgcatcttatcgtatcgtgtacgatcgccatcgccgaccggagagcagcagcccaccatggagaggaagagcgtggtgatgtcggcgctggggatcgggatcggtgtcggcgtcggcctgggcctcgcgtccgcgccctgggccggcggcgcctcagcctccgcctccgccagggccgcgggggtcaccgtcgagagggtggagcaggacctccgccgcctcctcgccgacggcgccgacagcaaggtcaccttcgacgagttcccgtactacctcagtgagcaaacgcgtgttgtgctgaccagcgctgcgtacgttcacttgaaacaagcagagatttccaagtacaccaggaatcttgctcccgccagtcgtgcaatcctgctgtcaggtcccgcagatgctagccagagctcttgcccactattttcaagcaaagttgctcttgctagatcctactgatttccttataaagatccataacaaatatggcacaggtggcggcacagagaagacatttaaaagatcaatctccgagacgacgcttgaacgtgtgtcgggattgtttggatctctttcaattcttccacaaaaggaacagcccaaaggaactatacgtagacaaagcagcatgacggatgtcaaattaaggagctctgaaagtacaagcaacttgccaaagcttagaagaaatgcatctagttcctctgatatgagtagcatggcttcacaaggtccttcaactaatacagctcctcttagacgcacaagcagttggacttttgatgacaaaattttagtacaagcgttatacaaggttcttctttcagtatcaaagagctaccctattgtactctatataagagatgtcgagaagttccttcacaagtccccaaaaatgtatctcctgtttgaaaaactattaaacaaacttgatggaccggtgttagtccttggatcaaggattgtagatatggagagtgatgaggagttggactacagattgactgttctgttcccatataatatagaaatcaagccacctgaaaacgaaaaccaccttgtaagttggaaatcccaattagaagaagacatgaagatgattcagtttcaagataaccgaaatcatattatggaagtccttgcagaaaatgatcttgaatgtgacgatttaggctcgatttgcctatctgatactatgtgccttagtaagtatatcgaggagattgtggtgtctgcggtttcatatcacttgatgaataacaaagatccagattaccgaaatgggaaattagttctatccacaaagagtttgtcccatgcgtcggaaatttttcaaggcaacaagatgactgataaggacagcatgaaattggaagtgacagatggcaccttaaaggcttctgaaaaggcaattgctccaaccactgcaaaatcagaaacaaaacctgcatcatcgctgccacctgttcgacccccagctgctggtgcccctgctccaagggttgaaagcaaaacagaactggagaagaaggataatccacctccatctgcaaaagtcccggaagggacagcagataatgagtttgaaaagcgtattagaccagaagtgatacctgcaaatgagattggagtttcatttgatgatattggtgccttggatgatatcaaagaatcccttcatgagcttgtcatgctgcctctgagacgacctgacctcttcaaaggtggtcttcttaagccctgcagaggtatattactctttggtcctccaggaaccggcaagactatgcttgccaaggctatagccaatgaagctcaagcaagttttataaatgtctctatgtcaactatcacatcaaagtggtttggtgaagatgagaagaatgttcgagcactgttcacgttagctgctaaagtatcaccaaccatcattttcgtcgatgaagttgatagcatgcttgggcagcgtaacagagctggagagcacgaggcaatgaggaagatcaagaatgaatttatgacacactgggatggcctcttgtcaaggtcggaccagagaattcttgttcttgctgcgaccaacaggccttttgatcttgatgaggctattatccgtaggttcgagcgaagaatcatggtaggtctgccatcaatggaaagccgggaactcataatgcggcgacttctgtcaaaggagaaagttgatgaaaggctgaacttcaaggagctagcaaccatgacagaaggatatagtggaagtgatctcaagaacctgtgcacgacggcagcatatcgccctgtgagggagctaatccagaaggaaagaaagaaggagctggagaagctgaagcgtgaaaaaggcgagactccatcggatcttccaaagaagaaggaagagaccatcaccctaaggccgctgagcatgacagatctgaaggaagcaaagaaccaggtggctgcaagtttcgcttccgaaggtgtctgcatgagcgagctgaggcaatggaacgagttgtatggtgaaggaggctccagaaagaaggaacaattaacatacttcctctgaacaatatgaaaatctatggaccatcacacgcaaaaatgtatggacattttggaaagtatagtgcacaaaatagtcatgaggaaataggccgaacatgtataagaacatgggaaacggggggagtgttaaaaggacaggctcccagggtgtgtcggaggctcccacgccagtgggcacaagaaatcaggtcataaaagccactttctggtgtaggacaaggaagaagagttttatctccacctaaatcccagtttgcctgtgctgtaagtattacactaaaaatgggtgtatgtataaactggtaggttgtggctactggttagcagcgaaaggttcaggtagcagtttttaatcatttttcatgttaccatggtgaggccgactccagcagtcgggtgggcaaagca

SEQ ID NO: 212501 - DNA, 3577 bp, Zea Mays
cgctgcccccgccgccgccgccgccgccgccgccgccgccgccgccgccactacagaggccgtccatcagccaggccgagcgagcccaacagcctcttcatcgcattcgctgcagcgcaggaaagggaaggaaaggaaaaggcagggcagtggtacgtgcgtgtatcgctgtatcacacacacgtacgcaggcctcgtgccggcgcgccattgcatcgcaccagccagcctgcctgcctgctctgagcagaggagacagccagacagggcagcgaaggaccgagaagctagcaacggcaacgagcagaggcccggcacttgcgctccgcttccccctccctccaccacctctccaggccgccagcccacgccaccactgaccacccgttgcctgtccgccgaccacgcctcgcgcgacctgaattctttctcgtcttccatcgtccctccgcgccccgccccgccccggccgggcctcttaatttaatctatccgcaccgccgcgccgccgccgccgcatcttatcgtatcgtgtacgatcgccatcgccgaccggagagcagcagcccaccatggagaggaagagcgtggtgatgtcggcgctggggatcgggatcggtgtcggcgtcggcctgggcctcgcgtccgcgccctgggccggcggcgcctcagcctccgcctccgccagggccgcgggggtcaccgtcgagagggtggagcaggacctccgccgcctcctcgccgacggcgccgacagcaaggtcaccttcgacgagttcccgtactacctcagtgagcaaacgcgtgttgtgctgaccagcgctgcgtacgttcacttgaaacaagcagagatttccaagtacaccaggaatcttgctcccgccagtcgtgcaatcctgctgtcaggtcccgcagagctctaccaacagatgctagccagagctcttgcccactattttcaagcaaagttgctcttgctagatcctactgatttccttataaagatccataacaaatatggcacaggtggcggcacagagaagacatttaaaagatcaatctccgagacgacgcttgaacgtgtgtcgggattgtttggatctctttcaattcttccacaaaaggaacagcccaaaggaactatacgtagacaaagcagcatgacggatgtcaaattaaggagctctgaaagtacaagcaacttgccaaagcttagaagaaatgcatctagttcctctgatatgagtagcatggcttcacaaggtccttcaactaatacagctcctcttagacgcacaagcagttggacttttgatgacaaaattttagtacaagcgttatacaaggttcttctttcagtatcaaagagctaccctattgtactctatataagagatgtcgagaagttccttcacaagtccccaaaaatgtatctcctgtttgaaaaactattaaacaaacttgatggaccggtgttagtccttggatcaaggattgtagatatggagagtgatgaggagttggactacagattgactgttctgttcccatataatatagaaatcaagccacctgaaaacgaaaaccaccttgtaagttggaaatcccaattagaagaagacatgaagatgattcagtttcaagataaccgaaatcatattatggaagtccttgcagaaaatgatcttgaatgtgacgatttaggctcgatttgcctatctgatactatgtgccttagtaagtatatcgaggagattgtggtgtctgcggtttcatatcacttgatgaataacaaagatccagattaccgaaatgggaaattagttctatccacaaagagtttgtcccatgcgtcggaaatttttcaaggcaacaagatgactgataaggacagcatgaaattggaagtgacagatggcaccttaaaggatttctcatttcacttgtctcggaagcatttacaaatgtatgtattcacataccatacaccaaatacataggcttctgaaaaggcaattgctccaaccactgcaaaatcagaaacaaaacctgcatcatcgctgccacctgttcgacccccagctgctggtgcccctgctccaagggttgaaagcaaaacagaactggagaagaaggataatccacctccatctgcaaaagtcccggaagggacagcagataatgagtttgaaaagcgtattagaccagaagtgatacctgcaaatgagattggagtttcatttgatgatattggtgccttggatgatatcaaagaatcccttcatgagcttgtcatgctgcctctgagacgacctgacctcttcaaaggtggtcttcttaagccctgcagaggtatattactctttggtcctccaggaaccggcaagactatgcttgccaaggctatagccaatgaagctcaagcaagttttataaatgtctctatgtcaactatcacatcaaagtggtttggtgaagatgagaagaatgttcgagcactgttcacgttagctgctaaagtatcaccaaccatcattttcgtcgatgaagttgatagcatgcttgggcagcgtaacagagctggagagcacgaggcaatgaggaagatcaagaatgaatttatgacacactgggatggcctcttgtcaaggtcggaccagagaattcttgttcttgctgcgaccaacaggccttttgatcttgatgaggctattatccgtaggttcgagcgaagaatcatggtaggtctgccatcaatggaaagccgggaactcataatgcggcgacttctgtcaaaggagaaagttgatgaaaggctgaacttcaaggagctagcaaccatgacagaaggatatagtggaagtgatctcaagaacctgtgcacgacggcagcatatcgccctgtgagggagctaatccagaaggaaagaaagaaggagctggagaagctgaagcgtgaaaaaggcgagactccatcggatcttccaaagaagaaggaagagaccatcaccctaaggccgctgagcatgacagatctgaaggaagcaaagaaccaggtggctgcaagtttcgcttccgaaggtgtctgcatgagcgagctgaggcaatggaacgagttgtatggtgaaggaggctccagaaagaaggaacaattaacatacttcctctgaacaatatgaaaatctatggaccatcacacgcaaaaatgtatggacattttggaaagtatagtgcacaaaatagtcatgaggaaataggccgaacatgtataagaacatgggaaacggggggagtgttaaaaggacaggctcccagggtgtgtcggaggctcccacgccagtgggcacaagaaatcaggtcataaaagccactttctggtgtaggacaaggaagaagagttttatctccacctaaatcccagtttgcctgtgctgtaagtattacactaaaaatgggtgtatgtataaactggtaggttgtggctactggttagcagcgaaaggttcaggtagcagtttttaatcatttttcatgttaccatggtgaggccgactccagcagtcgggtgggcaaagca

SEQ ID NO: 212502 - DNA, 2976 bp, Zea Mays
cgtatcgtgtacgatcgccatcgccgaccggagagcagcagcccaccatggagaggaagagcgtggtgatgtcggcgctggggatcgggatcggtgtcggcgtcggcctgggcctcgcgtccgcgccctgggccggcggcgcctcagcctccgcctccgccagggccgcgggggtcaccgtcgagagggtggagcaggacctccgccgcctcctcgccgacggcgccgacagcaaggtcaccttcgacgagttcccgtactacctcagtgagcaaacgcgtgttgtgctgaccagcgctgcgtacgttcacttgaaacaagcagagatttccaagtacaccaggaatcttgctcccgccagtcgtgcaatcctgctgtcaggtcccgcagagctctaccaacagatgctagccagagctcttgcccactattttcaagcaaagttgctcttgctagatcctactgatttccttataaagatccataacaaatatggcacaggtggcggcacagagaagacatttaaaagatcaatctccgagacgacgcttgaacgtgtgtcgggattgtttggatctctttcaattcttccacaaaaggaacagcccaaaggaactatacgtagacaaagcagcatgacggatgtcaaattaaggagctctgaaagtacaagcaacttgccaaagcttagaagaaatgcatctagttcctctgatatgagtagcatggcttcacaaggtccttcaactaatacagctcctcttagacgcacaagcagttggacttttgatgacaaaattttagtacaagcgttatacaaggttcttctttcagtatcaaagagctaccctattgtactctatataagagatgtcgagaagttccttcacaagtccccaaaaatgtatctcctgtttgaaaaactattaaacaaacttgatggaccggtgttagtccttggatcaaggattgtagatatggagagtgatgaggagttggactacagattgactgttctgttcccatataatatagaaatcaagccacctgaaaacgaaaaccaccttgtaagttggaaatcccaattagaagaagacatgaagatgattcagtttcaagataaccgaaatcatattatggaagtccttgcagaaaatgatcttgaatgtgacgatttaggctcgatttgcctatctgatactatgtgccttagtaagtatatcgaggagattgtggtgtctgcggtttcatatcacttgatgaataacaaagatccagattaccgaaatgggaaattagttctatccacaaagagtttgtcccatgcgtcggaaatttttcaaggcaacaagatgactgataaggacagcatgaaattggaagtgacagatggcaccttaaaggcttctgaaaaggcaattgctccaaccactgcaaaatcagaaacaaaacctgcatcatcgctgccacctgttcgacccccagctgctggtgcccctgctccaagggttgaaagcaaaacagaactggagaagaaggataatccacctccatctgcaaaagtcccgggacagcagataatgagtttgaaaagcgtattagaccagaagtgatacctgcaaatgagattggagtttcatttgatgatattggtgccttggatgatatcaaagaatcccttcatgagcttgtcatgctgcctctgagacgacctgacctcttcaaaggtggtcttcttaagccctgcagaggtatattactctttggtcctccaggaaccggcaagactatgcttgccaaggctatagccaatgaagctcaagcaagttttataaatgtctctatgtcaactatcacatcaaagtggtttggtgaagatgagaagaatgttcgagcactgttcacgttagctgctaaagtatcaccaaccatcattttcgtcgatgaagttgatagcatgcttgggcagcgtaacagagctggagagcacgaggcaatgaggaagatcaagaatgaatttatgacacactgggatggcctcttgtcaaggtcggaccagagaattcttgttcttgctgcgaccaacaggccttttgatcttgatgaggctattatccgtaggttcgagcgaagaatcatggtaggtctgccatcaatggaaagccgggaactcataatgcggcgacttctgtcaaaggagaaagttgatgaaaggctgaacttcaaggagctagcaaccatgacagaaggatatagtggaagtgatctcaagaacctgtgcacgacggcagcatatcgccctgtgagggagctaatccagaaggaaagaaagaaggagctggagaagctgaagcgtgaaaaaggcgagactccatcggatcttccaaagaagaaggaagagaccatcaccctaaggccgctgagcatgacagatctgaaggaagcaaagaaccaggtggctgcaagtttcgcttccgaaggtgtctgcatgagcgagctgaggcaatggaacgagttgtatggtgaaggaggctccagaaagaaggaacaattaacatacttcctctgaacaatatgaaaatctatggaccatcacacgcaaaaatgtatggacattttggaaagtatagtgcacaaaatagtcatgaggaaataggccgaacatgtataagaacatgggaaacggggggagtgttaaaaggacaggctcccagggtgtgtcggaggctcccacgccagtgggcacaagaaatcaggtcataaaagccactttctggtgtaggacaaggaagaagagttttatctccacctaaatcccagtttgcctgtgctgtaagtattacactaaaaatgggtgtatgtataaactggtaggttgtggctactggttagcagcgaaaggttcaggtagcagtttttaatcatttttcatgttaccatggtgaggccgactccagcagtcgggtgggcaaagca

SEQ ID NO: 212503 - DNA, 888 bp, Zea Mays
aataccacaggtcgcactccaatggatgtaagtacaactgctcaggagatatctaacactgatgttactgttttggaaggacacagttcagaggtttttgcttgtgcatggagcccatctggttctcttctagcttctgggtcaggggactcaactgctagaatctggacaattccagatggtccatgtggttccaacatgcaatcatctcctcctggtgttcatgttttgaaacattttaaaggtcggaccaatgaaaagagtaaggatgtcaccacacttgactggaatggtgaaggtacactgctggctacaggctcctatgatggacaggcaagaatatggagtagagatggagacctgaagcagacattgttcaaacacaagggacccatattttcattgaaatggaataagaaaggagattttctcctaagtggaagtgttgataaaactgctattgtttgggatacaaagacatgggaatgcaaacagcagtttgaatttcattcagctccaacactagatgttgattggagaaataataactcttttgcaacatgttcaaccgataacatgatctatgtttgcaagattggggaacagcgtccggttaaagcattcagtggccatcagagtgaagttaatgctatcaagtgggatccgactggttctcttttggcttcatgttctgatgattggacagcaaagatatggagtatgaagcaagacaaatgtgtatttgatttcaaggagcataccaaggaaatatacactattcggtggagcccaacaggcccaggaacaaacaatcctaatcagcagttgcttttggccaggctaggtgtccaggccacggaggagatggagcaggccagcaaggacgcg

SEQ ID NO: 212504 - DNA, 4395 bp, Zea Mays
aaagaaatacgaagcctgagcctctcagccagcaccccccaggcgaaaagggaacgaacgggggcggagaggaaaaaagggggtttggtttttattggctgcacacaatggcagcagcgatccgaacccaatccccatctccgcagcgcgtgggtaataatcccagttcgagcagtcgccacacgcccgttgctgctgttcctggcttgcggcttcgccaatctccgccacacccctatcctttcccttcttcgtcgcctcacccaccaccccatccgctgcggcggtgttcgtggtgttcaagtaattgtttttggtggtgtcattattccttttcctcctcccagttcaagccatcggtgctgggtattcttcgccacggggatccagccgcacatcgattctcctttttccaccccctcgctccgcgacgcggggtataatagcgactgcgaggcatttggtgcgggcagacgctacgaggtggggtgagaaaagtttctgcgccttgctttgcagaaggtgctcggatctaggtttcaaggccgtcgatcgccgccatggacgccggcggggacgaggacggcgccgggaaggcggcgctggagagcactgccgaggccgcgaccctgccaccggcgtcaacagtggcggtcccgtccccggtcccggcttctgcgcctggggcggccacggggacctcagggtcgggggagaagccggtgaagcggatgatgaagaccccctaccagctcgaggttctggagaagacctatgcggtggagcagtacccgtcggaagctatgcggctggagctgtcggcgaagatagggctgtcggacaggcagctgcaaatgtggttctgccaccgccgcctcaaggaccgcaagccaccgtccaagcggcaacggcgggaggaagagtccgcgctagtaccagtgatgcctccaccgccagtgttaccagcacctgtgatgcctctggcaagcagtgaccttgtggtgggtgctcctgggccgtatgatgagccgctgcacccacttcactcgcgaaggggtgctgggcgtgggcggtcctcagcagtccccaggatttccatgccggatattgggaggaggtattacgagccaccaccaattatgatagcgccgcctatcccgtcgatgcagctcacgcaatatgagctccgtgtgattaattctgtggagtcacagctcggggaaccattgagggaggatggtccagcgcttggcgttaattttgatccccttcctcctggcgcctttggtgcaccgattgttccagagcaacaaaagcagcctgtgcgatcttatgatgcggagatattttcttggcatgatcaaaaactcttaaaggcttcagcatttttacctaatatggaatccccatttgttccaaattcgtttactgggaagagaaaatcaccagttggtaattcagccatagttcaacctcatgttggatcacgggctgttcatgagtatcagttccttcctgagcaaccaagtgatacatatgagagggcaacccgatctcactactatgacactccagtggaagtttcaaatgctaggataccttctatcacatcaggatcacaacttctccatggatctgaggaggctgcgcctagttatgcttttcaaggtcacacatctggttctagcctgttgcctccgtccagcaggccccaagtgtttccagcagcaccaacagattatgagatgactcagtctaatagcaaccttagttctgttcctgttgaaggacagtttgatatttctcaggttgctgcatttgaaaacccacctgtatcatctgaaataatagcttatcatgatgaagatacttctcgcgtggaaagaaaacgaaaacatagtgaagaagcaaagattgcaaaggaagttgaagctcacgaaagacgaattaggaaggagcttgagaaacaagatatgttgaataaaaagagagaggagcaaaggcgcaaggaaatggagagacttgatcgtgagagaagaaaagaggaggagagattactgcgtgagaggcagcgagaagaagagaggttccaaagagagcaaaggcgcgaacatgagcgtatggagaagtttttgcagaagcaatctagacgagcagagaaacaaaggcaaaaggaggaactccgaaaagaaaaagaagcagcaaggcaaaaggctgccaatgaaagggctactgcacgtaggattgcacgggagtatatggaactggtggaagatgagcgtttggaatcaatggaattagctgctcaaaacaaagggttgccctcaatgctgtatcttgacagcgacacattgcagcagcttgattcctttcgaggcatgctaagtcaatttcctcctacaacggtgagaatgaagttgccattttctataaagccttggactggatccgaggataacgttggaaaccttttgatgtattcatataatttcatctcaggagacattttgctaactggattgcaggtgtggaaattcttaattactttcactgatgttctgggtctttgtccagttacacttgatgagtttgttcagtctcttcatgattatgattcaaggttgttgggggaactgcatattgctctgctgagatccattataaaggatattgaggatgttgctagaactccatcaattgcactgggggtgaatccaggaggtggccatccacaaattgttgaaggggcatatgcctggggattcaatatacgtagctggcaacgccatcttaatcttcttacatggcctgagatattaagacagtttgctttatctgctggttttggacctcaattaaagaaaaggaccgtagaagattcttactatcgtaatgataatgagggtcatgatggtgagaatgttatattgacgattcgaaatggtacagcagcagtgaatgctgctgctaagatgaaagaaagaggttacaccaatcgccgtagatcccgccaccgtctcactcctggaactgtaaaatttgccgctttccacgtgctttcgcttgaagggagcaatggtctcacaatattggaagtagcagaaaaaattcagaaatctggattgagagacctcacaacaagcaagacacctgaggcatccatagctgctgccttgtctagggatacaaagctttttgagagaactgctccttcaacatattgtgtgaagtcgccttatagaaaagatccggctgattctgaggctgtgttgtcagcagcgcgtgaaagaattagggcttttcagaatgtgctttctgactctgaagctgaaaaggaggtagatgaagctgagagggatgatgattctgactgcgatgatggtgatgatgaccctgatggtgatgatgtgaatactgaggtggaagacgacaaggatcctcttcttgctgtcaagtcacaagatgaagtaccgagtacaactacagttattggcataaaggccaatttagatggtgtgggtaatgcattgaactcatcaagtagttttactaaatcagcaaaaggcgctcctctcccttctttaggcaggtccaatgcagcagatacttctaatgatttgcctcttggagtctcatcagctaatcatgaagtagtacctgatgattctgaaaatacacaaattgatgaaagcaatcaagccgagccttgggtacgtgcactagcagaaggtgactactgtgaccttagtgttgaagaacgccttaacgcactggttgctcttgttggtgttgccactgaagggaactctattcgtgctgtacttgaggagcgtttggagttagcaaatgccttaaagaagcaaatgtgggcagaagcgcaacttgacaagaggcgtttcaaggaagaatttactagcagagtacaatataactctgacatgggtttgaagcctgatatatatcaagaaaacaacgtgacagagattacttcaactccagcgtgtgatgcttatagagagaatgatgaacatgtcgggacaatcaacaattgtgagatgcttgatcagcataatcagggtaatgctggtagtctaccttatgagagaaatggcgtatgccaggaaatcctcgcaaccccagatacttcgtatgttcagcagtatgcttatgctgataaaaggcgatctcagttgaaatcgtacattggtcaccgggcagagcagctttatgtttacagatccttgcccctaggtcaggatcggcggcgaaacaggtattggcagtttacaacttcagcatcaccaaatgaccctggctcaggaagaatcttttttgaatccaaagatggatattggagagttatcgactcagaggaggatcaatgctacagagaga

SEQ ID NO: 212505 - DNA, 723 bp, Zea Mays
gtctgtattatttattggttaaaattgttggctaaattatttgtcaaaagtcaagactgttaaagtttgttgatctacatttgtgcgttgtaatctattctggattgggcaaaatccaaaatgcatgctatgtagcataataatgcatagaaaccccaagggtattaaataacttacatgtacaccccttaatttttttcttgtctaggattataagtacgttgtccagctgtggcaccaagtcgtagctcactgtcttgtcctggttctgctatattttctctttgttgcaggcggtatcataaactgattttttgtggttcagttagacgagagcgatgaagagcaacttttgtgaactagagtttcagatgctaccatggtgacttttttctgggatggagctcatatttgcagtattcggtggtttattaaattcagatatggcacatatgataatgatcagagtggtttctgaacatacgaagtagccgcccaagagctttcaacctgccaagtttcagagctagtgctgttacatcgttggcaatgccacaacattttttcacatacatttatttcccaatgcgttgtccttaatgccatgtccttatgtagcagttcatgaacaagattggaaggatataagcactcaacgaccttcgtcgacagagctgaatgcacggttcaccgggcaatgcatagttcgtttgagcacttgag

SEQ ID NO: 212506 - DNA, 1814 bp, Zea Mays
cttgtgattactgaaggatacattaagtctgtattatttattggttaaaattgttggctaaattatttgtcaaaagtcaagactgttaaagtttgttgatctacatttgtgcgttgtaatctattctggattgggcaaaatccaaaatgcatgctatgtagcataataatgcatagaaaccccaagggtattaaataacttacatgtacaccccttaatttttttcttgtctaggattataagtacgttgtccagctgtggcaccaagtcgtagctcactgtcttgtcctggttctgctatattttctctttgttgcaggcggtatcataaactgattttttgtggttcagttagacgagagcgatgaagagcaacttttgtgaactagagtttcagatgctaccatggtagtatttgacgatcaaaccctttttattagtagtttacttatgttgttttttacttcctgttctgagaagatgaattttgaatggtgatgaacaactgtgttttggactagagtttctgatactagtggtagttgaagaccaaaccgttaactgtctgaactcaaatctatcgagcgggcaatacctgacattttagatgatttttttttattaaatgcgtccattaccaattctgaaggaagactctgttcctctttgtataatggctcggacgccacatggtattctaaaatagttgtgtggttatatcctgattggttgcgttcttttatggcaatccaatcctggaaaggccgcatatattccatcgcatgcaaaactgataatttttccacgtttttttggtaataccttgaagtgatagtgcctgacctgcttgatcgtgtatcatgatatttcttttatatcggatacgatgatctgatagattccttatcttttttctcgtatgagttgtctaaaaagaggtgggtgacgataacaaagtaaaatacagccaatgttgcagaacaggccaacttttgcctattatattttggtatctcttaactagtggtgcgaggccaattgttcacttgttaatttaactaactaattttaaatgttggttggtttggtatcttggtaatattttggtatctctgaactaattttaaatgttgttagggtatattttgtttacccttgtaattgatgtgttaatgttgtttgtttcgaggtttctcttgaatgtaatcatcactggtaacattgtgtcttgagaggcaacaaattagagtctttgatgggcttctttctgtagctcattcagcgctttacgttgccaatagcaagcttggaataagttatcatgcattcactgtcttctcgaacagtgtgtgcatccccatgtccaacattcctcactttgcttaaacgctttgcaaaatttcttctgttgatgtgtgtttggcttgtatgtgactataaataacaactgccttactgcaggtgacttttttctgggatggagctcatatttgcaggtgattgattcatcttggggctgagattgaaataggatatggcacatatgataatgatcagagtggtttctgaacatacgaagtagccgcccaagagctttcaacctgccaagtttcagagctagtgctgttacatcgttggcaatgccacaacattttttcacatacatttatttcccaatgcgttgtccttaatgccatgtccttatgtagcagttcatgaacaagattggaaggatataagcactcaacgaccttcgtcgacagagctgaatgcacggttcaccgggcaatgcatagttcgtttgagcacttgag

SEQ ID NO: 212507 - DNA, 476 bp, Zea Mays
cctgactactgttaccttttgtagaatttataaggcggtatcataaactgattttttgtggttcagttagacgagagcgatgaagagcaacttttgtgaactagagtttcagatgctaccatggtgacttttttctgggatggagctcatatttgcaggtgattgattcatcttggggctgagattgaaataggatatggcacatatgataatgatcagagtggtttctgaacatacgaagtagccgcccaagagctttcaacctgccaagtttcagagctagtgctgttacatcgttggcaatgccacaacattttttcacatacatttatttcccaatgcgttgtccttaatgccatgtccttatgtagcagttcatgaacaagattggaaggatataagcactcaacgaccttcgtcgacagagctgaatgcacggttcaccgggcaatgcatagttcgtttgagcacttgag

SEQ ID NO: 212508 - DNA, 534 bp, Zea Mays
ctttatagtaatcactggaattatttcctagttagacgagagcgatgaagagcaacttttgtgaactagagtttcagatgctaccatggtgacttttttctgggatggagctcatatttgcaggtgattgattcatcttggggctgagattgaaatagggtatttcagtgattcaaaataattcttggtgtacatcatcattagttttgtattgttttatttacacagtattcggtggtttattaaattcagatatggcacatatgataatgatcagagtggtttctgaacatacgaagtagccgcccaagagctttcaacctgccaagtttcagagctagtgctgttacatcgttggcaatgccacaacattttttcacatacatttatttcccaatgcgttgtccttaatgccatgtccttatgtagcagttcatgaacaagattggaaggatataagcactcaacgaccttcgtcgacagagctgaatgcacggttcaccgggcaatgcatagttcgtttgagcacttgag

SEQ ID NO: 212509 - DNA, 3451 bp, Zea Mays
tataaaacagccgacctgtgctccattttgctatctagggtttcaagccgccgccgccaccaccgcctcacccaagctttcatttgtcatgctggttgcccccgccttatcgtgtaatgccatgttgcccccgcatcatcatctaagatttcgtttgtcgtccgcgctgcagtctgcttcccgtttcactcttatatttttttgttggacggagttgttttgcatcgtttcgatctgtaccgtactgtttcccctcttgttcataacggcggcgacacaaattcttgcgtgctgcgccgctcacgcaaggagggataaatcgactcgtcaagaaatcgtttcagttgccatgactccagtaggcaatatgattgttgcttgactacagttttgtcttccactacttagcttatttgtttgttttattcttacctcgcccgtattttctttgttttattcttacctcgctcccgattttaagatctaatttggtatctgcacggtgcttaccccgggcttgtcggatgtacttgaagaaggaagccccaatgtctgtgctagatccactatgccattcagtgttgcaggccctgatgaattttgtgattggtctgtgtcaaagcaatggatacaaattttcgtaatagaccatttctttattatgtttggtttgatgattcgtttgattgattgatggcagtgatttgacattacccgcgcttctgatctaacccgtgaagcaaagggaaaattaatggttgaatttcttaatatgagccatctagtgatctttcagctgtctccttttattttgtgcgtgagctcatttcattcatgtggttgatttggcggtgatgatacaaccattcagcttacaacgccagttctgcttctgataagtcatgacagataaagctgattcatatctgagccttgatttgtgtcatgttctgacaaactcataattaggatcatgcattttttcttgctccaaaccttacatcccgttggccactgaagtcaacccaatgtttcgaggctacaatcggctccaactacatgcttgtcaggtagaacctacttggagctgctgccctcgcatgacgagtcttgacaatcctgtggccctctacgcagcgtcgaaatgcgttttagtttataataatgctgtgttttagttatttctctcctaataattatactgagtggatctgtgccgagttcaactatccttgcactagtgctctctgatttgtgttgaggctgaagaactcggatagtttgtgttgtcatcagcttcggctctgtactgtgagttgggagttaaataacagcacgagattgttaacatctgtgagtttaaaccacatttttttttgccttttttatgcaacataattatttttaaggctttagaacaaggagttcaaccagtagttttgtctccctttgcatgtagctgatgctcacgccctgtgttgactattgtgcttataacaggactggcaattttgctttgagtctttatagtaatcactggaattatttcctaggttggcctgactactgttaccttttgtagaatttataaggtgcagttacacttgccacctcaattctcacacgttcactatttatttagtttaaattatattgtttatggttattataaacttgtgattactgaaggatacattaagtctgtattatttattggttaaaattgttggctaaattatttgtcaaaagtcaagactgttaaagtttgttgatctacatttgtgcgttgtaatctattctggattgggcaaaatccaaaatgcatgctatgtagcataataatgcatagaaaccccaagggtattaaataacttacatgtacaccccttaatttttttcttgtctaggattataagtacgttgtccagctgtggcaccaagtcgtagctcactgtcttgtcctggttctgctatattttctctttgttgcaggcggtatcataaactgattttttgtggttcagttagacgagagcgatgaagagcaacttttgtgaactagagtttcagatgctaccatggtagtatttgacgatcaaaccctttttattagtagtttacttatgttgttttttacttcctgttctgagaagatgaattttgaatggtgatgaacaactgtgttttggactagagtttctgatactagtggtagttgaagaccaaaccgttaactgtctgaactcaaatctatcgagcgggcaatacctgacattttagatgatttttttttattaaatgcgtccattaccaattctgaaggaagactctgttcctctttgtataatggctcggacgccacatggtattctaaaatagttgtgtggttatatcctgattggttgcgttcttttatggcaatccaatcctggaaaggccgcatatattccatcgcatgcaaaactgataatttttccacgtttttttggtaataccttgaagtgatagtgcctgacctgcttgatcgtgtatcatgatatttcttttatatcggatacgatgatctgatagattccttatcttttttctcgtatgagttgtctaaaaagaggtgggtgacgataacaaagtaaaatacagccaatgttgcagaacaggccaacttttgcctattatattttggtatctcttaactagtggtgcgaggccaattgttcacttgttaatttaactaactaattttaaatgttggttggtttggtatcttggtaatattttggtatctctgaactaattttaaatgttgttagggtatattttgtttacccttgtaattgatgtgttaatgttgtttgtttcgaggtttctcttgaatgtaatcatcactggtaacattgtgtcttgagaggcaacaaattagagtctttgatgggcttctttctgtagctcattcagcgctttacgttgccaatagcaagcttggaataagttatcatgcattcactgtcttctcgaacagtgtgtgcatccccatgtccaacattcctcactttgcttaaacgctttgcaaaatttcttctgttgatgtgtgtttggcttgtatgtgactataaataacaactgccttactgcaggtgacttttttctgggatggagctcatatttgcagatatggcacatatgataatgatcagagtggtttctgaacatacgaagtagccgcccaagagctttcaacctgccaagtttcagagctagtgctgttacatcgttggcaatgccacaacattttttcacatacatttatttcccaatgcgttgtccttaatgccatgtccttatgtagcagttcatgaacaagattggaaggatataagcactcaacgaccttcgtcgacagagctgaatgcacggttcaccgggcaatgcatagttcgtttgagcacttgag

SEQ ID NO: 212510 - DNA, 423 bp, Zea Mays
ggaagaaaggctaaatcacatgcatggtatccttcagaggcactgactagctcatgcatgaccaccttcctgcccccgtggttgccatgagatcgaactactgcgcaattccgaattaataagcatggccgcatgcagctgcctgtgctatacgttgtgcttggagtgtactttaaggttcttgcatggcaagtatgtgtgtaacatttgtgatgaacatggaaactatccacttaattctcgaataatcaatgaactgggtaagattgtaacatagtgctttatgcctgaaacattaatttaggctgcgtgtgaatgatggaggttgtgttccgcgtgttcagtttactagtaacagcagtttagggttggtgaggaaagtgataaatttaagcagttttctagtaacagcagtttaattag

SEQ ID NO: 212511 - DNA, 827 bp, Zea Mays
gcaatcgaggattttgtttagatgatgggcgacacttgaggaagggacgggggcgaccatgtcagaggacgaggacgaggcgccgatgctggaggtgggcctggatatgggctccgacgggcacgacatgatgggcttcggcccgctcatgcccaccgactcggagcgctcgctcatggagagggtcaggcaggagctcaagatggagctcaagcagggtttcaagtcgagaatagaggatgtgcgggaggagatcctgaggaaaaggagggccgggaagctgcctggggacaccaccagcatcctcaagcaatggtggcaggagcactccaagtggccataccccacggaagacgataaggctaagctcgtcgaagagaccggcctgcagctgaagcaaatcaacaactggttcatcaaccagaggaagaggaactggcacaacaactcccagacgtcaaccctcaaatcgaagcgtaaaaggtgatggaggagagctagctgcaccgtatataccgtgtatgtaacgcacacctgctgacacacatgtacacatgtataccataccaacacgctaatcaaacggagctctgcatggcgactgtactcacggaaataaagaggaccatatcgaccggttcaactgtatatctagccattagtctgaccactggcatatttgtttgctgcggctgatactttgagctgatgatgtgtggctcacagcatactttattcttgttcttattgtgttgacatagtttgtcccccataatcttgaggattaaaaaatgcatcccctgtgcgcgcgcacacacacatctgac

SEQ ID NO: 212512 - DNA, 1732 bp, Zea Mays
ccaattcccatcccacccccgcacccaccgtggcccgagtagccgtggccgccgcggcaggccggcagcgccctcccggcggtgagcgcagcccggcgcgcgcgtcgcggccaccgccgcgctcgaagcgcccagatctagggcctagcggcccccctcctccatggcgcggcgactgccgttgtggacagcgctgctcctccccttcctcctcaccggcgttggtaccgccgccgccgcatccccgccccacgatgagtgcccggtgcctactatcgtggaatccgttcttggtactcgagacacgtgctcgacgctggatcttggcaacccggtcggcgtcgtggagggggatgagttcaccttagcaacggcagttaatcttcttcatgcaaacaaggatgactatattgctgtacttttctatgcctcgtggtgcccattctcacaagaatgcaaaccaaatttcgagacactggcctccttattcccaaccattagacattttgcatttgaggaatctgcaattaggccaagcataatttcaagatacggcatccatggtttcccaacactctttctcttgaattcaaccatgagagtacggtatcatggaccaaggactgttaaaccacttgcagctttctatactgatgtctcagcttgcttgtggttttcattttccagaaatcttaaccttgttcttggtggttactatactttaagtcatttacggaagataaattaatgtggtgaaggtatcaatgcctcggtcaatgtcaagtcaactgcaggggagaccatggtacatcccttgcacgatattgagcggcaaaaggatgctgaacaggaaaattgcccgttttggtgggctcggtcgccagagaaaatacttcagcaggatacttatctagcattggcgaccgcatttgttattttgaggctgctgtatcgtctttttccaaagattgattcctttgctagatgggcatggaggaggcataatctgtttgcaaacttgatgggggcacatgaatatttcctcacctaccttgagcaaggaagacagaagtttcatcggctatacccttcaagttcgaagcgaggaaatctgcaggagggggcaatgaacgctaccgcttgggcctccaaatcattagcatctgtttcgattggagaaccaagtgcgattggaaggacaaactctaccagtgagcttagatgaagtgtaaccctttttttctccacagagatatatgtacagtacagtagagcgatcttatggacacccagaatctgttgtaacggctgtatttctctttgtatcctctcctccttagaataagtatatccatggttttgcacctttttttgttgttacatcccaattcttcggaggagtaaagtttctggtgtattgagtagtgtcttgtgttctgaaatttggaatatgtaccagtatgttggagccttggagggcatcacaataggatattgtcactttctgctgtcatgccgtccttggtctgtcatagaaattagcaatttaggtgtttagggtttaggaatggtaacaggatctcttgtcggtggtaatgattactggctgtaattagattggatagtactttctccgttcttttttatttgtaacggtttagtgtaaaaatgaactagcgaatggtaaatatttaagaacggaggtagtacgaaagaattttactaaacaaaa

SEQ ID NO: 212513 - DNA, 3748 bp, Zea Mays
ctccacccacccctccccatcaaacggtgctgggcgtcctaggttgcctcgcccttcacccgtcgtgagtttgacactctccctcccggacctctcgtccctgccgttgcccctgctggcccaccttgccctggggcacgaccaccgactcactttgccgccgatccatacgccggttcatgtccgaccaacgaccgctaccctcctcggatcccgtccaccgccctccccgcatcctggccggccgctgctctcccgccgcaggctcccgttcggcggcccgcgctccccgcgaacggcggctggcagcaagccgctggcggcgcacgacatctccacgtccatgtggcacgacacacgtctctgggacgtgctgctccgatgcggtatcaagggtgccgcggacagcgtcaccaacgtgtgatttgtggcgccgaggacctccccggtggggtcgacgacaactgcaagtacgacaccagcctgcaacgcatctcggatctcggattttttgccaccaatcagcaagagcggcaggagggagcagagctggagatggggcggtgctggtgctgctgccggtgcctaaagctgctctgcttggttctcctcccaccgatcagcttgtgcctcggccgcagctgctgctccaatctgtccccattctcatcgtcgaagatctgctctgtcttctatggtgcctagagtcagccttcagggagagaccgctcccgcaggccaagaagtcgtggggctccgagattgccagtagcggtggccggagctcctccgatgtttccacaccatatgctacaacgttttgtgcttccacgccggatgccacaatagacaagctgaggaagaaaggttaaaattgttgagacaaaggatatatgtaccatatcactgctcctctatcaagcatcgggttctcattctgtatatagttttaccattattacatccattttccttatcaaatgaatatccattttatccctaggaagaatgggataaatgttattaattaggtacgtgatattcgtgaaaggcactgtgactttactatatgaatatgctcaaatcactttaacataaaactctttatataacagatggtaacagaactgttacttatatttcctccaaccattctagacgatttaccctacaatctttcagttccttcattaatacttttcttttcaattcatgcctgatttcctatacaacacacaaatgactatatgtactaaggatagaaataaaactgctacttatgttttatagctccacctagtttagaatcatagattttcctccctgtgcaagcattatattattgtttttttggattggttaactaacagttctcgatgagtatttgctgcaaccactgttgttctttttcctttttaatctattcaaggattgctagtggccgaagggcactgccaccttcttttgcttttacgtgatgcaaggccattgttatgtattccatgtttattattacttcgaacatggctagaatacaatggttcagcatcagcttaatccatggaaggtatggggttggattgtcctcagctgtttattaatcctgtagcacgtcatttactgactattgtgtttaaatggggaaggatgatggagatacaataagcacgaaagtcattattaattttagccttggcgctatatgtttgttagccgaggttacattgttcttcttttggaatagacaaaaaaatgagagccttcactgttgtttatttagtagaggttgagatcgtatttcaaattattaagaacactactgttttagattctttcaaatattcatacgtttgaaaaaactcgcattctccatgattttttggtcatagagaatgtaataaaattttggtaaatagcattgatactcacatactatattattttcctttgtgttgaggattaatgcaaccacagtgttgtggtttgaacactaatcgagaaggcctctttactgttgtctagatctgttataattttcatttacatgcttccatacactttaatattagtaatacaattgtagttagcagattaaaaacttagttaaacatatgtgtactcacgtatttattgtttttctgtacatcaaggattcccatggacatgtggttgtccattgcacatatattgataggaatgttcagctcctttttaggtccaccacatatatatcaatggaaatgcaatgtagatatttaagtagtgagtacataaagcgcttaaaggtgccgttgctcaagttgcagccggaggttgcagctacacaggacacaaattcaggtgcattttacacctacatatcttcctacaaacatgttttttctcctaacattttgtatgttaccgtaaaattactttgtacactatagatataaacggtttcatctcagatgacacaacaactgaaatattttgctttgacaacattgctaaacatattcttggaaaaccttatgaaccctgatgttgtgaacacctttatgcagtagatagctaatgtatttttatgatattaattatgcccctaggacatgttgctacaacagacccttctgcgtgtaagtataggactataggtgataggttgatatctcaggctaccaaccaacaaactttctagaaacgtacttatgctggtgagtacaatgctgcttggaacatgttgaactaatatggttaatatattttttatggcttttgttgtactcgattatacaagcctacatatattgcatcattagtacaagcaaatcttctatacatgggcttctacctgccaactcttttctattgactttacactatgagtttcatgataacttacttatcatgtttcttacatacatatactgagttttatattaacttatatatatcatgtttctgtatattttaaggtcctgcaatctaatttgacatcgcacatcgcgcgctggacgcgcgacatacactagtaatacaatccatattcctttgttttcaattttatgaccttatcactaggtgcatcatagtcatacgagccagcttgcagttttctgcgtggttcatcatgcaccttctcactcgattaattttgtgccgacagaaaaatggttgtggctcttatgtttcagtgtttctaagtagataaaagtagtaatggatgaacgaagagggacataacagatggtgtcctgatacgcacttatcttatcgaggaagaaaagattcaggacaggacgaatagaggagagcagtgtgaggtgagctcgaggatccaactctgtctccacgatcgctaggtgtgaaattctcgggggtgtggtgagagtgaggagcatccagctctttatctccacctgctgctggtgtgagtgtgacactgatgatgatggggtaactgttttcaagtcgttcgaataatcacgattaattgtcctagtaggtttagatcaatcatgattaatcgtccaagtcgccgcccaagttcgttagtcagaacgaccaacaagtcgtccgacttgaaaacaatgtggtcacactgtcacatggcatcagcctttaccgctattgttggtaaaggttgttggctaagtcgctatgctcctggtaaaccggattatataatctggattatataatctatacaaaataagctagactatataatcgtgcaagaaaacaaacaagccttaagtatacaata

SEQ ID NO: 212514 - DNA, 3165 bp, Zea Mays
ctccacccacccctccccatcaaacggtgctgggcgtcctaggttgcctcgcccttcacccgtcgtgagtttgacactctccctcccggacctctcgtccctgccgttgcccctgctggcccaccttgccctggggcacgaccaccgactcactttgccgccgatccatacgccggttcatgtccgaccaacgaccgctaccctcctcggatcccgtccaccgccctccccgcatcctggccggccgctgctctcccgccgcaggctcccgttcggcggcccgcgctccccgcgaacggcggctggcagcaagccgctggcggcgcacgacatctccacgtccatgtggcacgacacacgtctctgggacgtgctgctccgatgcggtatcaagggtgccgcggacagcgtcaccaacgtgtgatttgtggcgccgaggacctccccggtggggtcgacgacaactgcaagtacgacaccagcctgcaacgcatctcggatctcggattttttgccaccaatcagcaagagcggcaggagggagcagagctggagatggggcggtgctggtgctgctgccggtgcctaaagctgctctgcttggttctcctcccaccgatcagcttgtgcctcggccgcagctgctgctccaatctgtccccattctcatcgtcgaagatctgctctgtcttctatggtgcctagagtcagccttcagggagagaccgctcccgcaggccaagaagtcgtggggctccgagattgccagtagcggtggccggagctcctccgatgtttccacaccatatgctacaacgttttgtgcttccacgccggatgccacaatagacaagctgaggaagaaaggttaaaattgttgagacaaaggatatatgtaccatatcactgctcctctatcaagcatcgggttctcattctgtatatagttttaccattattacatccattttccttatcaaatgaatatccattttatccctaggaagaatgggataaatgttattaattaggtacgtgatattcgtgaaaggcactgtgactttactatatgaatatgctcaaatcactttaacataaaactctttatataacagatggtaacagaactgttacttatatttcctccaaccattctagacgatttaccctacaatctttcagttccttcattaatacttttcttttcaattcatgcctgatttcctatacaacacacaaatgactatatgtactaaggatagaaataaaactgctacttatgttttatagctccacctagtttagaatcatagattttcctccctgtgcaagcattatattattgtttttttggattggttaactaacagttctcgatgagtatttgctgcaaccactgttgttctttttcctttttaatctattcaaggattgctagtggccgaagggcactgccaccttcttttgcttttacgtgatgcaaggccattgttatgtattccatgtttattattacttcgaacatggctagaatacaatggttcagcatcagcttaatccatggaaggattcccatggacatgtggttgtccattgcacatatattgataggaatgttcagctcctttttaggtccaccacatatatatcaatggaaatgcaatgtagatatttaagtagtgagtacataaagcgcttaaaggtgccgttgctcaagttgcagccggaggttgcagctacacaggacacaaattcaggtgcattttacacctacatatcttcctacaaacatgttttttctcctaacattttgtatgttaccgtaaaattactttgtacactatagatataaacggtttcatctcagatgacacaacaactgaaatattttgctttgacaacattgctaaacatattcttggaaaaccttatgaaccctgatgttgtgaacacctttatgcagtagatagctaatgtatttttatgatattaattatgcccctaggacatgttgctacaacagacccttctgcgtgtaagtataggactataggtgataggttgatatctcaggctaccaaccaacaaactttctagaaacgtacttatgctggtgagtacaatgctgcttggaacatgttgaactaatatggttaatatattttttatggcttttgttgtactcgattatacaagcctacatatattgcatcattagtacaagcaaatcttctatacatgggcttctacctgccaactcttttctattgactttacactatgagtttcatgataacttacttatcatgtttcttacatacatatactgagttttatattaacttatatatatcatgtttctgtatattttaaggtcctgcaatctaatttgacatcgcacatcgcgcgctggacgcgcgacatacactagtaatacaatccatattcctttgttttcaattttatgaccttatcactaggtgcatcatagtcatacgagccagcttgcagttttctgcgtggttcatcatgcaccttctcactcgattaattttgtgccgacagaaaaatggttgtggctcttatgtttcagtgtttctaagtagataaaagtagtaatggatgaacgaagagggacataacagatggtgtcctgatacgcacttatcttatcgaggaagaaaagattcaggacaggacgaatagaggagagcagtgtgaggtgagctcgaggatccaactctgtctccacgatcgctaggtgtgaaattctcgggggtgtggtgagagtgaggagcatccagctctttatctccacctgctgctggtgtgagtgtgacactgatgatgatggggtaactgttttcaagtcgttcgaataatcacgattaattgtcctagtaggtttagatcaatcatgattaatcgtccaagtcgccgcccaagttcgttagtcagaacgaccaacaagtcgtccgacttgaaaacaatgtggtcacactgtcacatggcatcagcctttaccgctattgttggtaaaggttgttggctaagtcgctatgctcctggtaaaccggattatataatctggattatataatctatacaaaataagctagactatataatcgtgcaagaaaacaaacaagccttaagtatacaata

SEQ ID NO: 212515 - DNA, 1548 bp, Zea Mays
atcgcggttccatatcccattcatatcctccccgcggcgcgcggccgcgccagcaccacccagcaaccagatgcgcagccgacccgccagtatggcagcggggcccaccccatccgccgcggcggcgtcgttgcggccgccgccgccgtgtttcgactaccgggcggccgtgctcgccgacacgcgcgccgccgccgcagggaaccctgcgctggcggggctgatcgagtccggtgcgctcgtgcgcgtcccgcggcggcggttcggcccggtcccggcgtggcgcccgccagacttcgtggagcctgaggatgtgtggatcctcggcacctcgcacctctcccgggactccgtcgccgacgtggagcgcgtcctccgcgccgtccaacccgacaatgtcgtcgtcgagctctgccggagcagagctggaatcatgtacgcgtccagtgattcttccgacgagccgcttttgaagtccaacatgttctctctcggtggctccaagttcttcggcgcagtcagtagaagcatcaacctgggtgggcagagcgctcttgctctgcgtctgctcctcgctgttttttcgtctaaaattgcttccagtgcgaaccggccgtttggagaagagttccgggcagctaggagggtgtctgaagatattggagctcagcttgttcttggggatcgccccattgaaataactcttgaacgagcatggaaatcccttacatgggatcaaaaggcaaagctactaatctcactgttccgcggaattacttctaagactcacacgccggatgagaaagccgccgtcagcccatacgagttgtacgagaaactgagcacatcttaccctgcactgttgcagcctctcatacatgagcgcgacatgttcctcgcatggtcgctgaagaggagcaaggctgtgaacaagagcagaactgtcgtcggagttgtagggaaggggcacatcaatggcatcgtgtacgcgctgatctctgaccagggggatctgaggttccgagaccttgttggtagagcatcatctgatacatgggtcagctcactcgtcaagggcctggtaagggacactgtaattggtctggtcctttgggctctgtatgaacagctgcaggctgtgctgtagagtagatggttcagacttccacaaggcacacaaactcggtactgttctcaacttcttacaagctgaaacagtggaactgaaatccgataccagcggaaatctaaaacttgttcgaagtgcctgtacatgaacttgatactgtccctgttcttcacaaggttgattacttgattaaagtacctgtacatgaactgtcaactgctgttttatcttctgaatacatctacattggacaacaaaacactacctgtatttttctacttttttgccatttcatatttgggtaaagcaaaaaaaaaagatgcattatgtgtagcacactttatatttgtatatatatgccgggcgaaaagcaatagattttgagaaaactgtgatagaatttcctctgaaacctgaat

SEQ ID NO: 212516 - DNA, 1037 bp, Zea Mays
cttttcttttctttggagtcacttacacgtgggcctctggcgctagtcggacaccgcatcaatgaccggtgggacccccacgtcaggaccttcttcaccgcgcggactctgtaacaacctcaggcgaatgccgcgatctccaccgtgatctccgtcgtgatctctgcacgcgtgattcaggaggtcggaacaaatctggacttcacccacatcataaaacccaggacttcccatcattcgagctatctcgccagacaccatagcttcagccaccaccgtcgttgccgatccgtgcactcatcatcgtccagctatcgtgcaccggtcggggtcttcaccgcgccatggcatgggtggtcatggctttggtacaggggaggaccaccggaggccacggaatggctgaccatcgatttggcaccgccccgggaccgcaattcgctgtgggcgaagagtatggttgggcaattcttggttacattagcactgctataagtgatggtccgggatgcttgatgctgaggtgtcctgatccgtcctgtgctgctgctgttggacaagatatgataaattcactggctaatgttgaggatacggaaaagtatgggcgatatcttcgcagatcttacattgaagataatagaaagaatatgcaccagggctatcccaaagaaacactggtgcgtttccttaaggctagagagtggaatgtagcaaaggctcataaaatgattgtagaatgtttgaattggaggattcaaaatgaaattgatagtgtgctggagaggcctatagccccagtagatttatacagatcaatatgtgattcacaacttattggcctgtcaggatacacaaaggaggctacaactacagccaaaatcataaaagtgtctggtttgaagctatcagcactaagccaaataaagggtgagatagagaacaaggacattgtgaaccaagatgaattgttcatggatattgacagtgcggagtgcggacttggggaactagcttggagtaacacaatatgctga

SEQ ID NO: 212517 - DNA, 679 bp, Zea Mays
atggagttcatgcttacctcacccttctctgtgtcgcggaacagccaagcacgttacattagcactgctataagtgatggtccgggatgcttgatgctgaggtgtcctgatccgtcctgtgctgctgctgttggacaagatatgataaattcactggctaatgttgaggatacggaaaagtatgggcgatatcttcgcagatcttacattgaagataatagaaagaatatgcaccagggctatcccaaagaaacactggtgcgtttccttaaggctagagagtggaatgtagcaaaggctcataaaatgattgtagaatgtttgaattggaggattcaaaatgaaattgatagtgtgctggagaggcctatagccccagtagatttatacagatcaatatgtgattcacaacttattggcctgtcaggatacacaaaggagttgactggacattgtttggttattatggtctgtaggatcataggtctcccaatttttggcattggtgttgggcatagcacatatgacaaagcttcggctacaactacagccaaaatcataaaagtgtctggtttgaagctatcagcactaagccaaataaaggattccggctctcatcaagtgactccccctcatgttgactttgcggatgtctcaattctagtggtggagctacgaa

SEQ ID NO: 212518 - DNA, 883 bp, Zea Mays
gtccgcgacaacaaaatcgaagatcgaggtactattccatgtatggacatgttggcaaactagctgaagagatccagaaaggtgcctcgtctgttgaaggtgttgaagctaaaacatggcaggtccctgaaaccctccctgaggaagtgcttggaaagatgggcgcaccccctaagcctgacgtgccagtcatcacgccgcaagaactcgcagaggccgacggaatcctcttcgggttcccaacgaggttcggaatgatggcagcgcagatgaaggcgttcttcgatgccactggtgggctctggagggagcagagccttgccggcaagcctgccggcgtcttcttctgcactggatcccagggtggtggccaggagacgacagcgttgacagcgatcacccagttgacgcaccacggcatggtgttcgtgcctgtgggctacaccttcggcgccaagctgttcggcatggaccaggttcagggcggcagcccctacggcgccggcacgttcgccgccgacggctcgaggtggccgagcgaggtggagctggagcacgccttccaccaggggaagtacttcgcaggcatcgccaagaagctcaagggttcagcctgatctacacatatacccttgtcggatatcataaaaaacacttattacagattcgtcttacccatcaatagatcggtctgttctctcgtggtgtctggatgttgtgtggctcagtggaactttcatgctacggtgactttgttgtaatctggagttggaatatcgttgtttcgcataaatttcgatgatttgctcaagtaaacggtttgtttggttcagagcttgttaatccatttgcgttaagaagtcatgtgtttagccaacttgag

SEQ ID NO: 212519 - DNA, 568 bp, Zea Mays
agtagaagggtgcaagctcatcagaaaagaaaagagttacaagaagatcaagcttggcggtggctgctgctgtgttgcctcctcttgttggaccgaagagagggaggggagaagcagctggcgtgcagacttctactcaggtggtcttttattctctatggggcttctaggatacatcttctccagaagcaccataagtcttgtcttgggcattacaccagggctagccactctacaacttggcactctcagtctgaagttctagaggagcggcagatccagcttcctgcttatcttggctcaggcagaggtgatgatgatgtgcaagcatcttcaccttgagttctgccttgccagaatgaatcaagtttattttcccatcctgctccatttgtggtagcccaatcgtctgtcctcacatcaactttcacctgccttaagcctttaggttcatttgtcttatatataccatggtaaaccacaccatgaatatgccataaataagtaacaagagtgtctagcaactcagcacacacaggaagtcaggatccttcacgtacacctttca

SEQ ID NO: 212520 - DNA, 570 bp, Zea Mays
caagctcatcagaaaagaaaagatccccacgtccagagttacaagaagatcaagcttggcggtggctgctgctgtgttgcctcctcttgttggaccgaagagagggaggggagaagcagctggcgtgcagacttctactcaggtggtcttttattctctatggggcttctaggatacatcttctccagaagcaccataagtcttgtcttgggcattacaccagggctagccactctacaacttggcactctcagtctgaagttctagaggagcggcagatccagcttcctgcttatcttggctcaggcagaggtgatgatgatgtgcaagcatcttcaccttgagttctgccttgccagaatgaatcaagtttattttcccatcctgctccatttgtggtagcccaatcgtctgtcctcacatcaactttcacctgccttaagcctttaggttcatttgtcttatatataccatggtaaaccacaccatgaatatgccataaataagtaacaagagtgtctagcaactcagcacacacaggaagtcaggatccttcacgtacacctttca

SEQ ID NO: 212521 - DNA, 1963 bp, Zea Mays
aacaaacaaggagcttccaactttcttcctcgctctttctctctctccgtgcgtctgcggtctgccatcggcatcgcccccaccccaccaccacacgtccacctctcccgcaattgggaatttctcctcaccgcctcgtctctgccgggctcgctcgatcgccttcggatcctgtgccaaccagagcgagccccagcccatttggaacgccgtcgcggggttcgacccgcaggtgttcgtctggctcggggacaacgtctacggcgacaacaagcgcccattccgggtcttcgggagggagcgcaccgtggggccctggaagaacgtgccgcgcttctacccttccaccgaggaggagctgcggaggcggtaccagctcgccagggcgcagcccgggtacgccaggctcagggagagggctcaggttcttggaacatgggatgaccatgattatggattgaatgatgcaggaaaagaacttagtgggaaagtgattgctcaaaggcttatgttagatttcttggatgaacctgaagacagtaaacggaggaaacaagctggtgtttatgcctcatacatgtttggccctgaaggaaaacgtgtgaaggtaatcttgctggataccagatatcacagagacccgctattaagtgatggaactattctgggagatccccagtggcagtggctagagagggagcttcatggtccacaatcagagatcaccatcattggatcttcgatccaggtagtgtctaatctttcagccactactgggcctttgttctatgtggagtcctgggcacgcttcccgagggagagagaaaggctgttcagattgattgatagtagtaagagacctggagtgctatttattagtggggatgtccatttcggagaaatcaccagattcgattgtggagctgaatacccatcatatgatgttacttcgagtggtcttacccaatctgtcgagaactctgtgccagaagtgtttcaacctcttatgagacttctggcaatactaacaccaactaccatgcgagttttgagcccaaattgccaatataaatcatgtacaataggccaaccaaattttggagcgattgaaattgattggaacgctgtacctccgcggattaaacttgaactaagagatgttgagggtcattctgttcacagcgtagagttccctatatctgaactgcagccctcggaagcgcatgcaatcaaaagacaaacccatactttccaacgtcactgtactctcgaaacagagctcccatggctaacacgataccggcttgctctgatgctgtttgtcatcatagctgtttttgcggtggttgtggtgatgctagcgatcgcctgcttgtcaaactttaccaagtccagtaagaaaagcaagaaggaatagctgtgagctgcagaggagaaacgaagattcggtccagctataagctggatttcacactgaccagggatcacatatctcaaaccatgcctttgagcaggcaagagccagattgcaccacagtatcaagcagtacactgcgttgtgcaatttgcaaagcgcagattggataaatagatatgatagctaacaaataacttacaaccatgtgcctgcctcgtacagcttcgctttttgttttccgtcttcatgccttccgccctgtttttgttttctggtaagcattacattgactaagaaaaatcttggcggtggaagtgtcccacaagtcagctaactagtctgctgtgtgcctcctcgcacacggatggcatccctggtgctctcggttaattgcagtgtactcagacacgcgttcacatgtaccctgctagggccaatacggcctccagtctcgaaatagaactgatgtgaaacacgtgagcgacggtttatcttcgtatcgcatctatattcatatttaacattaaggactcgtttggtttgagg

SEQ ID NO: 212522 - DNA, 2244 bp, Zea Mays
caaacaaggagcttccaactttcttcctcgctctttctctctctccgtgcgtctgcggtctgccatcggcatcgcccccaccccaccaccacacgtccacctctcccgcaattgggaatttctcctcaccgcctcgtctctgccgggctcgctcgatcgccttcggatcctgtgccaaccagagcgagccccagcccatttggaacgccgtcgcggggttcgacccgcaggtgttcgtctggctcggggacaacgtctacggcgacaacaagcgcccattccgggtcttcgggagggagcgcaccgtggggccctggaagaacgtgccgcgcttctacccttccaccgaggaggagctgcggaggcggtaccagctcgccagggcgcagcccgggtacgccaggctcagggagagggctcaggttcttggaacatgggatgaccatgattatggattgaatgatgcaggaaaagaacttagtgggaaagtgattgctcaaaggcttatgttagatttcttggatgaacctgaagacagtaaacggaggaaacaagctggtgtttatgcctcatacatgtttggccctgaaggaaaacgtgtgaaggtaatcttgctggataccagatatcacagagacccgctattaagtgatggaactattctgggagatccccagtggcagtggctagagagggagcttcatggtccacaatcagagatcaccatcattggatcttcgatccaggtagtgtctaatctttcagccactactgggcctttgttctatgtggagtcctgggcacgcttcccgagggagagagaaaggctgttcagattgattgatagtagtaagagacctggagtgctatttattagtggggatgtccatttcggagaaatcaccagattcgattgtggagctgaatacccatcatatgatgttacttcgagtggtcttacccaatctgtcgagaactctgtgccagaagtgtttcaacctcttatgagacttctggcaatactaacaccaactaccatgcgagttttgagcccaaattgccaatataaatcatgtacaataggtacaattctttcttgggtagaaccttataagtatgaatcaaccagtgtagataacttattttgttttactgaatttcttagttttttttaagatcaaaagttctttctgttttggactaaactaaaactccccaaacaaaaatgagttcatttatattgtattatcatagaacatcttaaggcatcactaagatttctctatgattatctcatttccttctgtgttctgttctgttctgtttatacttgtactgttaattcgtttgtgttttgctgtttcaggccaaccaaattttggagcgattgaaattgattggaacgctgtacctccgcggattaaacttgaactaagagatgttgagggtcattctgttcacagcgtagagttccctatatctgaactgcagccctcggaagcgcatgcaatcaaaagacaaacccatactttccaacgtcactgtactctcgaaacagagctcccatggctaacacgataccggcttgctctgatgctgtttgtcatcatagctgtttttgcggtggttgtggtgatgctagcgatcgcctgcttgtcaaactttaccaagtccagtaagaaaagcaagaaggaatagctgtgagctgcagaggagaaacgaagattcggtccagctataagctggatttcacactgaccagggatcacatatctcaaaccatgcctttgagcaggcaagagccagattgcaccacagtatcaagcagtacactgcgttgtgcaatttgcaaagcgcagattggataaatagatatgatagctaacaaataacttacaaccatgtgcctgcctcgtacagcttcgctttttgttttccgtcttcatgccttccgccctgtttttgttttctggtaagcattacattgactaagaaaaatcttggcggtggaagtgtcccacaagtcagctaactagtctgctgtgtgcctcctcgcacacggatggcatccctggtgctctcggttaattgcagtgtactcagacacgcgttcacatgtaccctgctagggccaatacggcctccagtctcgaaatagaactgatgtgaaacacgtgagcgacggtttatcttcgtatcgcatctatattcatatttaacattaaggactcgtttggtttgagg

SEQ ID NO: 212523 - DNA, 1915 bp, Zea Mays
caaacaaggagcttccaactttcttcctcgctctttctctctctccgtgcgtctgcggtctgccatcggcatcgcccccaccccaccaccacacgtccacctctcccgcaattgggaatttctcctcaccgcctcgtctctgccgggctcgctcgatcgccttcggatcctgtgccaaccagagcgagccccagcccatttggaacgccgtcgcggggttcgacccgcaggtgttcgtctggctcggggacaacgtctacggcgacaacaagcgcccattccgggtcttcgggagggagcgcaccgtggggccctggaagaacgtgccgcgcttctacccttccaccgaggaggagctgcggaggcggtaccagctcgccagggcgcagcccgggtacgccaggctcagggagagggctcaggaaaagaacttagtgggaaagtgattgctcaaaggcttatgttagatttcttggatgaacctgaagacagtaaacggaggaaacaagctggtgtttatgcctcatacatgtttggccctgaaggaaaacgtgtgaaggtaatcttgctggataccagatatcacagagacccgctattaagtgatggaactattctgggagatccccagtggcagtggctagagagggagcttcatggtccacaatcagagatcaccatcattggatcttcgatccaggtagtgtctaatctttcagccactactgggcctttgttctatgtggagtcctgggcacgcttcccgagggagagagaaaggctgttcagattgattgatagtagtaagagacctggagtgctatttattagtggggatgtccatttcggagaaatcaccagattcgattgtggagctgaatacccatcatatgatgttacttcgagtggtcttacccaatctgtcgagaactctgtgccagaagtgtttcaacctcttatgagacttctggcaatactaacaccaactaccatgcgagttttgagcccaaattgccaatataaatcatgtacaataggccaaccaaattttggagcgattgaaattgattggaacgctgtacctccgcggattaaacttgaactaagagatgttgagggtcattctgttcacagcgtagagttccctatatctgaactgcagccctcggaagcgcatgcaatcaaaagacaaacccatactttccaacgtcactgtactctcgaaacagagctcccatggctaacacgataccggcttgctctgatgctgtttgtcatcatagctgtttttgcggtggttgtggtgatgctagcgatcgcctgcttgtcaaactttaccaagtccagtaagaaaagcaagaaggaatagctgtgagctgcagaggagaaacgaagattcggtccagctataagctggatttcacactgaccagggatcacatatctcaaaccatgcctttgagcaggcaagagccagattgcaccacagtatcaagcagtacactgcgttgtgcaatttgcaaagcgcagattggataaatagatatgatagctaacaaataacttacaaccatgtgcctgcctcgtacagcttcgctttttgttttccgtcttcatgccttccgccctgtttttgttttctggtaagcattacattgactaagaaaaatcttggcggtggaagtgtcccacaagtcagctaactagtctgctgtgtgcctcctcgcacacggatggcatccctggtgctctcggttaattgcagtgtactcagacacgcgttcacatgtaccctgctagggccaatacggcctccagtctcgaaatagaactgatgtgaaacacgtgagcgacggtttatcttcgtatcgcatctatattcatatttaacattaaggactcgtttggtttgagg

SEQ ID NO: 212524 - DNA, 1887 bp, Zea Mays
caaacaaggagcttccaactttcttcctcgctctttctctctctccgtgcgtctgcggtctgccatcggcatcgcccccaccccaccaccacacgtccacctctcccgcaattgggaatttctcctcaccgcctcgtctctgccgggctcgctcgatcgccttcggatcctgtgccaaccagagcgagccccagcccatttggaacgccgtcgcggggttcgacccgcaggtgttcgtctggctcggggacaacgtctacggcgacaacaagcgcccattccgggtcttcgggagggagcgcaccgtggggccctggaagaacgtgccgcgcttctacccttccaccgaggaggagctgcggaggcggtaccagctcgccagggcgcagcccgggaaaagaacttagtgggaaagtgattgctcaaaggcttatgttagatttcttggatgaacctgaagacagtaaacggaggaaacaagctggtgtttatgcctcatacatgtttggccctgaaggaaaacgtgtgaaggtaatcttgctggataccagatatcacagagacccgctattaagtgatggaactattctgggagatccccagtggcagtggctagagagggagcttcatggtccacaatcagagatcaccatcattggatcttcgatccaggtagtgtctaatctttcagccactactgggcctttgttctatgtggagtcctgggcacgcttcccgagggagagagaaaggctgttcagattgattgatagtagtaagagacctggagtgctatttattagtggggatgtccatttcggagaaatcaccagattcgattgtggagctgaatacccatcatatgatgttacttcgagtggtcttacccaatctgtcgagaactctgtgccagaagtgtttcaacctcttatgagacttctggcaatactaacaccaactaccatgcgagttttgagcccaaattgccaatataaatcatgtacaataggccaaccaaattttggagcgattgaaattgattggaacgctgtacctccgcggattaaacttgaactaagagatgttgagggtcattctgttcacagcgtagagttccctatatctgaactgcagccctcggaagcgcatgcaatcaaaagacaaacccatactttccaacgtcactgtactctcgaaacagagctcccatggctaacacgataccggcttgctctgatgctgtttgtcatcatagctgtttttgcggtggttgtggtgatgctagcgatcgcctgcttgtcaaactttaccaagtccagtaagaaaagcaagaaggaatagctgtgagctgcagaggagaaacgaagattcggtccagctataagctggatttcacactgaccagggatcacatatctcaaaccatgcctttgagcaggcaagagccagattgcaccacagtatcaagcagtacactgcgttgtgcaatttgcaaagcgcagattggataaatagatatgatagctaacaaataacttacaaccatgtgcctgcctcgtacagcttcgctttttgttttccgtcttcatgccttccgccctgtttttgttttctggtaagcattacattgactaagaaaaatcttggcggtggaagtgtcccacaagtcagctaactagtctgctgtgtgcctcctcgcacacggatggcatccctggtgctctcggttaattgcagtgtactcagacacgcgttcacatgtaccctgctagggccaatacggcctccagtctcgaaatagaactgatgtgaaacacgtgagcgacggtttatcttcgtatcgcatctatattcatatttaacattaaggactcgtttggtttgagg

SEQ ID NO: 212525 - DNA, 685 bp, Zea Mays
aaaaaaaaatgatataaggagaattttagagcgagccgatgggggtagtgttacgccactcattccaagaggcagccgcggtctcctctccaccccggccgccggccgcccccacagtgccgtaccccgaccagccatgcgcatcttcgtgctgtccgggcagagtaacatggccggccgcggcggcgtacaccacaagcactgggacggcgtggtgcccccagaatgcgcgccggatccgtccatcctccgcctttcctcggcgcagcagtgggaggaagcccgcgagccgctccacgccgacatcgacacaaccaagacctgtggcatcgggcccgggatggcattcgcccgcgctgtgctctcgagcctgcaggaggacacccctggcgcggcggcccagatcgggctcgtgccgtgcgccgttggcgggacggccatccgggagtggtccctcgggaaacatctgtacgagcagatggtatcccgggcgcgcgtcgcgaccttgtacggcgagatcgaggccatcctatggtaccagggagagagcgacgccgaatccgatgccgacacgagtgcctacttggagaacgtcgagaggctcatctgtaatgtcagggcagatcttgggatgccgcagttaccctttattcagatgccatgctatttttggagcatttgaaac

SEQ ID NO: 212526 - DNA, 1953 bp, Zea Mays
gttccttcgggcctagtgttgttcatagcatttccttctctcagtttctttttcttcatatcctattttgagcgagtactttgcagtgattgatcggttacaatctgcttagggatccccgttacaacaagggacttgcgttcacagagagggaacgtgagacgcactacctccgtggccttctgccaccagctattgtatcccaggagctccaggagagaaagatcatgaataatattcgacaataccagttgcctttgcagcgctacatggcactcatggatctccaggaagggaacgagaggcttttctacaagttgctcattgacaacgtcgaggagttacttccaatcgtgtacactccaaccgttggcgaggcctgccaaaaatatggatccatatttagtcgccctcagggtctttatatcagtttgaaggagaagggaaagatccttgaggtgttgaagaactggccagagaggagcattcaggttatagttgttactgatggtgaacgtattttggggcttggagatctcggatgccagtgcttgccgatcacattggatgttggtacaaataacgaggagctgcttaatgacgaattttacattggcttgagacaaagaagagccactggccaggagtacactgattttctgcaagaatttatgactgctgtgaaacaaaactatggggagaaagttcttattcagtttgaggattttgccaaccataatgcttttgatcttcttgcaagatatggcaccactcaccttgtattcaatgatgatattcagggaacagcttctgtggttcttgctgggcttattgcagcacaaacattacttggtggttcattggcagatcacacttaccttttccttggtgctggagaggctgggacaggtatagctgaacttatagctcttgagatctcacgtcagacgaaagctcctatagaggagtgccgcaagaaaatctggcttgttgattcaaagggcttgattgtcagtacacgaaaggagtcccttcaacacttcaagaaaccatgggctcatgagcataaaccactcagcaacctcttagatgctgttaatgctatcaaaccaacagtgttgattggcacatccgggaaggggcaaactttcacaaaagacgttgttgaagcaatctcctcatttaacgagagaccaatcattcttgccctatcgaacccaacatcacaatctgaatgcacagctgagcaagcttacacatggagcaagggacaagcagtgtttgcgactgggagtccatttgatcctgtggagtacaatggcaagatacatgttcccggacaggcaaacaatgcctatatcttcccagggtttggcctcggcgtggtgatgtctggagctatccgcgttcatgacgacatgcttctggcagcatcggaggctctggcccagcaggtcacagaagaaaattttgagaaggggctgatttatcctcccttctcaaacatcaggaagatctctgcccacattgcagccagcgttgcagcaaaggcatatgaacttggtttggcaagtaggcgccctcggccaaaggacctggtgaaatatgcagagagttgcatgtacagccccatctaccgcaactaccgttgaattcggatcaactccagttatgtgcaaatcagcagcagctattccgcagcgtttatctcttgcgatgtcatgtaaatcagctccggttagccttttggatgctagtcagtcatggtgctggtgccgtccttccggacaaggataaatttggaataaagtttgagtcgacgattcctccctcggtactgcgtgttcacctgaacgtttttttgcttcacgcagttgctgttgttttcaacaagtgcttggttgtatgcgtgaaggtaagtaggtaacaccaggaaaggttcttctttttttc

SEQ ID NO: 212527 - DNA, 2922 bp, Zea Mays
tttcttctgcagctttgtggatgaaataggtgtttccatttcgcttcgtggatgatgagagggattatctgtccttgacaaaacggtatcccagacttgcaattactccagaattttctaagattgtcttgaactgggctaaagaaaacttaaatcttcctctggatacaccagtgagtttggagcacgatatccatgattcagatgatggtgctgatgaaggagcaattatctctactgagaaaacatcaagcttcaatactccggccaccatttggaatgcaaaggtactattgatgagtggcatgagcaaaggtgcctttgctaacataacttcattgagaagtactgaggaacgagttgtgcacttgaacaatatcttaaaatttgctgtattcaagaaggatcgttctctttttgcaattggaggcccttggaatgcagatatagatggtggtgacccatcagctgactgttcttgcttgattcgaactgccatcagatgcgttaaggaaacggttcacgttgatctatctagttgcacccactggaaccggtttgtcgaggtacattacaatagaataggcaaagatggactgttcagtcataaagaaattactgttctgtttgtgccaaacttgttggaatgcttgccttcagtggatatatggaagaataactggattctgtacaaaaaatcaaaggcagaaagggagcagctcactgttaaaaaggtaaagagccctggtgatccaaaagagcagatgcaaggggagctgaacgatggtaaaaatttagatgctgatcaattaaaagaggctgatgttggttgcagtgatatgaaaaatgagaaagacgatgttgatatcaaacagcaaggcaatgatggagagggtacgggtaaagttgaggaacctgttcagaagatgggtggggatgttgaaggaaaaagtacgggtgactcctctattgaccatgcaacaactggggataaaaagcccacaaaaaagaaaataataaaaaaggttgtgaaagttgttcgaaaaaaaataactggaccttcagttgataaatcttctgaggacaagattgttgtagcagaatctgcaaacaaaactgcagaaggggggcaaagtcaacaaaagaatgatgatgctggaaaacaacaggagggagctggtataagtcaacaaccagaagcaaagaaaactgtgaagaagaaaataattcgaaggattgttaaaaggaaagtttctggttcaggttctcagttgaatacccctactacacctgctgaaactagtaggcaagaagcagaagttcagccagaaaaaaatgttgagagttcggccgacgttggaaactctcagactaagctacaagaagggtccaaaattccatctgaagatatctcaaatcagaagaaagaggagaaaccagcggaaaaggaacacccattgactgatctcagtttaaatgcagataagggcaatcacaaggaagcttttgaacaaaaagacatgaaaaacgatggaaagaaggataaaacaaaggatgataaagagaagaatagagacctcaagatggatttaaagcaaaagctacctcttgacacacaagaaaaaaagaggtctgatgaaccaccaaagtatccaggattcattctccaggcgaaaagaaatacagaatccaaactccgcttaacatccctttcattgcatggcctcctagactatactgccaaggatatagaggagtcagtatttgagctttctttgtttgctgagtcattcagtgaaatgcttcaacacagaatgggttgtgttatcctgtcttttcttgagaaattgcacaggcgatatgttgtgaagaggaatcagcgtaagcgccaaagagaggaagatctaaagaaagaagagaaatcttcagagaagcggtctaagactactcatgagactactaaaactgaaagtgttgataatccaggaggcagctttaaaatgacaaaagagggtgaagaaaagatgagcacagatcaatctgcaaatgtccatgctgaactgtcaaaagagggtcagataaaacttggcaccgatcatccaattgctaaccatggagaaccagcaaaagggggtgatgaaaatatggaggaagatcctgaatacgaggaagatcctgaagaagtagaagtatatgaagatgacgaggacatggatgatgctcacgctgaagaacagattgcagaacagaatgagaacacaaacgacagagagattaagccaaaagaagtagcgacaacagatggtggaaataacaaaagtacaagacagcctgaagtagaaaatgttactaatatccatgaaagagctgcttcaatggaagaaaagcagtccgtgccagagataggagatttggtgggaggtggagaaaaggtagttagtaaagagattaagccagcaaaagatgaggtgatcgacaaggacctattgcaggccttcaggtactttgacataaatggagcaggatatctcaaggttgatgatttaaaatgtattcttcacaacatggggaagtttttatcaagcagggacgtgaaggacttggttcaaattgctcttgttgagagcaattctgcaagggacaatcgcataatctatcctaagcttgtgaagattgttgacctgtaatctggcactgcttggcccgcgtcagtccccttgaagttaaccatgctatgatcgttgagaagtcagttatgagaaactattttgtttacttattaatgggttcactgccatttttgtggctacctgtttctacgattatgctacaaggagctgcatttcgtttctgttgaattttttttacggaaattatcaagtcgtgaacgtagcagccgaaaaagataaacgaacattgtat

SEQ ID NO: 212528 - DNA, 2640 bp, Zea Mays
cggatctgcaggcgtcactattgcatccgcgaaaatttctcttcttgggaaaaaaatgcttgactgattccaaagaccgacaaatcaaccaatcggctgcttctgggtacattctcggagcgaatggactggttataccacgtttggagagcaccggctggtgaagctcgatcgaggggaggaaataaagctgctccgtgctcgccttggctggagaaagccagtccttgtggccgtttgccggcgttgaggaggttaagcctgacaccgaggtgtgcacggtgctcagcagtgatacccttccacagaccccgcatagtgcgggaagcctacggcactgggtacgccctacaggtgctcagcagtgtggtaaatgtgctttggtatatacaccagaacttgcagtgaataagattatgattggaaatctcatacactgccatgataaggtggctttggagaagtttataggggaacccttgatgatgacaatgagcctgtagctgtgaagaaatatatcaatgaagatttgagagaagtgtttatggaagaagtacgcatccatagtaaaattagccacaagaatgtggtgaagctaataggctattgcattgggaaaagtactctcatgatcgtaatggagtatatgtccacaggaaatctcaatgacatactccactgcactgaaatttcgatccctttggatgtaagattgggtattgctatagggtgtgcagaggcattgagctacatgcattcaatgcatttatcatctggcaaccttatctgtcatggtgatgttaagcctgccaacatacttctaaatgacaatttgacagcaaaaataaccgattttggggtttcaaggcttctggttggtggcatcactcagtacacgacaagtgtaaaaggaagtatagattacatggatcctatatatattcaagaaggccgtcttactccaaggagtgatgtttatagctttggattagttctctgtgaactaatatctagaaaaaggataagaaaaggtgacattaacctcattttatatgtcaataaaggctccgcaagtggtaaagggtttagagaaatgtctgatgctgcaattgcaaatgaggacaatatgaagattctcaaagaaatgaagaaattggcaactgaatgtgtatcactgagcatttataggcgtcctcagatgactgatgtggtcagacgccttcggatgctgagaaaagaattaaaggagagacatgaatattattcagagtcaattttggcatcacaccattcatggcgcaaaaacaacaagcaagagataatcatgcccacctataattctaagatgcagatcaagaagagtctgggctttttcaagaggagccttagtaactctaagatccaatcggaacccagcgatgtgaggattttcacacaggaggagctaaaagaagtcacgaataactactcttatctaatcagtggaggtacttcaggtaaagtttacagaggaacactcgaggacaatacggtggtagcggtgagaatattttctgaagtactcgagggctttgaagaagcgttcgtcaatggtgggatgatcctgtctcagatatcccataggaacatcatcaaactggtgggatattgcttggacgctgactgcccagctttcttgtatgagtacgctgctaagggcagcctatctgatgttctggacgggcatgaagacttcccactggatctacgtgcgaagatcgtggtgaagatcgcagaagcattagaatacctccattcaccagcaactggtattatcagacacggctatgttgtgccatccaagatactcgtagacaataatttcatgccaaagctcaccggcttttcatgggcaaggaggcttatccaggagagtaacactactgccagcgacgacgtaatttctagtcatcagcatccatcgagcgggttcaacaacgacccgatccacgaccactatgtgtcgctaaaactgaagaccgatgtgtaccagttcggtgtcctcctcctgacactgattagcaggaagagctttgtgttttacgccgatcacgacggcctcgtctcgcagttcctcacagcttgccaggaagatggcagtggaagggcgttctttgatgatgatgttgcagtccatggtggagatgttgttctgcttgaggagatggggaggctgtcgctgaagtgtgtttgtgaggaaatcgagcagagaccaacgatgcgagaagtggcagagcaccttcggatgatcacgagatcttggaaggacttcagcgggagctacgcaggagctgaaggcaatactcctgagaggccacctagttcagacattggagattgaccatgagcaatcctgtacatacgacagtgaatgatagatgtgttgtttgtattgtttcgtggtcagtgttagactgctgtttacgtgtagctgctgctattgttgtatgtgtagctgctaggggtgtaaatggtacggatattatctgtctgtattataattcgatctgtctaaaagggctgagatctgatccatatctgagtctgggtattgattatccgaccagatccgatttttatgtgtctttattctcaaagttg

SEQ ID NO: 212529 - DNA, 2564 bp, Zea Mays
atggctggccgaccgcccgcagcgccgctagttggcaccgccttggcctccgaaagccagtccttgtggccgtttgccggcgttgaggaggttaagcctgacaccgaggtgctcagcagtgatacccttccacagaccccgcatagtgcgggaagcctacggcactgggtacgccctacaggtgctcagcagtgtggtaaatgtgctttggtatatacaccagaacttgcagtgaataagattatgattggaaatctcatacactgccatgataaggtaaaacatgaagctggcatcaatggcaatattaagatttttacagaagatgagattaaaagaattaccaacaactttaacactcttatcggaaaaggtggctttggagaagtttataggggaacccttgatgatgacaatgagcctgtagctgtgaagaaatatatcaatgaagatttgagagaagtgtttatggaagaagtacgcatccatagtaaaattagccacaagaatgtggtgaagctaataggctattgcattgggaaaagtactctcatgatcgtaatggagtatatgtccacaggaaatctcaatgacatactccactgcactgaaatttcgatccctttggatgtaagattgggtattgctatagggtgtgcagaggcattgagctacatgcattcaatgcatttatcatctggcaaccttatctgtcatggtgatgttaagcctgccaacatacttctaaatgacaatttgacagcaaaaataaccgattttggggtttcaaggcttctggttggtggcatcactcagtacacgacaagtgtaaaaggaagtatagattacatggatcctatatatattcaagaaggccgtcttactccaaggagtgatgtttatagctttggattagttctctgtgaactaatatctagaaaaaggataagaaaaggtgacattaacctcattttatatgtcaataaaggctccgcaagtggtaaagggtttagagaaatgtctgatgctgcaattgcaaatgaggacaatatgaagattctcaaagaaatgaagaaattggcaactgaatgtgtatcactgagcatttataggcgtcctcagatgactgatgtggtcagacgccttcggatgctgagaaaagaattaaaggagagacatgaatattattcagagtcaattttggcatcacaccattcatggcgcaaaaacaacaagcaagagataatcatgcccacctataattctaagatgcagatcaagaagagtctgggctttttcaagaggagccttagtaactctaagatccaatcggaacccagcgatgtgaggattttcacacaggaggagctaaaagaagtcacgaataactactcttatctaatcagtggaggtacttcaggtaaagtttacagaggaacactcgaggacaatacggtggtagcggtgagaatattttctgaagtactcgagggctttgaagaagcgttcgtcaatggtgggatgatcctgtctcagatatcccataggaacatcatcaaactggtgggatattgcttggacgctgactgcccagctttcttgtatgagtacgctgctaagggcagcctatctgatgttctggacgggcatgaagacttcccactggatctacgtgcgaagatcgtggtgaagatcgcagaagcattagaatacctccattcaccagcaactggtattatcagacacggctatgttgtgccatccaagatactcgtagacaataatttcatgccaaagctcaccggcttttcatgggcaaggaggcttatccaggagagtaacactactgccagcgacgacgtaatttctagtcatcagcatccatcgagcgggttcaacaacgacccgatccacgaccactatgtgtcgctaaaactgaagaccgatgtgtaccagttcggtgtcctcctcctgacactgattagcaggaagagctttgtgttttacgccgatcacgacggcctcgtctcgcagttcctcacagcttgccaggaagatggcagtggaagggcgttctttgatgatgatgttgcagtccatggtggagatgttgttctgcttgaggagatggggaggctgtcgctgaagtgtgtttgtgaggaaatcgagcagagaccaacgatgcgagaagtggcagagcaccttcggatgatcacgagatcttggaaggacttcagcgggagctacgcaggagctgaaggcaatactcctgagaggccacctagttcagacattggagattgaccatgagcaatcctgtacatacgacagtgaatgatagatgtgttgtttgtattgtttcgtggtcagtgttagactgctgtttacgtgtagctgctgctattgttgtatgtgtagctgctaggggtgtaaatggtacggatattatctgtctgtattataattcgatctgtctaaaagggctgagatctgatccatatctgagtctgggtattgattatccgaccagatccgatttttatgtgtctttattctcaaagttg

SEQ ID NO: 212530 - DNA, 1365 bp, Zea Mays
ttccgctgctagctagtaccaggtgtccgcgttatgccgggaccggatgcacgaggtggtggcggaggagctggccagggagggagccaccttcctgcggcggcggcaggagtcggcggcgtcgggcagcgccgcctggtcggagcgggcggaggaggagcgcgcgtggcgcgcggcgctgcagcggggcttccggcgggtggacgatatggcggcgctggcgtgcgcgtgcgggcgcgtggcgcggccaagctgcagctgcccgctcgccggcacctcctccggcatcgtcggctccaccgccgtggtggccctcctcgtccgcggccgcctcgtcgtcgccaactgcggcgactcccgcgccgtgctctgccgcgggcccgccgggacgccgcccgtcccgctctcctccgaccacaagccaaatcgggcagacgagaaggcgcggatcgaggcggccggcgggcgggtggtgttcaacaacgggcaccgcgtgcgtgggatcctcgccatgtcgcgcgcactaggctgctgaggccggaagtgatcgctgagccggagatcaccgtgacggagcgaacggtggaggacgagtgcctgatcctggcgagcgacgggatgtgggacgtgatcagcaacgacatcgcctgcaacgtggcccgccaatgcctggaggacgggaacccgcctcccgccgaccccactgcgggaggaggaggaggagctccggccgccggcgtagtcgtcgtcgccgcccgcgaggccgagccccggtgcctccgcgccgcctcgctcctggccaggctcgccatcggcagggagacacaggataacgtcagcatcgtcgtcgtcgacctcaagcacagggactgagtcagtgagtgagtggtggtatccggtttctgatcctgcagcgcatcagcgtaatcgatctagggctgagctgaactgatactgtgaggaggtgatcgtctagatcgtctagacctttgacatttccttggttctttcgattctaagatataagatttgtagcctgtttcttttctttcggtcgaaatgtatgtgtggagagaaagaaagtggatggaagatttgccgtcctcaactgaaggtggggggaaaaaacggaggacaaaaggaacaatgaaaaagagagcaattgtacagagtatgacaacatgatgctacatttatgtgcattattaataccaacttgtttccgttttcttaaggacaaggagcgagcctaagctagctgcagtttctaggttctgcgctccgcagcctgatcggaatcgaatgattcgtctgcgtggctatctgtgtctctgttctctattgtctgctgtgtgtgtgggctga

SEQ ID NO: 212531 - DNA, 2036 bp, Zea Mays
gtcatccgcgcgcccccgctctcctccatctgccgcgtgaagctctcccgaaaacctcctccacatcagcgccccccgccatgcccctgtatctcgcctagcacacgccgcgcccacgcaggcagccgtggatctcgcccccaccgtcgagcttccatggtaggcatcctcttccatactaggcggccatggcatgaacccatcccctatccgcgcccccatcgcacgggccctaatcctagaatggtgccttcctccttctctgtcgcctctgccctactcagaccttcgagacttccactggcgatacacacccactagggaattcttagaccaacatgaggaggaagaaatgcctcatgttattagtgttacaccagacgtacaagaggccattggacggcattctttgcctgcgataggaatgaggagctatctgcaaactatcttcttgagcaagctggtgaggaagattaagccagagtagttttcgtatgctgcattgaaacaggcagatcctattaacaactccgcattggctctctgccccagccatggacccatgacatcggtggtttcgcgcacctcaaagacatgggtggggaggcatcgcggctgctgcacgccctctagagaatgcttatcgatcatcaggtgcattcaattacgctttcggttgctgcattgagaaatgaatcagtcgaactgtgaaccaactacttgaaatttcacgtgatgtggggtatagtggcaatgcataagcccacatggagcactgggtcttcgaggtgacacactgacattgcaactgaacacacttgtctatgtggctatggctacggtatacatagagtcgtacattaggtagcttattcaatcaaataatgtccggttttgtcatgaaagtgataataatcttctatataaacttggtcaaacgtaagacatttcacttaaaataaaaccagaacgtctctctttttcggtggagatagtattaatataatttcgaaaattctgatctgcgagttggtactttgataattcaaatccatgttgccaaaagctaactgatataatactttcttcaacagtaactatcatactatctgcatcttctatgatctattaaagtacctcacaagagatccaattaatgattcacacctgcaagataacacctgtagtggaaatccagttttctggtgtgagtctaaatatttcagaaacaatgaaagcatagaagaaaatgctgcagtaggacaatacctaattatcatgtgcatgcccctagaccctccatttttctcttagcgaggaagcagaaaaccaaactcaaatacaagaaatattagtcaatacaaagtggccaaatttctcgagacagaaaaagacaggtgggatgtagaaagggacttaaaagttgaaaccattggccccatgtactgcggcaaaatatttctcttcttctggcagtacagtagcttgcatcatatgtgacatcctctttatagtacaggaagtcaagaatagcccgagtgctcagcacatatgctacatgctcccaactacattaccccttctttgaagtggcgagcaaagcgagaagtttgagtggggcccaaaacctgagtggggcctaaatagaaacctacttactaatggacctttatagctacaatgaataagataaaaactccactgaaaccagaaaattgagtgggaccccgtgccccagtcagcccaacgtgagcctacccttgcttctctgctcagacatgcacataaactgaattcgtctcatttatttatgtttaaggtgtgtcgtttattcacttgctccagctgctgctatcaccccaaccaaatcaattttgaaggccgaattatctaacaacatttccaaagggaatatttcaagttcacctacacggccgcaccttctcccgaacaacgtggagcaagcaatcatttcctgtagaataatatgcgaataatgaagtcataacaccttttgatttgaacaaagggaaaac

SEQ ID NO: 212532 - DNA, 2137 bp, Zea Mays
gtcatccgcgcgcccccgctctcctccatctgccgcgtgaagctctcccgaaaacctcctccacatcagcgccccccgccatgcccctgtatctcgcctagcacacgccgcgcccacgcaggcagccgtggatctcgcccccaccgtcgagcttccatggtaggcatcctcttccatactaggcggccatggcatgaacccatcccctatccgcgcccccatcgcacgggccctaatcctagaatggtgccttcctccttctctgtcgcctctgccctactcagaccttcgagacttccactggcgatacacacccactagaccaacatgaggaggaagaaatgcctcatgttattagtgttacaccagacgtacaagaggccattggacgggaatgaggagctatctgcaaactatcttcttgagcaagctggtgaggaagattaagccagagtagttttcgtatgggtacaaacatagctttgcgtcaatcgatgccaggcaaatgtagaacgcttggtagccggtcagcgctatgtgtagaacacatactccagagatgaacatggatcacgagaactggaataattgctgtcagctgcattgaaacaggcagatcctattaacaactccgcattggctctctgccccagccatggacccatgacatcggtggtttcgcgcacctcaaagacatgggtggggaggcatcgcggctgctgcacgccctctagagaatgcttatcgatcatcaggtgcattcaattacgctttcggttgctgcattgagaaatgaatcagtcgaactgtgaaccaactacttgaaatttcacgtgatgtggggtatagtggcaatgcataagcccacatggagcactgggtcttcgaggtgacacactgacattgcaactgaacacacttgtctatgtggctatggctacggtatacatagagtcgtacattaggtagcttattcaatcaaataatgtccggttttgtcatgaaagtgataataatcttctatataaacttggtcaaacgtaagacatttcacttaaaataaaaccagaacgtctctctttttcggtggagatagtattaatataatttcgaaaattctgatctgcgagttggtactttgataattcaaatccatgttgccaaaagctaactgatataatactttcttcaacagtaactatcatactatctgcatcttctatgatctattaaagtacctcacaagagatccaattaatgattcacacctgcaagataacacctgtagtggaaatccagttttctggtgtgagtctaaatatttcagaaacaatgaaagcatagaagaaaatgctgcagtaggacaatacctaattatcatgtgcatgcccctagaccctccatttttctcttagcgaggaagcagaaaaccaaactcaaatacaagaaatattagtcaatacaaagtggccaaatttctcgagacagaaaaagacaggtgggatgtagaaagggacttaaaagttgaaaccattggccccatgtactgcggcaaaatatttctcttcttctggcagtacagtagcttgcatcatatgtgacatcctctttatagtacaggaagtcaagaatagcccgagtgctcagcacatatgctacatgctcccaactacattaccccttctttgaagtggcgagcaaagcgagaagtttgagtggggcccaaaacctgagtggggcctaaatagaaacctacttactaatggacctttatagctacaatgaataagataaaaactccactgaaaccagaaaattgagtgggaccccgtgccccagtcagcccaacgtgagcctacccttgcttctctgctcagacatgcacataaactgaattcgtctcatttatttatgtttaaggtgtgtcgtttattcacttgctccagctgctgctatcaccccaaccaaatcaattttgaaggccgaattatctaacaacatttccaaagggaatatttcaagttcacctacacggccgcaccttctcccgaacaacgtggagcaagcaatcatttcctgtagaataatatgcgaataatgaagtcataacaccttttgatttgaacaaagggaaaac

SEQ ID NO: 212533 - DNA, 2167 bp, Zea Mays
gtcatccgcgcgcccccgctctcctccatctgccgcgtgaagctctcccgaaaacctcctccacatcagcgccccccgccatgcccctgtatctcgcctagcacacgccgcgcccacgcaggcagccgtggatctcgcccccaccgtcgagcttccatggtaggcatcctcttccatactaggcggccatggcatgaacccatcccctatccgcgcccccatcgcacgggccctaatcctagaatggtgccttcctccttctctgtcgcctctgccctactcagaccttcgagacttccactggcgatacacacccactagggaattcttagaccaacatgaggaggaagaaatgcctcatgttattagtgttacaccagacgtacaagaggccattggacggcattctttgcctgcgataggaatgaggagctatctgcaaactatcttcttgagcaagctggtgaggaagattaagccagagtagttttcgtatgggtacaaacatagctttgcgtcaatcgatgccaggcaaatgtagaacgcttggtagccggtcagcgctatgtgtagaacacatactccagagatgaacatggatcacgagaactggaataattgctgtcagctgcattgaaacaggcagatcctattaacaactccgcattggctctctgccccagccatggacccatgacatcggtggtttcgcgcacctcaaagacatgggtggggaggcatcgcggctgctgcacgccctctagagaatgcttatcgatcatcaggtgcattcaattacgctttcggttgctgcattgagaaatgaatcagtcgaactgtgaaccaactacttgaaatttcacgtgatgtggggtatagtggcaatgcataagcccacatggagcactgggtcttcgaggtgacacactgacattgcaactgaacacacttgtctatgtggctatggctacggtatacatagagtcgtacattaggtagcttattcaatcaaataatgtccggttttgtcatgaaagtgataataatcttctatataaacttggtcaaacgtaagacatttcacttaaaataaaaccagaacgtctctctttttcggtggagatagtattaatataatttcgaaaattctgatctgcgagttggtactttgataattcaaatccatgttgccaaaagctaactgatataatactttcttcaacagtaactatcatactatctgcatcttctatgatctattaaagtacctcacaagagatccaattaatgattcacacctgcaagataacacctgtagtggaaatccagttttctggtgtgagtctaaatatttcagaaacaatgaaagcatagaagaaaatgctgcagtaggacaatacctaattatcatgtgcatgcccctagaccctccatttttctcttagcgaggaagcagaaaaccaaactcaaatacaagaaatattagtcaatacaaagtggccaaatttctcgagacagaaaaagacaggtgggatgtagaaagggacttaaaagttgaaaccattggccccatgtactgcggcaaaatatttctcttcttctggcagtacagtagcttgcatcatatgtgacatcctctttatagtacaggaagtcaagaatagcccgagtgctcagcacatatgctacatgctcccaactacattaccccttctttgaagtggcgagcaaagcgagaagtttgagtggggcccaaaacctgagtggggcctaaatagaaacctacttactaatggacctttatagctacaatgaataagataaaaactccactgaaaccagaaaattgagtgggaccccgtgccccagtcagcccaacgtgagcctacccttgcttctctgctcagacatgcacataaactgaattcgtctcatttatttatgtttaaggtgtgtcgtttattcacttgctccagctgctgctatcaccccaaccaaatcaattttgaaggccgaattatctaacaacatttccaaagggaatatttcaagttcacctacacggccgcaccttctcccgaacaacgtggagcaagcaatcatttcctgtagaataatatgcgaataatgaagtcataacaccttttgatttgaacaaagggaaaac

SEQ ID NO: 212534 - DNA, 2093 bp, Zea Mays
gtcatccgcgcgcccccgctctcctccatctgccgcgtgaagctctcccgaaaacctcctccacatcagcgccccccgccatgcccctgtatctcgcctagcacacgccgcgcccacgcaggcagccgtggatctcgcccccaccgtcgagcttccatggtaggcatcctcttccatactaggcggccatggcatgaacccatcccctatccgcgcccccatcgcacgggccctaatcctagaatggtgccttcctccttctctgtcgcctctgccctactcagaccttcgagacttccactggcgatacacacccactagggaattcttagaccaacatgaggaggaagaaatgcctcatgttattagtgttacaccagacgtacaagaggccattggacgggaatgaggagctatctgcaaactatcttcttgagcaagctggtgaggaagattaagccagagtagttttcgtatgggtacaaacatagctttgcgtcaatcgatgccaggcaaatgtagaacgcttggtagccggtcagcgctatgtgtagaacacatactccagagatgaacatggatcacgagaactggaataattgctgtcagccatggacccatgacatcggtggtttcgcgcacctcaaagacatgggtggggaggcatcgcggctgctgcacgccctctagagaatgcttatcgatcatcaggtgcattcaattacgctttcggttgctgcattgagaaatgaatcagtcgaactgtgaaccaactacttgaaatttcacgtgatgtggggtatagtggcaatgcataagcccacatggagcactgggtcttcgaggtgacacactgacattgcaactgaacacacttgtctatgtggctatggctacggtatacatagagtcgtacattaggtagcttattcaatcaaataatgtccggttttgtcatgaaagtgataataatcttctatataaacttggtcaaacgtaagacatttcacttaaaataaaaccagaacgtctctctttttcggtggagatagtattaatataatttcgaaaattctgatctgcgagttggtactttgataattcaaatccatgttgccaaaagctaactgatataatactttcttcaacagtaactatcatactatctgcatcttctatgatctattaaagtacctcacaagagatccaattaatgattcacacctgcaagataacacctgtagtggaaatccagttttctggtgtgagtctaaatatttcagaaacaatgaaagcatagaagaaaatgctgcagtaggacaatacctaattatcatgtgcatgcccctagaccctccatttttctcttagcgaggaagcagaaaaccaaactcaaatacaagaaatattagtcaatacaaagtggccaaatttctcgagacagaaaaagacaggtgggatgtagaaagggacttaaaagttgaaaccattggccccatgtactgcggcaaaatatttctcttcttctggcagtacagtagcttgcatcatatgtgacatcctctttatagtacaggaagtcaagaatagcccgagtgctcagcacatatgctacatgctcccaactacattaccccttctttgaagtggcgagcaaagcgagaagtttgagtggggcccaaaacctgagtggggcctaaatagaaacctacttactaatggacctttatagctacaatgaataagataaaaactccactgaaaccagaaaattgagtgggaccccgtgccccagtcagcccaacgtgagcctacccttgcttctctgctcagacatgcacataaactgaattcgtctcatttatttatgtttaaggtgtgtcgtttattcacttgctccagctgctgctatcaccccaaccaaatcaattttgaaggccgaattatctaacaacatttccaaagggaatatttcaagttcacctacacggccgcaccttctcccgaacaacgtggagcaagcaatcatttcctgtagaataatatgcgaataatgaagtcataacaccttttgatttgaacaaagggaaaac

SEQ ID NO: 212535 - DNA, 1991 bp, Zea Mays
gtcatccgcgcgcccccgctctcctccatctgccgcgtgaagctctcccgaaaacctcctccacatcagcgccccccgccatgcccctgtatctcgcctagcacacgccgcgcccacgcaggcagccgtggatctcgcccccaccgtcgagcttccatggtaggcatcctcttccatactaggcggccatggcatgaacccatcccctatccgcgcccccatcgcacgggccctaatcctagaatggtgccttcctccttctctgtcgcctctgccctactcagaccttcgagacttccactggcgatacacacccactagggtacaaacatagctttgcgtcaatcgatgccaggcaaatgtagaacgcttggtagccggtcagcgctatgtgtagaacacatactccagagatgaacatggatcacgagaactggaataattgctgtcagctgcattgaaacaggcagatcctattaacaactccgcattggctctctgccccagccatggacccatgacatcggtggtttcgcgcacctcaaagacatgggtggggaggcatcgcggctgctgcacgccctctagagaatgcttatcgatcatcaggtgcattcaattacgctttcggttgctgcattgagaaatgaatcagtcgaactgtgaaccaactacttgaaatttcacgtgatgtggggtatagtggcaatgcataagcccacatggagcactgggtcttcgaggtgacacactgacattgcaactgaacacacttgtctatgtggctatggctacggtatacatagagtcgtacattaggtagcttattcaatcaaataatgtccggttttgtcatgaaagtgataataatcttctatataaacttggtcaaacgtaagacatttcacttaaaataaaaccagaacgtctctctttttcggtggagatagtattaatataatttcgaaaattctgatctgcgagttggtactttgataattcaaatccatgttgccaaaagctaactgatataatactttcttcaacagtaactatcatactatctgcatcttctatgatctattaaagtacctcacaagagatccaattaatgattcacacctgcaagataacacctgtagtggaaatccagttttctggtgtgagtctaaatatttcagaaacaatgaaagcatagaagaaaatgctgcagtaggacaatacctaattatcatgtgcatgcccctagaccctccatttttctcttagcgaggaagcagaaaaccaaactcaaatacaagaaatattagtcaatacaaagtggccaaatttctcgagacagaaaaagacaggtgggatgtagaaagggacttaaaagttgaaaccattggccccatgtactgcggcaaaatatttctcttcttctggcagtacagtagcttgcatcatatgtgacatcctctttatagtacaggaagtcaagaatagcccgagtgctcagcacatatgctacatgctcccaactacattaccccttctttgaagtggcgagcaaagcgagaagtttgagtggggcccaaaacctgagtggggcctaaatagaaacctacttactaatggacctttatagctacaatgaataagataaaaactccactgaaaccagaaaattgagtgggaccccgtgccccagtcagcccaacgtgagcctacccttgcttctctgctcagacatgcacataaactgaattcgtctcatttatttatgtttaaggtgtgtcgtttattcacttgctccagctgctgctatcaccccaaccaaatcaattttgaaggccgaattatctaacaacatttccaaagggaatatttcaagttcacctacacggccgcaccttctcccgaacaacgtggagcaagcaatcatttcctgtagaataatatgcgaataatgaagtcataacaccttttgatttgaacaaagggaaaac

SEQ ID NO: 212536 - DNA, 2637 bp, Zea Mays
aacgccctagataatatcatcccttttcttttctgtacgtgtgcaaataaacaattttttccttctattttaatttttgaagaaaaactaaacagagaagtcgaggaaaaattgctgttagcagcggacagggggtgagcgagcgggccgaggattcatctcgtgtcgacgacgccttcgccctctccgagtctccgtccgtcttccgcgtcctccgcagctggactcgtgcgctattccccaggacgctactcccactagggttttcggattaggtttctagaaccttccaccgccgcctctccatgcacgcgccgccgctggtcacgttcgcagggggcgcctgccccaccaccgcctccgcttcgccgtcgccctggttggcctcgccgcgggacgccatctttgccgcgccggcgaggcccctacggtcccgccgcgggacactccggctggaagctaaggccgcgtggagggctgccggagggggacggggcccgcgggtcccggccaagggcgctgtgctcgcctcctatatgggcgccgaggaggtggtgggaccatcgtcgctgcttgacgaggaagagttcatttctcacatcagaaaggaactggataatggaaaacttcctgcagatgttgccagtaacctggaggagctgtattataattacaggaatgcggttctgcaaaatggagatccaaatgcatatgaggtcatgctttcaaatatgatgaccttgtttgatcgtgttctactggatgtacagaatccatttaactttccaccttatcataaagctttgcgagaaccgttcgactattacatgtttggtcagaactacattaggcctctggtagatttcaggaactcctatgttggcaacatttcccttttccatgatatcgaagagaatctccaccagggccacaatgttgttttgatgtctaaccatcagtcagaagcagatccagcaattattgccttgcttcttgaaaaaaccaatccttggattagtgaaaacatagtttatgttgctggcgatagggttgttaccgatccgctttgcaagccatttagcatgggaagaaatctcatttgcgtgtactcgaaaaagcatatgaatgatttccctgagctaattgagatgaagaggagatcaaatactcgaagtctcaaggaaatggcattgcttttacgtggtggttcacagttaatttggattgcaccgagtggtggtagagaccgcccaaatccctcatcaggagaatggtacccggtaaatggtcttatttttccattttgacttagctatgcattatagttcatcttctctttcaatgtaactgcattgctaagaccgtgttcagcacacccaaaacactattttgcactgtagactgaactgttcgcagagtggagtttgaatatgagtatggggatgggtaagctctaagctgctggagatagcctaacaaacaaatgaaatgagatggtacagtaacagtgtagaggtgtgaggtgtctgacaagaatgatctgttttttttacctaagacatgcttgaaaagtccgctgcttttgtaagtatgttcccttaggtttactttatctgctacatgcaaaaacaagggcaggcaccattcgattcatctgcagtggacaatatgaggaggcttctggagcatgctggtgttcctgggcacatatatccactatcattgctgtgctatgaggttatgcctccaccacaacaggttgagaaggagattggtgagcagagggtgatatccttccatggagcaggcttgtcagtaactgaagaaataaactatggagacattactgctcataccaagaatgctgatgagggaagggagctattcacaaataccttgtacaactcagttgttaaccagtacaatgtgctcaaatctgctatctttagagatcgtggagcagctgtatcaaacaatgtcatctcactgtcacaaccatggcgatgaatgtccagtttcgttactgaagttaccttttcaaaagagcaggtgaactatcattgtgcaattttgctgggagaaactcttgaacttaaatctttttgatatcactagacttcatcaatcatggtggagcctgttattgtcatgcagatgctcgctaagaagtctgcaactgttggttggtcaagggtgattggcgattttgcacatacggatccgcagttactgctgcctcaggttgctcagcaatgtgctgctggttgggcaccgaggaatccatcaggttgcatcctttttgcccggacgtcgatttgtgcagttgaagtggtaaacgtttttttatcttgtttcgtcatcatgtatatacgtaggcttgagtcattgttggctccacattttttggagatataaatgcggtaggagttatgagatgtccacagtcggccctcccttgttgaattcctttggatgtatcctctctctttcgtacatgcactcactgaaagtcaatgcaaatatctcgtgtttctagtacgtggctccgtgaccaccctgcagctcctgtctggagctggagcgtaaagaatctatcttactactctctgcagtgatttctttcatagatgatatccg

SEQ ID NO: 212537 - DNA, 2605 bp, Zea Mays
caattttttccttctattttaatttttgaagaaaaactaaacagagaagtcgaggaaaaattgctgttagcagcggacagggggtgagcgagcgggccgaggattcatctcgtgtcgacgacgccttcgccctctccgagtctccgtccgtcttccgcgtcctccgcagctggactcgtgcgctattccccaggacgctactcccactagggttttcggattaggtttctagaaccttccaccgccgcctctccatgcacgcgccgccgctggtcacgttcgcagggggcgcctgccccaccaccgcctccgcttcgccgtcgccctggttggcctcgccgcgggacgccatctttgccgcgccggcgaggcccctacggtcccgccgcgggacactccggctggaagctaaggccgcgtggagggctgccggagggggacggggcccgcgggtcccggccaagggcgctgtgctcgcctcctatatgggcgccgaggaggtggtgggaccatcgtcgctgcttgacgaggaagagttcatttctcacatcagaaaggaactggataatggaaaacttcctgcagatgttgccagtaacctggaggagctgtattataattacaggaatgcggttctgcaaaatggagatccaaatgcatatgaggtcatgctttcaaatatgatgaccttgtttgatcgtgttctactggatgtacagaatccatttaactttccaccttatcataaagctttgcgagaaccgttcgactattacatgtttggtcagaactacattaggcctctggtagatttcaggaactcctatgttggcaacatttcccttttccatgatatcgaagagaatctccaccagggccacaatgttgttttgatgtctaaccatcagtcagaagcagatccagcaattattgccttgcttcttgaaaaaaccaatccttggattagtgaaaacatagtttatgttgctggcgatagggttgttaccgatccgctttgcaagccatttagcatgggaagaaatctcatttgcgtgtactcgaaaaagcatatgaatgatttccctgagctaattgagatgaagaggagatcaaatactcgaagtctcaaggaaatggcattgcttttacgtggtggttcacagttaatttggattgcaccgagtggtggtagagaccgcccaaatccctcatcaggagaatggtacccggtaaatggtcttatttttccattttgacttagctatgcattatagttcatcttctctttcaatgtaactgcattgctaagaccgtgttcagcacacccaaaacactattttgcactgtagactgaactgttcgcagagtggagtttgaatatgagtatggggatgggtaagctctaagctgctggagatagcctaacaaacaaatgaaatgagatggtacagtaacagtgtagaggtgtgaggtgtctgacaagaatgatctgttttttttacctaagacatgcttgaaaagtccgctgcttttgtaagtatgttcccttaggtttactttatctgctacatgcaaaaacaagggcaggcaccattcgattcatctgcagtggacaatatgaggaggcttctggagcatgctggtgttcctgggcacatatatccactatcattgctgtgctatgaggttatgcctccaccacaacaggttgagaaggagattggtgagcagagggtgatatccttccatggagcaggcttgtcagtaactgaagaaataaactatggagacattactgctcataccaagaatgctgatgagggaagggagctattcacaaataccttgtacaactcagttgttaaccagtacaatgtgctcaaatctgctatctttagagatcgtggagcagctgtatcaaacaatgtcatctcactgtcacaaccatggcgatgaatgttagctttctcagttttggtccagtttcgttactgaagttaccttttcaaaagagcaggtgaactatcattgtgcaattttgctgggagaaactcttgaacttaaatctttttgatatcactagacttcatcaatcatggtggagcctgttattgtcatgcagatgctcgctaagaagtctgcaactgttggttggtcaagggtgattggcgattttgcacatacggatccgcagttactgctgcctcaggttgctcagcaatgtgctgctggttgggcaccgaggaatccatcaggttgcatcctttttgcccggacgtcgatttgtgcagttgaagtggtaaacgtttttttatcttgtttcgtcatcatgtatatacgtaggcttgagtcattgttggctccacattttttggagatataaatgcggtaggagttatgagatgtccacagtcggccctcccttgttgaattcctttggatgtatcctctctctttcgtacatgcactcactgaaagtcaatgcaaatatctcgtgtttctagtacgtggctccgtgaccaccctgcagctcctgtctggagctggagcgtaaagaatctatcttactactctctgcagtgatttctttcatagatgatatccg

SEQ ID NO: 212538 - DNA, 2591 bp, Zea Mays
caattttttccttctattttaatttttgaagaaaaactaaacagagaagtcgaggaaaaattgctgttagcagcggacagggggtgagcgagcgggccgaggattcatctcgtgtcgacgacgccttcgccctctccgagtctccgtccgtcttccgcgtcctccgcagctggactcgtgcgctattccccaggacgctactcccactagggttttcggattaggtttctagaaccttccaccgccgcctctccatgcacgcgccgccgctggtcacgttcgcagggggcgcctgccccaccaccgcctccgcttcgccgtcgccctggttggcctcgccgcgggacgccatctttgccgcgccggcgaggcccctacggtcccgccgcgggacactccggctggaagctaaggccgcgtggagggctgccggagggggacggggcccgcgggtcccggccaagggcgctgtgctcgcctcctatatgggcgccgaggaggtggtgggaccatcgtcgctgcttgacgaggaagagttcatttctcacatcagaaaggaactggataatggaaaacttcctgcagatgttgccagtaacctggaggagctgtattataattacaggaatgcggttctgcaaaatggagatccaaatgcatatgaggtcatgctttcaaatatgatgaccttgtttgatcgtgttctactggatgtacagaatccatttaactttccaccttatcataaagctttgcgagaaccgttcgactattacatgtttggtcagaactacattaggcctctggtagatttcaggaactcctatgttggcaacatttcccttttccatgatatcgaagagaatctccaccagggccacaatgttgttttgatgtctaaccatcagtcagaagcagatccagcaattattgccttgcttcttgaaaaaaccaatccttggattagtgaaaacatagtttatgttgctggcgatagggttgttaccgatccgctttgcaagccatttagcatgggaagaaatctcatttgcgtgtactcgaaaaagcatatgaatgatttccctgagctaattgagatgaagaggagatcaaatactcgaagtctcaaggaaatggcattgcttttacgtggtggttcacagttaatttggattgcaccgagtggtggtagagaccgcccaaatccctcatcaggagaatggtacccggtaaatggtcttatttttccattttgacttagctatgcattatagttcatcttctctttcaatgtaactgcattgctaagaccgtgttcagcacacccaaaacactattttgcactgtagactgaactgttcgcagagtggagtttgaatatgagtatggggatgggtaagctctaagctgctggagatagcctaacaaacaaatgaaatgagatggtacagtaacagtgtagaggtgtgaggtgtctgacaagaatgatctgttttttttacctaagacatgcttgaaaagtccgctgcttttgtaagtatgttcccttaggtttactttatctgctacatgcaaaaacaagggcaggcaccattcgattcatctgcagtggacaatatgaggaggcttctggagcatgctggtgttcctgggcacatatatccactatcattgctgtgctatgaggttatgcctccaccacaacaggttgagaaggagattggtgagcagagggtgatatccttccatggagcaggcttgtcagtaactgaagaaataaactatggagacattactgctcataccaagaatgctgatgagggaagggagctattcacaaataccttgtacaactcagttgttaaccagtacaatgtgctcaaatctgctatctttagagatcgtggagcagctgtatcaaacaatgtcatctcactgtcacaaccatggcgatgaatgtccagtttcgttactgaagttaccttttcaaaagagcaggtgaactatcattgtgcaattttgctgggagaaactcttgaacttaaatctttttgatatcactagacttcatcaatcatggtggagcctgttattgtcatgcagatgctgtaagcgctaagaagtctgcaactgttggttggtcaagggtgattggcgattttgcacatacggatccgcagttactgctgcctcaggttgctcagcaatgtgctgctggttgggcaccgaggaatccatcaggttgcatcctttttgcccggacgtcgatttgtgcagttgaagtggtaaacgtttttttatcttgtttcgtcatcatgtatatacgtaggcttgagtcattgttggctccacattttttggagatataaatgcggtaggagttatgagatgtccacagtcggccctcccttgttgaattcctttggatgtatcctctctctttcgtacatgcactcactgaaagtcaatgcaaatatctcgtgtttctagtacgtggctccgtgaccaccctgcagctcctgtctggagctggagcgtaaagaatctatcttactactctctgcagtgatttctttcatagatgatatccg

SEQ ID NO: 212539 - DNA, 2610 bp, Zea Mays
caattttttccttctattttaatttttgaagaaaaactaaacagagaagtcgaggaaaaattgctgttagcagcggacagggggtgagcgagcgggccgaggattcatctcgtgtcgacgacgccttcgccctctccgagtctccgtccgtcttccgcgtcctccgcagctggactcgtgcgctattccccaggacgctactcccactagggttttcggattaggtttctagaaccttccaccgccgcctctccatgcacgcgccgccgctggtcacgttcgcagggggcgcctgccccaccaccgcctccgcttcgccgtcgccctggttggcctcgccgcgggacgccatctttgccgcgccggcgaggcccctacggtcccgccgcgggacactccggctggaagctaaggccgcgtggagggctgccggagggggacggggcccgcgggtcccggccaagggcgctgtgctcgcctcctatatgggcgccgaggaggtggtgggaccatcgtcgctgcttgacgaggaagagttcatttctcacatcagaaaggaactggataatggaaaacttcctgcagatgttgccagtaacctggaggagctgtattataattacaggaatgcggttctgcaaaatggagatccaaatgcatatgaggtcatgctttcaaatatgatgaccttgtttgatcgtgttctactggatgtacagaatccatttaactttccaccttatcataaagctttgcgagaaccgttcgactattacatgtttggtcagaactacattaggcctctggtagatttcaggaactcctatgttggcaacatttcccttttccatgatatcgaagagaatctccaccagggccacaatgttgttttgatgtctaaccatcagtcagaagcagatccagcaattattgccttgcttcttgaaaaaaccaatccttggattagtgaaaacatagtttatgttgctggcgatagggttgttaccgatccgctttgcaagccatttagcatgggaagaaatctcatttgcgtgtactcgaaaaagcatatgaatgatttccctgagctaattgagatgaagaggagatcaaatactcgaagtctcaaggaaatggcattgcttttacgtggtggttcacagttaatttggattgcaccgagtggtggtagagaccgcccaaatccctcatcaggagaatggtacccggtaaatggtcttatttttccattttgacttagctatgcattatagttcatcttctctttcaatgtaactgcattgctaagaccgtgttcagcacacccaaaacactattttgcactgtagactgaactgttcgcagagtggagtttgaatatgagtatggggatgggtaagctctaagctgctggagatagcctaacaaacaaatgaaatgagatggtacagtaacagtgtagaggtgtgaggtgtctgacaagaatgatctgttttttttacctaagacatgcttgaaaagtccgctgcttttgtaagtatgttcccttaggtttactttatctgctacatgcaaaaacaagggcaggcaccattcgattcatctgcagtggacaatatgaggaggcttctggagcatgctggtgttcctgggcacatatatccactatcattgctgtgctatgaggttatgcctccaccacaacaggttgagaaggagattggtgagcagagggtgatatccttccatggagcaggcttgtcagtaactgaagaaataaactatggagacattactgctcataccaagaatgctgatgagggaagggagctattcacaaataccttgtacaactcagttgttaaccagtacaatgtgctcaaatctgctatctttagagatcgtggagcagctgtatcaaacaatgtcatctcactgtcacaaccatggcgatgaatgttagctttctcagttttggtccagtttcgttactgaagttaccttttcaaaagagcaggtgaactatcattgtgcaattttgctgggagaaactcttgaacttaaatctttttgatatcactagacttcatcaatcatggtggagcctgttattgtcatgcagatgctgtaagcgctaagaagtctgcaactgttggttggtcaagggtgattggcgattttgcacatacggatccgcagttactgctgcctcaggttgctcagcaatgtgctgctggttgggcaccgaggaatccatcaggttgcatcctttttgcccggacgtcgatttgtgcagttgaagtggtaaacgtttttttatcttgtttcgtcatcatgtatatacgtaggcttgagtcattgttggctccacattttttggagatataaatgcggtaggagttatgagatgtccacagtcggccctcccttgttgaattcctttggatgtatcctctctctttcgtacatgcactcactgaaagtcaatgcaaatatctcgtgtttctagtacgtggctccgtgaccaccctgcagctcctgtctggagctggagcgtaaagaatctatcttactactctctgcagtgatttctttcatagatgatatccg

SEQ ID NO: 212540 - DNA, 1475 bp, Zea Mays
cttacgataacattggtggttcacagttaatttggattgcaccgagtggtggtagagaccgcccaaatccctcatcaggagaatggtacccggcaccattcgattcatctgcagtggacaatatgaggaggcttctggagcatgctggtgttcctgggcacatatatccactatcattgctgtgctatgaggttatgcctccaccacaacaggttgagaaggagattggtgagcagagggtgatatccttccatggagcaggcttgtcagtaactgaagaaataaactatggagacattactgctcataccaagaatgctgatgagggaagggagctattcacaaataccttgtacaactcagttgttaaccagtacaatgtgctcaaatctgctatctttagagatcgtggagcagctgtatcaaacaatgtcatctcactgtcacaaccatggcgatgaatgttagctttctcagttttggtcgaccctgatctgaacttcatttcctggttcttctatttgcttgacaaatactagtatggtagggtccattaagtatgacttgaaattttgaatacttaaaaagattgcctggtgtttatgtgtaattttcatgcttaatgtctatagtggtgatcctttcttcccatctgacagttgcgcatagcatagtagcatgtaatcccatctatgtagattccatgaggttatgcttatggtaattgattcatttatatagtaagtaattttgctactatatgttaatctgtttatgttacatttgttcattgacactaactatttagatgggtgtgctaacagacgaattttgctactgcattcaggtccagtttcgttactgaagttaccttttcaaaagagcaggtgaactatcattgtgcaattttgctgggagaaactcttgaacttaaatctttttgatatcactagacttcatcaatcatggtggagcctgttattgtcatgcagatgctcgctaagaagtctgcaactgttggttggtcaagggtgattggcgattttgcacatacggatccgcagttactgctgcctcaggttgctcagcaatgtgctgctggttgggcaccgaggaatccatcaggttgcatcctttttgcccggacgtcgatttgtgcagttgaagtggtaaacgtttttttatcttgtttcgtcatcatgtatatacgtaggcttgagtcattgttggctccacattttttggagatataaatgcggtaggagttatgagatgtccacagtcggccctcccttgttgaattcctttggatgtatcctctctctttcgtacatgcactcactgaaagtcaatgcaaatatctcgtgtttctagtacgtggctccgtgaccaccctgcagctcctgtctggagctggagcgtaaagaatctatcttactactctctgcagtgatttctttcatagatgatatccg

SEQ ID NO: 212541 - DNA, 795 bp, Zea Mays
gaggtgtgggagtgggaccgtcagagactcggctacctctcctgcaaaatggctatggcagtggcttccttcgtcgccgcttcgcaccaccacggcagtcacctggccgccggcgtccccttctccgcgcgagtaggcaggagcttaggccgcagtggcgtcaccatctacatgagagcccagaagaagcgcaatagtgaatctgggagcagtagcggaggtggggacgtgcgggccagcagcgggcggcgagtgtggcgtcgtcggaaactgaccaaagaggatgacatgttgcgttacaagttggatcgtatcccttttctagaggagaaggtgagaaaagtaagggagaatgggaagatcatatgcctggacattaatcagctgatgttatctcaagagaatagatttgcattcaccatggaggtggctgaagaagctaatgtctatcttgagaagaacaggcatgaatatgggctgaagaagcctatactgcatgttctcagtgaccgcatgaatgaagctgggttttctcggcctgagggttacctttatccttatcctattaagcctggtccttatttcattaaagaggaaggaaattgagtaaaatcacgtgctacttgtaacaggattatcattttcaacaactatagtttggcctgcatccagacaaaagaacatattcagattaggaagattacgactgagatgcaggtgtcttgttggccgctcattatgtgatcctaggcagcgagcacctctctgaagttgaccatctatttgttcacctcg

SEQ ID NO: 212542 - DNA, 1176 bp, Zea Mays
tgggaccgtcagagactcggctacctctcctgcaaaatggctatggcagtggcttccttcgtcgccgcttcgcaccaccacggcagtcacctggccgccggcgtccccttctccgcgcgagtaggcaggagcttaggccgcagtggcgtcaccatctacatgagagcccagaccaaagaggatgacatgttgcgttacaagttggatcgtatcccttttctagaggagaaggtgagaaaagtaagggagaatgggaagatcatatgcctggacattaatcagctgatgttatctcaagagaatagatttgcattcaccatggaggtggctgaagaagctaatgtctatcttgagaagaacaggcatgaatatgggctgaagaagcctatactgcatgttctcagtgaccgcatgaatgaagctgggttttctcggcctgagggttacctttatccttatcctattaagcctggtccttatttcattaaagaggaaggaaattgagtaaaatcacgtgctacttgtaacaggattatcattttcaacaactatagtttggcctgcatccagacaaaagaacatattcaggtatggtattaatggtctagcaattaatatattgcacagaagcaagagcgaatcccatacctgcagatacattgaagagaagaattaaaaggatgatgccaagtgcaaaagtgtctttaggcatattttgttctcttcgactggtatgttattgccttaggaggattcatggggacgagctatcacacttctgccccttttatacatgggtgctggctgagacagctaaagatgaaataagttgtgacattatgtatggtctactagtaataattcctgtacagggttatgatgaaacacgtcacccaacagcacaaggtcaactacattcggcacttggcagaagctactttagaagtcgtactgcctttctagtaactaaggccaaagtaaactaaaacctatcatgttttagtagttgatacaatgccttttgtattatacttttctgatctgtgccagattatgtaatggcaccttagtcttggaatgctacatagcatgaggtgtgcttgtagttctttggtcatgtatgcattaacttatatggatctctattattttttgagcattaaagcatttttctgt

SEQ ID NO: 212543 - DNA, 719 bp, Zea Mays
tgggaccgtcagagactcggctacctctcctgcaaaatggctatggcagtggcttccttcgtcgccgcttcgcaccaccacggcagtcacctggccgccggcgtccccttctccgcgcgagtaggcaggagcttaggccgcagtggcgtcaccatctacatgagagcccagaagaagcgcaatagtgaatctgggagcagtagcggaggtggggacgtgcgggccagcagcgggcggcgagtgtggcgtcgtcggaaactgaccaaagaggatgacatgttgcgttacaagttggatcgtatcccttttctagaggagaaggtgagaaaagtaagggagaatgggaagatcatatgcctggacattaatcagctgatgttatctcaagagaatagatttgcattcaccatggaggtggctgaagaagctaatgtctatcttgagaagaacaggcatgaatatgggctgaagaagcctatactgcatgttctcagtgaccgcatgaatgaagctgggttttctcggcctgagggttacctttatccttatcctattaagcctggtccttatttcattaaagaggaaggaaattgagtaaaatcacgtgctacttgattaggaagattacgactgagatgcaggtgtcttgttggccgctcattatgtgatcctaggcagcgagcacctctctgaagttgaccatctatttgttcacctcg

SEQ ID NO: 212544 - DNA, 1102 bp, Zea Mays
tgggaccgtcagagactcggctacctctcctgcaaaatggctatggcagtggcttccttcgtcgccgcttcgcaccaccacggcagtcacctggccgccggcgtccccttctccgcgcgagtaggcaggagcttaggccgcagtggcgtcaccatctacatgagagcccagaagaagcgcaatagtgaatctgggagcagtagcggaggtggggacgtgcgggccagcagcgggcggcgagtgtggcgtcgtcggaaactgaccaaagaggatgacatgttgcgttacaagttggatcgtatcccttttctagaggagaaggtgagaaaagtaagggagaatgggaagatcatatgcctggacattaatcagctgatgttatctcaagagaatagatttgcattcaccatggaggtggctgaagaagctaatgtctatcttgagaagaacaggcatgaatatgggctgaagaagcctatactgcatgttctcagtgaccgcatgaatgaagctgggttttctcggcctgagggttacctttatccttatcctattaagcctggtccttatttcattaaagaggaaggaaattgagtaaaatcacgtgctacttgtaacaggattatcattttcaacaactatagtttggcctgcatccagacaaaagaacatattcaggttttgcgacgatgaaaaatgcaagcaacaggaaaccgatttcggagtcgcggcttcactgtagactggccactagttgttcacagcccgagcgtggttggattctagaaattggaaaccccactaccttgttgtcatgctgtgtgacacacgtagtacaaaggtcgtctcgaacaacatgactgcacatgcagcagagatgatatttcgtgacctgaaaatgtcagcatctgttgttctgtactgtgcctcattggcgttaacagtgcatgggtatttgacatgcaaagagaatgcataagtgaccgtgcaagtatttgacttagactgacgaagacttgtatacccgacggcatttaatttaggaaaataagaaactccaaacagagttgaagggatgtgtcgcacgagctaatgattgcac

SEQ ID NO: 212545 - DNA, 1038 bp, Zea Mays
tgggaccgtcagagactcggctacctctcctgcaaaatggctatggcagtggcttccttcgtcgccgcttcgcaccaccacggcagtcacctggccgccggcgtccccttctccgcgcgagtaggcaggagcttaggccgcagtggcgtcaccatctacatgagagcccagaagaagcgcaatagtgaatctgggagcagtagcggaggtggggacgtgcgggccagcagcgggcggcgagtgtggcgtcgtcggaaactgaccaaagaggatgacatgttgcgttacaagttggatcgtatcccttttctagaggagaaggtgagaaaagtaagggagaatgggaagatcatatgcctggacattaatcagctgatgttatctcaagagaatagatttgcattcaccatggaggtggctgaagaagctaatgtctatcttgagaagaacaggcatgaatatgggctgaagaagcctatactgcatgttctcagtgaccgcatgaatgaagctgggttttctcggcctgagggttacctttatccttatcctattaagcctggtccttatttcattaaagaggaaggaaattgagtaaaatcacgtgctacttggttttgcgacgatgaaaaatgcaagcaacaggaaaccgatttcggagtcgcggcttcactgtagactggccactagttgttcacagcccgagcgtggttggattctagaaattggaaaccccactaccttgttgtcatgctgtgtgacacacgtagtacaaaggtcgtctcgaacaacatgactgcacatgcagcagagatgatatttcgtgacctgaaaatgtcagcatctgttgttctgtactgtgcctcattggcgttaacagtgcatgggtatttgacatgcaaagagaatgcataagtgaccgtgcaagtatttgacttagactgacgaagacttgtatacccgacggcatttaatttaggaaaataagaaactccaaacagagttgaagggatgtgtcgcacgagctaatgattgcac

SEQ ID NO: 212546 - DNA, 1201 bp, Zea Mays
cgcctctgccgttactgaattttaaggcttaccttgagcactttactaaagcaggacatatgatattctggtccattgaatatgtgagaaaaatgcagtcatatgcccggcttccatacttgcagaacttgaatgctaagtctctcacccgttcttttgtagccagattgcgggtagacgacgtatcggcaaagatcatgtcgttctcgcagcacgggacacgcgcggtctgcatcctttcagcaaacggcgccatatcaaatgtgacgcttcggcaatctgccacttcgggtggaacggtgacatacgagggtcgtttcgagatactgtctctgtccgggtcgtttcttctgtcagagaacggtggccagcgcagtcgaactggtgggctcagcgtttcgctagcaggccccgacggccgtgtcctgggtggctgtgttgccggactcctgacggctgcttcaccggtacagatcgtagtggggagcttcgacgccggtggaaagaagcagccgaagcagcagcagcagcagcagcttgctccgtcaccggcgccactaaatctcgcgccgacgggcgtggcggcagggccgagcagcccgccgtccagaggcacattgagcctaagcgagtcgtccagtggcgccccgccgagcccgccgcacgcaggggccagcggtggccatgggcagcagcagcagcagccacagccaggtggcttctccggtctgttctggaaatgacgagacccccggacaccgtctgaccgtggtagaactggcagaaaggactaaaggcgcgtgaggcactcgtcgaggccgaagctcactcggtgagaagcagcggtagcttgtaggtggtgtcaagactgtgtagctcttgctgttgctgtaggtgtaaatcgtgcgttgtgattgtgaggtggttgcttattgtctgtcgtctggaatggatgccgtgtactgaacctgtgcccccaatgcagcatgtcggaagttcttggtttcttctgcttgggtgcatcggcttgccgcacgatatgcatccatgcccataataatacgtgtatagatccaccttgttgtgaaggtcacacacaactcacaatgcaaacttgtctgaaaagattgatacaaaatggcaaattttcgcgctgctgctggagctgcgcggcggcagccgcacgcctcgtggcgcggaa

SEQ ID NO: 212547 - DNA, 2115 bp, Zea Mays
caaaagcataggaggccgcaaactaaataaaataagcatagggggtcaaataaggtagacccttaccaatgcaatcctgacgtgcttcacttacccgcctaattttctttttattcccggctaaaaccattttcttttcacaaaagattacgtgccaacttccaagaggagagctcggaaaaggaaaagaaacgaaagaaaggaaaatcgaggtagaagaaggctatgtgatgtgaggggaaattacgtgagatataagccaaatccattgaattctatcgttagctggctgcttgagctgagttctttgattggcctccgtgctatactaatttctgaagacctcctggaggaattctctgcttcatttctcgagcggctcttacccgcttcgccggttgtccgatttgctgtgaagcaggagagcggccgccttcagtcaaggaaaatcgctgaagacagccgcagattgccagattcgtagttccgcttctgcttcggcgcacctgttcggtgtggaatgatggaggtgagcccgtctccggagcaaggagtgatggcgggaagggagccgttcgggctgccgaagaccccggcaacgccgccgtcctccgggggcacgcagggcctgcgcatggcgtacacgacggacggcaccgccatcttcaccccggtgagctccgtgccgcccgcgacggcgacataccagcccgtgggcggcagcgccgcgtctgcttcaagcttggctggcgtaggaggcaatggtggcgcgcccgtgcactcgggtggcgcgggtgagccggggaccaagaaaaagcgtggccggccaagaaagtacggccccgacggctccatgtcgctggcattggtgcccgcatccatggctggggagccggcgccggcggctcttggagcttccggtcctttctcgcctaacggcccgaaggcgccgaacactgcgccgtcagcgtcgccggacggcgcgaagaagcggggccggccgaagggctccaccaacaagaagcacgtggctgcgctcgggccagcgggggcaggttttacgcctcatcttatttttgtaaaagccggagaggacgtatcggcaaagatcatgtcgttctcgcagcacgggacacgcgcggtctgcatcctttcagcaaacggcgccatatcaaatgtgacgcttcggcaatctgccacttcgggtggaacggtgacatacgagggtcgtttcgagatactgtctctgtccgggtcgtttcttctgtcagagaacggtggccagcgcagtcgaactggtgggctcagcgtttcgctagcaggccccgacggccgtgtcctgggtggctgtgttgccggactcctgacggctgcttcaccggtacagatcgtagtggggagcttcgacgccggtggaaagaagcagccgaagcagcagcagcagcagcagcttgctccgtcaccggcgccactaaatctcgcgccgacgggcgtggcggcagggccgagcagcccgccgtccagaggcacattgagcctaagcgagtcgtccagtggcgccccgccgagcccgccgcacgcaggggccagcggtggccatgggcagcagcagcagcagccacagccaggtggcttctccggtctgttctggaaatgacgagacccccggacaccgtctgaccgtggtagaactggcagaaaggactaaaggcgcgtgaggcactcgtcgaggccgaagctcactcggtgagaagcagcggtagcttgtaggtggtgtcaagactgtgtagctcttgctgttgctgtaggtgtaaatcgtgcgttgtgattgtgaggtggttgcttattgtctgtcgtctggaatggatgccgtgtactgaacctgtgcccccaatgcagcatgtcggaagttcttggtttcttctgcttgggtgcatcggcttgccgcacgatatgcatccatgcccataataatacgtgtatagatccaccttgttgtgaaggtcacacacaactcacaatgcaaacttgtctgaaaagattgatacaaaatggcaaattttcgcgctgctgctggagctgcgcggcggcagccgcacgcctcgtggcgcggaa

SEQ ID NO: 212548 - DNA, 3339 bp, Zea Mays
cttagatggccggccttcttgcagaacgaaattactagctggagatcctaatcgtaacaatctagataatgttcaccagagatcctaattcctagccgtatcaatctgggagctccatcaatctagaccaaagatcctaaccatattgtcagcatgctctccaaatagattatagagtccagtttcaccacgttttcattcttcctattgtcagcatcgctctccaaatcccaaaaccctaacctatccatcgtcgccaccgtttaccgtcgctgccgccaatatgggagcaagaggaggaggaggaggcggccgcaaggcccgcaactttgcgaccttccgcctcttcccgcgcgccggcgccgccgaccccaacgaccgcgtgttcgtacgcgtcgacaacaacgactacactgtccccgggttcgccgacgaggactccttcgacccatcccggtccgacccttccgccggcaatggaaacttcggctccgcatccggccccctcccggagcacgtccgccgcgagatcctcgagctcggcctccctgacgacggttacaactacctctcccacctccgcgagctccgtcccgccgccgccgcagcctcatccttcgtccccagctccaccggtcgcccggagcccctcccgctcgatgtcaaggcttatgatgcaagcagggtacgcattggtctcagcgagggtgaactggacgaggggaagacgatgtgtaaggtggctgccaagactgcgccagtgaggcgaattgagaaggctgtcgacccagatatcgccaggttgctcgatgagagcgatgtgtctcatgttgggtccgaggatgaggggctggaggaggattttgtcatcatagctaaccaagctgaggaggaggaggaggatgaggatggagacatggaagaaaagcaagagtggaatggtgtcttcagtgatgttgaagaggaggagttcgattttgaggaggatgagccaaagccaagagtgagacgattgctggatgaacaatttgatttgcttgctttagaggaatatggagacagtgatgatgatgacatgggtgttaaaggtggggaatatgaactgccaaatgaggctattgatgaactgaaactgttccaaaatcagaatgtatgtgttgatgaagaatatagaacaccagcagattttgttcgtcaaaaactggattcaagcatggctgatgaggtggatgaatctgctcgtgtgataaaaaaatgtgctgaatatgctgaaatatatttaaatgaaactgcagaagaggaggtggttgtgcttgtttcggaaagcagtgatgaatctgaagtttgggactgtgagaccattgtttccacattctctaaccttgataatcatcctgggacaattgaaactccaggaatctccagagcgcggttccctagggttttccctggagaaacaactacaacaaatggcatcatcaagcttcatgggaaagagaaactgccagtagaatacctgccacagaggagaagaaatggtgaaaaggagaagaaagtaaagcctgtagaagcttctgtcactgataaatttaaaaaaggagctgagaaggaaacaaaagaggagaagaaggcaagaaaggcagcagtgaaagaagaaaagagagaagcccggaaagcaaagaaagagctcaaaggcctgtataaatcagaaacgcagaaggctcagaaagttgccgctgttactggaccttcttccattcgactaatgtgatggttgatctgtggcacgtttactgatgagcgacgactatgacagtcttgaatccaaaagatcgcctggacaaatgcatcaaagctacgaacgataggcgaagaggcagtggtagacatgccaaggtcatcagccggggcgtcatgcacagcagttgaccattctgagcagagcagaaaggatgatgaatatgagaggctggttacaagagctcaacatgcaacatctgatgttggcacgacaattttatctgagcaaccaaagtcaagatctttcatttggtggatgaaagttctgcttggctgcttccttcttatattagtgggctatgtcttcgtgaaatggggggtcccctttgtctttgagaaggttctcttgccaatcatgcaatgggaagccagtgcttttgggcgtccagtattagctattgttctcgttgcatctttggctctctttccagttattctagttccttctggaccttctatgtggttagcaggaatgatctttggatatggttggggtttcttgattataatggccgggagtactattggcatggtggttccatattggattggttcattgttccgtgaacgtctgcatgtatggctgacaaagtggcctcagcagatagcactaataaaactcgcgggtgaaggaaattggttccagcagtttcgggttgtcgcgcttttcagaatctcaccattcccatatacaatttttaattatgccgtgactgtgacagaaattaagttcaacccttatctatgtggttctgttgctggaatggtacctgaggccttcatttatatctacagtgggcgtttaatacgtacattggctgacatgaagtacggcaactataaaatgacaccagtggaaatagcatacaacgccatttccttcgtcatcgctatcgccctcacggtcgccttcacggtgtacgcgaagagagctctgggtgacataaaaagtccggacgatggcatcggtaaagacgaagaagatcacggcccaaatggctcaggggtgcgtatgaatcgtcgtcaggagcgtgccgacgcacgttacatagaactagatgatatgtgatggtgtgttggcccggatcttgcttggaaggaggcaccagtaggtcattaggtgcacggctacggtaggtagctagctatagtttacaagaggaggctaaaataatccacacccagctgacgtggtttgcgtgattcgtttcgtgtgctttgcctactgcactgccatactgtctgaatctgaaggtgcagggctactcactactgagttactgaccgagcgatgctgctctcaacgatgtttctgtgaccatcagcgtatcaatcagtccttgatctgaagcctacactggagcttcatgttgaagcatacattggacttgagtagtacatttgtatataacgtaactgctaatagagttagcatatgatctagttttgaacatgaagctcgtgggctgttcagccatgttcggtcccatcctgtctctgtctcaaattatatgttattatgggttttgttttttctgt

SEQ ID NO: 212549 - DNA, 1293 bp, Zea Mays
atcctccggctcctgccagacctaggctatttcccgatcagacctgttatttcccgatcagacctattcctctctcggcctcccaccgccaccggcggcgacgagtaactcgcccgctgaccccagcaggcagccatgggagggcacggcgggttgaacatcctgccgcagaagcggtggaacgtctataacttcgacaaccgtgagaaggtgcaaaaagacgaggccgccgccgcccgggaggagcagctccagcgcgaggcggaacgccgccgcgagtcggatctacgcctcgctgcactacgccgtaaccgcggcctggtccaggcggagacgccccccgctcctccatctcaccccgccggccccgctgatccggcggacgcccttccttccccggcggacgcccttccttccccggcaacggatggagaccacatcaacctcttctcaggtggatcaggcgtcgccactgatttcgatgcgctcgcctcggccagtggtgggaggggcgcggctcgggagcgggagcctgatgccgaccctaaccctaagaagcggaagaagaaggaagaggaggtgagggttgtggggcccgatgaggagaagaagaagagagaggccaaggagaaggaacgcgagcgagccatccttgttgctgcagggaggaaggagagacaggtggatcgggggcgccagtcaagatgggctcggtgatgtaaggattttcatggtataatgtccaagaatactaaggaattaaggataagtcatcgaaccgggcatggcctgactaccttaccatgcagatgcatgtggctgcaaaaattacaccgttcagttgccaaaggatagttgtgagcagtccaagagcatcatgatatcagtaacaagaagattgtatcatttgttggaaatcaatttatttggatctttttttgtaaaatattccgtgtaatatactgagaatgcaatgaagtcatgaagctagcagtacatgtaacacaggtgttgcttgctgtttgtaaagctatttacttggattgccccgcccttcccccctttttttgaaatttcttcaatggcagataacttcaacttgcctgagtatcgttaggagcatcccgaaccatctccctgcaaagttgtattgcatgctactggcacgattgttgttttttttttgcatgatacagaaaccaaacaacaatcacttttccagtgattcgtgtaaatacatcatgtggatcaaaatacatgctattgtactccgcacccccacccccacccccg

SEQ ID NO: 212550 - DNA, 2352 bp, Zea Mays
ttcccaactgcccactacctctcgttcccgtctccttcctctattcgtgttgtccgttcgctgccgccgtcgcctggttcgcatcgcatacagcgcctcagtccagatcgatcctccctcttcccagatcgggtctagttggacggcagcagccgccgccgcggcatctgtcatattcacgccgcgtgtgctctctctttctgtctccctctctatctgcgacgactgggtgtgataccgcagccgccgccctacgctgggttcccgagccttcgccgatctcttctccggcgaagagcgcccaccaggagctgcttgtggagatgatcagcttgtcatcttcgatgcttctgatggcctccttaacctgtcggtcaatggggttctgatgcaagatcgcgtttttgcctgccagaagctcggcttctactttggcagtggatgcctccgctgcagcaacctttcagatgcgtggaggagtgccgtaaagcagtactgtggtgaagggagcgaaaagagccatgcaactttacatcaagatgtgccaaggaagctcttgaggtggtccacagaaaatagctcaaggaatgcatgtgaaaggtctgggttgaatgaaaataatcaggacattggtgattcttcagaaaagcaggagcatctcctggctgtgccaggtgtgattctcttatgctgtggccttatgttaccatgctttcatgctgaaaggaaagaagtcagcaggcatgacaatgcaaccattcagcgcaacgcacttgaatcagtttcatcctatgaaggaagcatgtcatctgagaaagtcccaccaactccacatcgaatacctccaagtccctctagatttgcgccgtctccacagatagctagagttggatctgtcaacttaagcatccagcagatcctcagggcaactcagaacttctcaccttcatttaagttaggtgaaggaggatttgggatggtctacagggctgtattgccagatggcaatgttgttgcggtcaagagagctaaaaaggatcagtttgcaggtcctagggatgagttcagcaatgaagtagacttgcttgctaagatagaccaccgaaatttggtgaggttactgggttttactgataaaggaaatgagcgcattatcatcactgagtatgttccaaatggtactcttagagaacatctagatggtcaacatggaagagtcctagattttaatcagcgtctagaaattgcaattgacgtggctcatgcacttacttatcttcatctgtatgcagagaagactataattcatcgtgatgtgaagtcatcaaacatcctgctgacagatagctatcgggccaaggtgtctgactttgggtttgcaagaagtggccctagtgacacggagaagacacacatatcaacgaaagtgaaaggcacagctgggtacctggaccccgaatacttgaggacataccagctaactccaaagagtgatgtcttctcatttggcatattgcttgtagaaattctttctgctcgcagacccgtagagctgaagcgaacccctgaagagaggatcacaatcagatggactttcaaaaaattcaacgaaggcaacacgagagagatactggacccattgctggaagatcacgtggacgacgaggtgcttgaaaagctccttagcctggctttccaatgcgctgctccgacacgggacgaccggccgaccatgaaggaagttggggagcagctgtgggagataaggaaagagtacggaaagagtgttaggaaggtgtgaagatcatggaaaacatttccctgtttctcaagactttccctggaccaaggggactaagggggtgtttggttttatagggattaaattttagttcttccattttattctatttaagtccctaaattaccaaacacggaaatcaaaactttattttagttttagtatttggtaatttagagacttgaatggaataaaatggatagactaaaaataagttcctagaaatcaaacaccctctaagcatgcgaagtatttgtgcccattggataaacacctgatcatctatgtttcttggaagatgtgacctgaagaaatgtacagtgcgataacaccgccatcagtttgtgctttcttgtctcagtttgcagtgcactccctctatggagaatgtatattttggagttctcgcatttcttgattctgttgatatggtattctgatggatgtacccgcatacattactgcaaacggtctgaaataatatacgaagggaaattgtttgtattggaagacactgaagcttccggatgcaatctttatttatagtatta

SEQ ID NO: 212551 - DNA, 4131 bp, Zea Mays
ctcgcccccattttttaaacccctcttgtctccctcctccgccttctctcccctgccccgttgcttcccagtcccagctccgccccgtcccacgcgtgcgctcgaccgaccacctccgcgcctcggccgacggcgtgtggagcctgcggtaaccgccgcgactcgcaggcctggatcggggagaggcgcgcggcggaaggttcggagagtgcctgagcttaggcgctgcggatgaactggggcctcggcacggcgcctggtgtggtgctgcgcggcgaaggttcattggcgctcgccttgctcctccgctgatccgatccgagttttatactccgaattttcgtcgaaaggctgggtgtcagcaggccaccgctacactagtagttcgtaaaaggtggtggtggtaggagaaggtgggggtgaatattcgcgtattcggacgccggatttggttcaggatctcgtcgagatgaaggatcacggatcgggcggcgtcactcccagccccgcagaaggggaaaagaaacccatcaactcggagctgtggcacgcttgtgcggggcccctggtgtcgttgcccccggtgggcagtctcgtcgtatacttcccgcagggccatagtgaacaggttgctgcttcaatgcataaggagctggacaccgtccccagctacccatctctgccttctaagttgatctgcaagctcctaagtctcaccttacatattctgaaactgatgaagtttatgcccagatgatgcttcagcctgtgaacaaatatgatcgagacgcaatgctggcatctgaactgggtctgaaacaaaacaagcaaccaacagaattcttttgcaagacgttgacagcaagcgacacaagtacgcatgggggattctcagtgccacgccgtgcagctgagaagatatttccaccgctagactttacgatgcaaccaccagcccaagaactcattgccaaggatctgcatgatatttcatggaaatttcgacatatctatcgaggtcaaccgaagaggcatcttttgacaactggttggagtgtcttcgtcagtacaaaaaggctgttagccggtgattcagttctctttataagggacgagaaatctcaacttctcttaggtataaggcgtgctagcagaccccaaccagctctgtcatcatcagttttatcaagtgacagcatgcacattggaatccttgcagcagcagcccatgctgccgcaaatagtagcccatttactattttctataacccaagggcaagcccatcagaatttgtcatccctttagcaaaatacaataaggctttgtatacacaagtgtcccttggaatgcgattcagaatgctctttgagacagaggattcaggggtaagaagatacatgggcacgatcacaggcattggcgacttagatccactgcgatggaagaattctcattggcgaaaccttcaggttggttgggatgaatcgactgcatctgagaggcgcacccgtgtttcgatatgggagattgaaccagttgctacaccattttatatatgcccaccaccatttttcaggccaaagcttcctaagcaagcaggaatgccagatgatgaaaacgaggttgagagtgctttcaaaagagcgatgccatggcttgctgatgacttcgctctgaaagatgtccaaaatgcattatttccaggcctgagcctagttcaatggatggctatgcagcaaaatcctcagatgctagcaactgcttcccctgctgtacagtcgcagtacttgacctctaatgcactgggtatgcaggatgggataggcagtgtcagtgaagatccaacaaaaagattgactatgcaggcccaaaatattggcttacctaatttacaggctggttcgaaagtggaccaccctgcaattaccccattagctcaacaccagcaacagcctcaccatgtattgcaacaacagcaggtccaaccactgcagcaaagttctgcgatcctacagcaacagcaagcccagttgttgcagcaaaatgccattcacttgcagcagcagcaagaacaactccaacggcaacaatcacagccgcagcaacagttcaaagctactgcatgtcttcagtcatcggatcagcacaagctgaaagagcaacagccttcaggtggacaagctgcctcacaagtacatttgttaaaccagattttgcaaccatcttcatctcagctacaacagctgggtttacccaagtcacctactcagcgcccagggttaccaagtctaacaacaatgggttctttgcagcagtcacaattacctcagactccacagccgcaacaaacagcagaataccaccaggcactcctacaaagtcaacaaccccaactacaacagctatcacaatcagaactgcagctgcagctgcttcaaaagattcaacaacaaaatctgctatctcaactgaacccacagcatcagtcccagctgatccaacaattgtctcagaaaagccaggaaattctccagcaacaagttcttcaacatcagtttggtggtgctgatgccatgggtcagctcaaacatttacagcaaacacctttgaaccataatacaggatccttgccaccccagcaacttgtaagatcacactcagcactcactgagagcgaagaaccttccagctcaacagttccatctggcagccgtatctccccaataaattcatttagtagagcaaaccaaggaaccagaaatttgcctgagatgccagcaacaccgcacattgagcacttacttcaggaaattcaaagtaagacagataatcgaatcaagaatgatatacaaggtagtaaggaaacggtccatgcacctaatcgtcatctagcttcagatcaacttgatgcgtcatctgctacctccttttgcttagatgagagcccacgagaaggcttttcctttcctccagtttgtttggataacaatgttcaagttgatccaagagagaattttcttattgcggaaaatgtggacacattaatgcctgacgccctgttgtcaagagggatgtcgtctggaaagggtatatgcaatctaccttctggacaaagggatcatagggatgtggaaaacgagctatcctctgctgcattcagctcccagtcatttggtgtgccggacatgtcttttaagcctggatgttcaagtgatgttgctgttgctgatggtggaatggcaagccaaggactgtggaatagtcaaacacagcggatgagaaccttcaccaaggttcaaaagcgtggatccgttgggagatcaattgatataacacggtaccgaggttacgaagatcttcggcatgatcttgcatgcatgttcggtattcaagggcagcttgaagatccctacaggacggactggaagctggtctatgttgaccacgaaaatgacatcctccttgttggcgacgacccatgggaggagtttgtaagctgtgtcaagagcattaaaatattgtcatctgttgaagtacagcaaatgagcttggatggtgaccttggctgcatccctcaaactcaagcctgtagtgcttctgatgacgcaaatgcatggagggcctgacgtaaatactaatatgttccttaccatttttaaacaatactgagagtcaggggtcaaagaagtgaaacacacgtctaacgtaatcacgaggtactgttacttagagccaactcactgacagagtcgatgagaagctcgtggcggaagttgttcagcaagctgccatattttggaggccttgacggctgacgctttgttccactgaaatcgggtaattactcaacacaatcatattagtttccttcttgtgtgtgtaagttgggtgggggtggggggtataatgaatttgagaagctactctgcttattagaacctacattcactgtaatcctcctacaaagttgttcgattatctcagtgtatatatgtgcgctgtagaaccgtgactgtcagttttgcaactcgcaatccccaatgtaattgttcctgtgtgctgctttaacagctgaagtactattataaattgtattatctgtaacagaaaaaagatttggtgtcgggata

SEQ ID NO: 212552 - DNA, 4152 bp, Zea Mays
ctcgcccccattttttaaacccctcttgtctccctcctccgccttctctcccctgccccgttgcttcccagtcccagctccgccccgtcccacgcgtgcgctcgaccgaccacctccgcgcctcggccgacggcgtgtggagcctgcggtaaccgccgcgactcgcaggcctggatcggggagaggcgcgcggcggaaggttcggagagtgcctgagcttaggcgctgcggatgaactggggcctcggcacggcgcctggtgtggtgctgcgcggcgaaggttcattggcgctcgccttgctcctccgctgatccgatccgagttttatactccgaattttcgtcgaaaggctgggtgtcagcaggccaccgctacactagtagttcgtaaaaggtggtggtggtaggagaaggtgggggtgaatattcgcgtattcggacgccggatttggttcaggatctcgtcgagatgaaggatcacggatcgggcggcgtcactcccagccccgcagaaggggaaaagaaacccatcaactcggagctgtggcacgcttgtgcggggcccctggtgtcgttgcccccggtgggcagtctcgtcgtatacttcccgcagggccatagtgaacaggttgctgcttcaatgcataaggagctggacaccgtccccagctacccatctctgccttctaagttgatctgcaagctcctaagtctcaccttacatgcagattctgaaactgatgaagtttatgcccagatgatgcttcagcctgtgaacaaatatgatcgagacgcaatgctggcatctgaactgggtctgaaacaaaacaagcaaccaacagaattcttttgcaagacgttgacagcaagcgacacaagtacgcatgggggattctcagtgccacgccgtgcagctgagaagatatttccaccgctaggtaacatgttcgataggactttacgatgcaaccaccagcccaagaactcattgccaaggatctgcatgatatttcatggaaatttcgacatatctatcgaggtcaaccgaagaggcatcttttgacaactggttggagtgtcttcgtcagtacaaaaaggctgttagccggtgattcagttctctttataagggacgagaaatctcaacttctcttaggtataaggcgtgctagcagaccccaaccagctctgtcatcatcagttttatcaagtgacagcatgcacattggaatccttgcagcagcagcccatgctgccgcaaatagtagcccatttactattttctataacccaagggcaagcccatcagaatttgtcatccctttagcaaaatacaataaggctttgtatacacaagtgtcccttggaatgcgattcagaatgctctttgagacagaggattcaggggtaagaagatacatgggcacgatcacaggcattggcgacttagatccactgcgatggaagaattctcattggcgaaaccttcaggttggttgggatgaatcgactgcatctgagaggcgcacccgtgtttcgatatgggagattgaaccagttgctacaccattttatatatgcccaccaccatttttcaggccaaagcttcctaagcaagcaggaatgccagatgatgaaaacgaggttgagagtgctttcaaaagagcgatgccatggcttgctgatgacttcgctctgaaagatgtccaaaatgcattatttccaggcctgagcctagttcaatggatggctatgcagcaaaatcctcagatgctagcaactgcttcccctgctgtacagtcgcagtacttgacctctaatgcactgggtatgcaggatgggataggcagtgtcagtgaagatccaacaaaaagattgactatgcaggcccaaaatattggcttacctaatttacaggctggttcgaaagtggaccaccctgcaattaccccattagctcaacaccagcaacagcctcaccatgtattgcaacaacagcaggtccaaccactgcagcaaagttctgcgatcctacagcaacagcaagcccagttgttgcagcaaaatgccattcacttgcagcagcagcaagaacaactccaacggcaacaatcacagccgcagcaacagttcaaagctactgcatgtcttcagtcatcggatcagcacaagctgaaagagcaacagccttcaggtggacaagctgcctcacaagtacatttgttaaaccagattttgcaaccatcttcatctcagctacaacagctgggtttacccaagtcacctactcagcgcccagggttaccaagtctaacaacaatgggttctttgcagcagtcacaattacctcagactccacagccgcaacaaacagcagaataccaccaggcactcctacaaagtcaacaaccccaactacaacagctatcacaatcagaactgcagctgcagctgcttcaaaagattcaacaacaaaatctgctatctcaactgaacccacagcatcagtcccagctgatccaacaattgtctcagaaaagccaggaaattctccagcaacaagttcttcaacatcagtttggtggtgctgatgccatgggtcagctcaaacatttacagcaaacacctttgaaccataatacaggatccttgccaccccagcaacttgtaagatcacactcagcactcactgagagcgaagaaccttccagctcaacagttccatctggcagccgtatctccccaataaattcatttagtagagcaaaccaaggaaccagaaatttgcctgagatgccagcaacaccgcacattgagcacttacttcaggaaattcaaagtaagacagataatcgaatcaagaatgatatacaaggtagtaaggaaacggtccatgcacctaatcgtcatctagcttcagatcaacttgatgcgtcatctgctacctccttttgcttagatgagagcccacgagaaggcttttcctttcctccagtttgtttggataacaatgttcaagttgatccaagagagaattttcttattgcggaaaatgtggacacattaatgcctgacgccctgttgtcaagagggatgtcgtctggaaagggtatatgcaatctaccttctggacaaagggatcatagggatgtggaaaacgagctatcctctgctgcattcagctcccagtcatttggtgtgccggacatgtcttttaagcctggatgttcaagtgatgttgctgttgctgatggtggaatggcaagccaaggactgtggaatagtcaaacacagcggatgagaaccttcaccaaggttcaaaagcgtggatccgttgggagatcaattgatataacacggtaccgaggttacgaagatcttcggcatgatcttgcatgcatgttcggtattcaagggcagcttgaagatccctacaggacggactggaagctggtctatgttgaccacgaaaatgacatcctccttgttggcgacgacccatgggaggagtttgtaagctgtgtcaagagcattaaaatattgtcatctgttgaagtacagcaaatgagcttggatggtgaccttggctgcatccctcaaactcaagcctgtagtgcttctgatgacgcaaatgcatggagggcctgacgtaaatactaatatgttccttaccatttttaaacaatactgagagtcaggggtcaaagaagtgaaacacacgtctaacgtaatcacgaggtactgttacttagagccaactcactgacagagtcgatgagaagctcgtggcggaagttgttcagcaagctgccatattttggaggccttgacggctgacgctttgttccactgaaatcgggtaattactcaacacaatcatattagtttccttcttgtgtgtgtaagttgggtgggggtggggggtataatgaatttgagaagctactctgcttattagaacctacattcactgtaatcctcctacaaagttgttcgattatctcagtgtatatatgtgcgctgtagaaccgtgactgtcagttttgcaactcgcaatccccaatgtaattgttcctgtgtgctgctttaacagctgaagtactattataaattgtattatctgtaacagaaaaaagatttggtgtcgggata

SEQ ID NO: 212553 - DNA, 4135 bp, Zea Mays
ctcgcccccattttttaaacccctcttgtctccctcctccgccttctctcccctgccccgttgcttcccagtcccagctccgccccgtcccacgcgtgcgctcgaccgaccacctccgcgcctcggccgacggcgtgtggagcctgcggtaaccgccgcgactcgcaggcctggatcggggagaggcgcgcggcggaaggttcggagagtgcctgagcttaggcgctgcggatgaactggggcctcggcacggcgcctggtgtggtgctgcgcggcgaaggttcattggcgctcgccttgctcctccgctgatccgatccgagttttatactccgaattttcgtcgaaaggctgggtgtcagcaggccaccgctacactagtagttcgtaaaaggtggtggtggtaggagaaggtgggggtgaatattcgcgtattcggacgccggatttggttcaggatctcgtcgagatgaaggatcacggatcgggcggcgtcactcccagccccgcagaaggggaaaagaaacccatcaactcggagctgtggcacgcttgtgcggggcccctggtgtcgttgcccccggtgggcagtctcgtcgtatacttcccgcagggccatagtgaacaggttgctgcttcaatgcataaggagctggacaccgtccccagctacccatctctgccttctaagttgatctgcaagctcctaagtctcaccttacatgcagattctgaaactgatgaagtttatgcccagatgatgcttcagcctgtgaacaaatatgatcgagacgcaatgctggcatctgaactgggtctgaaacaaaacaagcaaccaacagaattcttttgcaagacgttgacagcaagcgacacaagtacgcatgggggattctcagtgccacgccgtgcagctgagaagatatttccaccgctagactttacgatgcaaccaccagcccaagaactcattgccaaggatctgcatgatatttcatggaaatttcgacatatctatcgaggtcaaccgaagaggcatcttttgacaactggttggagtgtcttcgtcagtacaaaaaggctgttagccggtgattcagttctctttataagggacgagaaatctcaacttctcttaggtataaggcgtgctagcagaccccaaccagctctgtcatcatcagttttatcaagtgacagcatgcacattggaatccttgcagcagcagcccatgctgccgcaaatagtagcccatttactattttctataacccaagggcaagcccatcagaatttgtcatccctttagcaaaatacaataaggctttgtatacacaagtgtcccttggaatgcgattcagaatgctctttgagacagaggattcaggggtaagaagatacatgggcacgatcacaggcattggcgacttagatccactgcgatggaagaattctcattggcgaaaccttcaggttggttgggatgaatcgactgcatctgagaggcgcacccgtgtttcgatatgggagattgaaccagttgctacaccattttatatatgcccaccaccatttttcaggccaaagcttcctaagcaagcaggaatgccagatgatgaaaacgaggttgagagtgctttcaaaagagcgatgccatggcttgctgatgacttcgctctgaaagatgtccaaaatgcattatttccaggcctgagcctagttcaatggatggctatgcagcaaaatcctcagatgctagcaactgcttcccctgctgtacagtcgcagtacttgacctctaatgcactgggtatgcaggatgggataggcagtgtcagtgaagatccaacaaaaagattgactatgcaggcccaaaatattggcttacctaatttacaggctggttcgaaagtggaccaccctgcaattaccccattagctcaacaccagcaacagcctcaccatgtattgcaacaacagcaggtccaaccactgcagcaaagttctgcgatcctacagcaacagcaagcccagttgttgcagcaaaatgccattcacttgcagcagcagcaagaacaactccaacggcaacaatcacagccgcagcaacagttcaaagctactgcatgtcttcagtcatcggatcagcacaagctgaaagagcaacagccttcaggtggacaagctgcctcacaagtacatttgttaaaccagattttgcaaccatcttcatctcagctacaacagctgggtttacccaagtcacctactcagcgcccagggttaccaagtctaacaacaatgggttctttgcagcagtcacaattacctcagactccacagccgcaacaaacagcagaataccaccaggcactcctacaaagtcaacaaccccaactacaacagctatcacaatcagaactgcagctgcagctgcttcaaaagattcaacaacaaaatctgctatctcaactgaacccacagcatcagtcccagctgatccaacaattgtctcagaaaagccaggaaattctccagcaacaagttcttcaacatcagtttggtggtgctgatgccatgggtcagctcaaacatttacagcaaacacctttgaaccataatacaggatccttgccaccccagcaacttgtaagatcacactcagcactcactgagagcgaagaaccttccagctcaacagttccatctggcagccgtatctccccaataaattcatttagtagagcaaaccaaggaaccagaaatttgcctgagatgccagcaacaccgcacattgagcacttacttcaggaaattcaaagtaagacagataatcgaatcaagaatgatatacaaggtagtaaggaaacggtccatgcacctaatcgtcatctagcttcagatcaacttgatgcgtcatctgctacctccttttgcttagatgagagcccacgagaaggcttttcctttcctccagtttgtttggataacaatgttcaagttgatccaagagagaattttcttattgcggaaaatgtggacacattaatgcctgacgccctgttgtcaagagggatgtcgtctggaaagggtatatgcaatctaccttctggacaaagggatcatagggatgtggaaaacgagctatcctctgctgcattcagctcccagtcatttggtgtgccggacatgtcttttaagcctggatgttcaagtgatgttgctgttgctgatggtggaatggcaagccaaggactgtggaatagtcaaacacagcggatgagaaccttcaccaaggttcaaaagcgtggatccgttgggagatcaattgatataacacggtaccgaggttacgaagatcttcggcatgatcttgcatgcatgttcggtattcaagggcagcttgaagatccctacaggacggactggaagctggtctatgttgaccacgaaaatgacatcctccttgttggcgacgacccatgggaggagtttgtaagctgtgtcaagagcattaaaatattgtcatctgttgaagtacagcaaatgagcttggatggtgaccttggctgcatccctcaaactcaagcctgtagtgcttctgatgacgcaaatgcatggagggcctgacgtaaatactaatatgttccttaccatttttaaacaatactgagagtcaggggtcaaagaagtgaaacacacgtctaacgtaatcacgaggtactgttacttagagccaactcactgacagagtcgatgagaagctcgtggcggaagttgttcagcaagctgccatattttggaggccttgacggctgacgctttgttccactgaaatcgggtaattactcaacacaatcatattagtttccttcttgtgtgtgtaagttgggtgggggtggggggtataatgaatttgagaagctactctgcttattagaacctacattcactgtaatcctcctacaaagttgttcgattatctcagtgtatatatgtgcgctgtagaaccgtgactgtcagttttgcaactcgcaatccccaatgtaattgttcctgtgtgctgctttaacagctgaagtactattataaattgtattatctgtaacagaaaaaagatttggtgtcgggata

SEQ ID NO: 212554 - DNA, 3878 bp, Zea Mays
cgtcgctctcgctgcccctcgcaccggcacgaaccaacaaaaccagccgtcgtggtccgccctcctcggcgcggcacgggcccgacacggccgcacaggcgcccggcaccagcccacacccgtcgccgtcgcggagaaggtgggggtgaatattcgcgtattcggacgccggatttggttcaggatctcgtcgagatgaaggatcacggatcgggcggcgtcactcccagccccgcagaaggggaaaagaaacccatcaactcggagctgtggcacgcttgtgcggggcccctggtgtcgttgcccccggtgggcagtctcgtcgtatacttcccgcagggccatagtgaacaggttgctgcttcaatgcataaggagctggacaccgtccccagctacccatctctgccttctaagttgatctgcaagctcctaagtctcaccttacatgcagattctgaaactgatgaagtttatgcccagatgatgcttcagcctgtgaacaaatatgatcgagacgcaatgctggcatctgaactgggtctgaaacaaaacaagcaaccaacagaattcttttgcaagacgttgacagcaagcgacacaagtacgcatgggggattctcagtgccacgccgtgcagctgagaagatatttccaccgctaggtaacatgttcgataggactttacgatgcaaccaccagcccaagaactcattgccaaggatctgcatgatatttcatggaaatttcgacatatctatcgaggtcaaccgaagaggcatcttttgacaactggttggagtgtcttcgtcagtacaaaaaggctgttagccggtgattcagttctctttataagggacgagaaatctcaacttctcttaggtataaggcgtgctagcagaccccaaccagctctgtcatcatcagttttatcaagtgacagcatgcacattggaatccttgcagcagcagcccatgctgccgcaaatagtagcccatttactattttctataacccaagggcaagcccatcagaatttgtcatccctttagcaaaatacaataaggctttgtatacacaagtgtcccttggaatgcgattcagaatgctctttgagacagaggattcaggggtaagaagatacatgggcacgatcacaggcattggcgacttagatccactgcgatggaagaattctcattggcgaaaccttcaggttggttgggatgaatcgactgcatctgagaggcgcacccgtgtttcgatatgggagattgaaccagttgctacaccattttatatatgcccaccaccatttttcaggccaaagcttcctaagcaagcaggaatgccagatgatgaaaacgaggttgagagtgctttcaaaagagcgatgccatggcttgctgatgacttcgctctgaaagatgtccaaaatgcattatttccaggcctgagcctagttcaatggatggctatgcagcaaaatcctcagatgctagcaactgcttcccctgctgtacagtcgcagtacttgacctctaatgcactgggtatgcaggatgggataggcagtgtcagtgaagatccaacaaaaagattgactatgcaggcccaaaatattggcttacctaatttacaggctggttcgaaagtggaccaccctgcaattaccccattagctcaacaccagcaacagcctcaccatgtattgcaacaacagcaggtccaaccactgcagcaaagttctgcgatcctacagcaacagcaagcccagttgttgcagcaaaatgccattcacttgcagcagcagcaagaacaactccaacggcaacaatcacagccgcagcaacagttcaaagctactgcatgtcttcagtcatcggatcagcacaagctgaaagagcaacagccttcaggtggacaagctgcctcacaagtacatttgttaaaccagattttgcaaccatcttcatctcagctacaacagctgggtttacccaagtcacctactcagcgcccagggttaccaagtctaacaacaatgggttctttgcagcagtcacaattacctcagactccacagccgcaacaaacagcagaataccaccaggcactcctacaaagtcaacaaccccaactacaacagctatcacaatcagaactgcagctgcagctgcttcaaaagattcaacaacaaaatctgctatctcaactgaacccacagcatcagtcccagctgatccaacaattgtctcagaaaagccaggaaattctccagcaacaagttcttcaacatcagtttggtggtgctgatgccatgggtcagctcaaacatttacagcaaacacctttgaaccataatacaggatccttgccaccccagcaacttgtaagatcacactcagcactcactgagagcgaagaaccttccagctcaacagttccatctggcagccgtatctccccaataaattcatttagtagagcaaaccaaggaaccagaaatttgcctgagatgccagcaacaccgcacattgagcacttacttcaggaaattcaaagtaagacagataatcgaatcaagaatgatatacaaggtagtaaggaaacggtccatgcacctaatcgtcatctagcttcagatcaacttgatgcgtcatctgctacctccttttgcttagatgagagcccacgagaaggcttttcctttcctccagtttgtttggataacaatgttcaagttgatccaagagagaattttcttattgcggaaaatgtggacacattaatgcctgacgccctgttgtcaagagggatgtcgtctggaaagggtatatgcaatctaccttctggacaaagggatcatagggatgtggaaaacgagctatcctctgctgcattcagctcccagtcatttggtgtgccggacatgtcttttaagcctggatgttcaagtgatgttgctgttgctgatggtggaatggcaagccaaggactgtggaatagtcaaacacagcggatgagaaccttcaccaaggttcaaaagcgtggatccgttgggagatcaattgatataacacggtaccgaggttacgaagatcttcggcatgatcttgcatgcatgttcggtattcaagggcagcttgaagatccctacaggacggactggaagctggtctatgttgaccacgaaaatgacatcctccttgttggcgacgacccatgggaggagtttgtaagctgtgtcaagagcattaaaatattgtcatctgttgaagtacagcaaatgagcttggatggtgaccttggctgcatccctcaaactcaagcctgtagtgcttctgatgacgcaaatgcatggagggcctgacgtaaatactaatatgttccttaccatttttaaacaatactgagagtcaggggtcaaagaagtgaaacacacgtctaacgtaatcacgaggtactgttacttagagccaactcactgacagagtcgatgagaagctcgtggcggaagttgttcagcaagctgccatattttggaggccttgacggctgacgctttgttccactgaaatcgggtaattactcaacacaatcatattagtttccttcttgtgtgtgtaagttgggtgggggtggggggtataatgaatttgagaagctactctgcttattagaacctacattcactgtaatcctcctacaaagttgttcgattatctcagtgtatatatgtgcgctgtagaaccgtgactgtcagttttgcaactcgcaatccccaatgtaattgttcctgtgtgctgctttaacagctgaagtactattataaattgtattatctgtaacagaaaaaagatttggtgtcgggata

SEQ ID NO: 212555 - DNA, 3857 bp, Zea Mays
cgtcgctctcgctgcccctcgcaccggcacgaaccaacaaaaccagccgtcgtggtccgccctcctcggcgcggcacgggcccgacacggccgcacaggcgcccggcaccagcccacacccgtcgccgtcgcggagaaggtgggggtgaatattcgcgtattcggacgccggatttggttcaggatctcgtcgagatgaaggatcacggatcgggcggcgtcactcccagccccgcagaaggggaaaagaaacccatcaactcggagctgtggcacgcttgtgcggggcccctggtgtcgttgcccccggtgggcagtctcgtcgtatacttcccgcagggccatagtgaacaggttgctgcttcaatgcataaggagctggacaccgtccccagctacccatctctgccttctaagttgatctgcaagctcctaagtctcaccttacatattctgaaactgatgaagtttatgcccagatgatgcttcagcctgtgaacaaatatgatcgagacgcaatgctggcatctgaactgggtctgaaacaaaacaagcaaccaacagaattcttttgcaagacgttgacagcaagcgacacaagtacgcatgggggattctcagtgccacgccgtgcagctgagaagatatttccaccgctagactttacgatgcaaccaccagcccaagaactcattgccaaggatctgcatgatatttcatggaaatttcgacatatctatcgaggtcaaccgaagaggcatcttttgacaactggttggagtgtcttcgtcagtacaaaaaggctgttagccggtgattcagttctctttataagggacgagaaatctcaacttctcttaggtataaggcgtgctagcagaccccaaccagctctgtcatcatcagttttatcaagtgacagcatgcacattggaatccttgcagcagcagcccatgctgccgcaaatagtagcccatttactattttctataacccaagggcaagcccatcagaatttgtcatccctttagcaaaatacaataaggctttgtatacacaagtgtcccttggaatgcgattcagaatgctctttgagacagaggattcaggggtaagaagatacatgggcacgatcacaggcattggcgacttagatccactgcgatggaagaattctcattggcgaaaccttcaggttggttgggatgaatcgactgcatctgagaggcgcacccgtgtttcgatatgggagattgaaccagttgctacaccattttatatatgcccaccaccatttttcaggccaaagcttcctaagcaagcaggaatgccagatgatgaaaacgaggttgagagtgctttcaaaagagcgatgccatggcttgctgatgacttcgctctgaaagatgtccaaaatgcattatttccaggcctgagcctagttcaatggatggctatgcagcaaaatcctcagatgctagcaactgcttcccctgctgtacagtcgcagtacttgacctctaatgcactgggtatgcaggatgggataggcagtgtcagtgaagatccaacaaaaagattgactatgcaggcccaaaatattggcttacctaatttacaggctggttcgaaagtggaccaccctgcaattaccccattagctcaacaccagcaacagcctcaccatgtattgcaacaacagcaggtccaaccactgcagcaaagttctgcgatcctacagcaacagcaagcccagttgttgcagcaaaatgccattcacttgcagcagcagcaagaacaactccaacggcaacaatcacagccgcagcaacagttcaaagctactgcatgtcttcagtcatcggatcagcacaagctgaaagagcaacagccttcaggtggacaagctgcctcacaagtacatttgttaaaccagattttgcaaccatcttcatctcagctacaacagctgggtttacccaagtcacctactcagcgcccagggttaccaagtctaacaacaatgggttctttgcagcagtcacaattacctcagactccacagccgcaacaaacagcagaataccaccaggcactcctacaaagtcaacaaccccaactacaacagctatcacaatcagaactgcagctgcagctgcttcaaaagattcaacaacaaaatctgctatctcaactgaacccacagcatcagtcccagctgatccaacaattgtctcagaaaagccaggaaattctccagcaacaagttcttcaacatcagtttggtggtgctgatgccatgggtcagctcaaacatttacagcaaacacctttgaaccataatacaggatccttgccaccccagcaacttgtaagatcacactcagcactcactgagagcgaagaaccttccagctcaacagttccatctggcagccgtatctccccaataaattcatttagtagagcaaaccaaggaaccagaaatttgcctgagatgccagcaacaccgcacattgagcacttacttcaggaaattcaaagtaagacagataatcgaatcaagaatgatatacaaggtagtaaggaaacggtccatgcacctaatcgtcatctagcttcagatcaacttgatgcgtcatctgctacctccttttgcttagatgagagcccacgagaaggcttttcctttcctccagtttgtttggataacaatgttcaagttgatccaagagagaattttcttattgcggaaaatgtggacacattaatgcctgacgccctgttgtcaagagggatgtcgtctggaaagggtatatgcaatctaccttctggacaaagggatcatagggatgtggaaaacgagctatcctctgctgcattcagctcccagtcatttggtgtgccggacatgtcttttaagcctggatgttcaagtgatgttgctgttgctgatggtggaatggcaagccaaggactgtggaatagtcaaacacagcggatgagaaccttcaccaaggttcaaaagcgtggatccgttgggagatcaattgatataacacggtaccgaggttacgaagatcttcggcatgatcttgcatgcatgttcggtattcaagggcagcttgaagatccctacaggacggactggaagctggtctatgttgaccacgaaaatgacatcctccttgttggcgacgacccatgggaggagtttgtaagctgtgtcaagagcattaaaatattgtcatctgttgaagtacagcaaatgagcttggatggtgaccttggctgcatccctcaaactcaagcctgtagtgcttctgatgacgcaaatgcatggagggcctgacgtaaatactaatatgttccttaccatttttaaacaatactgagagtcaggggtcaaagaagtgaaacacacgtctaacgtaatcacgaggtactgttacttagagccaactcactgacagagtcgatgagaagctcgtggcggaagttgttcagcaagctgccatattttggaggccttgacggctgacgctttgttccactgaaatcgggtaattactcaacacaatcatattagtttccttcttgtgtgtgtaagttgggtgggggtggggggtataatgaatttgagaagctactctgcttattagaacctacattcactgtaatcctcctacaaagttgttcgattatctcagtgtatatatgtgcgctgtagaaccgtgactgtcagttttgcaactcgcaatccccaatgtaattgttcctgtgtgctgctttaacagctgaagtactattataaattgtattatctgtaacagaaaaaagatttggtgtcgggata

SEQ ID NO: 212556 - DNA, 1309 bp, Zea Mays
gggcactgttcatcctgaaagagatagaagggtatcagctgtctcaagaagaagatcaatgatgctcgtgcaagcaattcatcatggccgtgctacatcaacgttaactacaatacgtacaatattaaatacagacgtctcaattaaccatatatacagcaatgtggcagaaatgatacatcagcctacattccagacgtctcactgccatgtaaatcagagtggcgctcttatatataaaaaggcagtattccccccatagtccattcaactccaccgcgaccatttaagcaacacagcagcggcatctcagctctgttcccagctagttagccgcggcgccatggctcctctgctgttcagggacatgaaggggctctcgtgctcgtcccaggcgtccacggcgacatgcccgagcctggagcggcacccggcgccccgcccacacaaggccagcgccggcgccagccccctggctcccgttcctgctgccgagcccaggaccaggacgcaccggcttgacggcaagaaaggacagcagccgcagcacaaggctgccgtcgtccccgcgaacgccggtggtggcctcgtcagccccgccggctcgtccaggtacctgctgctgagcggccgcttcgccgccgtcgccgaggagatccaggaggtgctggagcctgccccggccgtcgacgccatcgccaagcgggaggaagctagtgacgctgctgatgccaagaccgcgcaggcgcaggagcaggtatccctgcactgcaaagcgtgcgccgggaaagtgaagaagcacctctccaagatggaaggcgtgacgtcgttcaacatcgatttcgcggcgaagaaggtgacggtggtcggcgacgtgacgccgctgggcgtgctcagcagcgtgtccaaggtgaagaacgcccagctctgggcggcgccaccggcgatagccgccgcctgaatgaagggagccgtatcccggttggccgtgggccgtggctgctgctagggatagggagtcgtcgaccagcatgcgtccaccgtgtcccggctggcagctggcacttgaatgcagcagctttggttctttcctgtgcggtcgtctcgtgagttgttgtggccctctctcctctcttgtttcgctgtggttggcgccatgcgaggtgaatgcgatctcttgcctggtgctgctccagtgcttccatctgcttctgctgtggatgggtcactctgctttctcctctgtgatgtaagactgtaattaacataagaatgggatttcattgctaaagaaaaaaaagcaaataaa

SEQ ID NO: 212557 - DNA, 2080 bp, Zea Mays
ctgtttcaaggcattttgttgtagcaatagctggtgtcatatcgggagccctcctgtacattagagatgactttgctgcggtggaaaagagcactgtattaagggagacaatagtcagtatggctgttgctggagctatagttggagctgcatttggtggctggatgaacgacaagtttggaaggaggccttccatcatacttgccgatgcactgttctttggaggtgccgttatcatggcgttttccccaacacctagagttatcattgttgggagggtatttgttggtcttggtgttggaatggcttccatgacagctcctctgtacatctctgaagcctcccctgctaggatcagaggtgctctagtgagcacaaatgggcttctcatcactggtggccagttcttggcctacctcatcaatctagccttcactaaggtgccagggacctggcggtggatgcttggcattgcaggggttcctgccctggtccagttcgtactgatgctgatgctgccagaatcaccaagatggctctacaggaagggcaggaaagaggaagcagcagcaatcttgcacaagatttaccctgcgaatgaggtcgaggaagagattgactcaatgcgccggtctgtcgaagaagaggtgctccttgagggctccatcggtgagagtggcttcatgggcaagctgaggaaggcgatgggcagcaaggtcgttcgccgcgggctaacggccggcgtcatcgtccaggtcgcgcagcagttcgtgggcatcaataccgtcatgtactacagcccgacgatcgtgcagctggccggctatgcgtccaacaacacagccatggcactgtccctcatcacctcgggcctgaacgccatcggctcgatcgtcagcatgttcttcgtggacagggcaggccggaggcgcctgatgctgatcagcctggtcggaatcgtcgtgtggctcgccgtgctcggcggcacgttcctgggcgccgcacaccacgccccacccgtcagcgacctggagacccgactgttggcgaaccagaaccagacccagacccagacgtgtcccgagttcaacccgaacgtccgctggagctgcatggactgcctcaaggccgcgtccacgtgcggcttctgtgctcaccagggagacaagcttcttccgggggcgtgcttggcgctgaacaacgcgtctcggcatgcgtgccgcgcagaccaccgggagttctacacggaggggtgccccaacaacttcgggtggctggcactgatcggcctgggcgcgtacatcgtctcctactcgcccggcatgggcacggtgccgtggattgtcaactcggagatctacccgctgcggttcaggggcatctgcggcggcatcgctgccgtcgccaactgggtctccaatctcatcgtgacgcagacgttcctgtccctgaccaaggcgctcggaacatcggccaccttcttcctcttctgtgctgtctccttgctggcgctcgtcatcgtcttcctcaccgtgccggagactaaaggcctgcagttcgaggaagtggagcggatgctggaaagggaggactacaagccctggaagaggtaccatggtggcagcagcagcatcgagccggcgaagaacagtgatattggcctcaccccgccatgaaatccacttgttctgttatctagattcaagtagaagtagcaataattcgtagtggcagtttataataggccatctgctgctaatctctctctagatttccaagaagtgaaaaaatgaggtattagtcattcagtatgaaaatacgacatttggtagctgctatactttgttctagagcatttaatcttgattttagctctggggtggcttgtggcattagttgcgcactgtgtttaagacaacattcagaattgtttccttttttactttttaccatttggtgatgaagatacattctgcacttcactgcattagttaagatgaaataaaacttccaagtacaaaagcactgaaccacaagcaattggcaaacggacaggagatgctcttatgcatatggggca

SEQ ID NO: 212558 - DNA, 2422 bp, Zea Mays
cactgacctctggcttgcgccgctactggcattccgttctcgttctcctcctcctcctcctcctcctcctcgtcctcttccgtgtggaggggtcggggattttgatgattgccttttactcgttccctcctcttcaagaatgtgaaggggtttcacgggaagtacggctacgggaggggtggttgttctgggtgaagtggacgacggaccgagtacctacaccaacttaaacttggatatcaatggagggcggtgtgactgtagcggacaaggcagaattcaaggagtgcctgcggctgtcctggacacagccttacatccttcaacttgtcctgtctgctggcattggcggtcttcttttcggatatgatacaggtgtcatatcgggagccctcctgtacattagagatgactttgctgcggtggaaaagagcactgtattaagggagacaatagtcagtatggctgttgctggagctatagttggagctgcatttggtggctggatgaacgacaagtttggaaggaggccttccatcatacttgccgatgcactgttctttggaggtgccgttatcatggcgttttccccaacacctagagttatcattgttgggagggtatttgttggtcttggtgttggaatggcttccatgacagctcctctgtacatctctgaagcctcccctgctaggatcagaggtgctctagtgagcacaaatgggcttctcatcactggtggccagttcttggcctacctcatcaatctagccttcactaaggtgccagggacctggcggtggatgcttggcattgcaggggttcctgccctggtccagttcgtactgatgctgatgctgccagaatcaccaagatggctctacaggaagggcaggaaagaggaagcagcagcaatcttgcacaagatttaccctgcgaatgaggtcgaggaagagattgactcaatgcgccggtctgtcgaagaagaggtgctccttgagggctccatcggtgagagtggcttcatgggcaagctgaggaaggcgatgggcagcaaggtcgttcgccgcgggctaacggccggcgtcatcgtccaggtcgcgcagcagttcgtgggcatcaataccgtcatgtactacagcccgacgatcgtgcagctggccggctatgcgtccaacaacacagccatggcactgtccctcatcacctcgggcctgaacgccatcggctcgatcgtcagcatgttcttcgtggacagggcaggccggaggcgcctgatgctgatcagcctggtcggaatcgtcgtgtggctcgccgtgctcggcggcacgttcctgggcgccgcacaccacgccccacccgtcagcgacctggagacccgactgttggcgaaccagaaccagacccagacccagacgtgtcccgagttcaacccgaacgtccgctggagctgcatggactgcctcaaggccgcgtccacgtgcggcttctgtgctcaccagggagacaagcttcttccgggggcgtgcttggcgctgaacaacgcgtctcggcatgcgtgccgcgcagaccaccgggagttctacacggaggggtgccccaacaacttcgggtggctggcactgatcggcctgggcgcgtacatcgtctcctactcgcccggcatgggcacggtgccgtggattgtcaactcggagatctacccgctgcggttcaggggcatctgcggcggcatcgctgccgtcgccaactgggtctccaatctcatcgtgacgcagacgttcctgtccctgaccaaggcgctcggaacatcggccaccttcttcctcttctgtgctgtctccttgctggcgctcgtcatcgtcttcctcaccgtgccggagactaaaggcctgcagttcgaggaagtggagcggatgctggaaagggaggactacaagccctggaagaggtaccatggtggcagcagcagcatcgagccggcgaagaacagtgatattggcctcaccccgccatgaaatccacttgttctgttatctagattcaagtagaagtagcaataattcgtagtggcagtttataataggccatctgctgctaatctctctctagatttccaagaagtgaaaaaatgaggtattagtcattcagtatgaaaatacgacatttggtagctgctatactttgttctagagcatttaatcttgattttagctctggggtggcttgtggcattagttgcgcactgtgtttaagacaacattcagaattgtttccttttttactttttaccatttggtgatgaagatacattctgcacttcactgcattagttaagatgaaataaaacttccaagtacaaaagcactgaaccacaagcaattggcaaacggacaggagatgctcttatgcatatggggca

SEQ ID NO: 212559 - DNA, 871 bp, Zea Mays
gtttgaaataattctgcctctggatgcattttttgctcattattagtgatccaagttctccagctcggctctagcaccggcacctgccaatccaccgcctgtttggtcacgagaggcacgtccactctgtccttggtggcggcaagcataagccccctcccccagatttgtatacccgatccgctcctttttttatctagatccgatctagctatatttgtgcttgatcgtgctaccttgtcttgctgcagaatagtttgttaccttgttaataacttgcttcatggtttgaaactgaaaagtggaaaggcaccgacgaccagcagacagttgcggcacaccgactggatcaggagcatgatagtccttttgatccgattcgtggagggctcggcgcctcggtcggatctgacccagggggcgccgccggtccgtccggttgcagccgcgtctgagtttttaagatttggaatttaccatattaaaggaggccgaggatgattgactgaagtctgaatctggatgatctatatattaaatcatactcacgctgaattactgcacgaaaagaacttgggaagcttaaggaggatttatattttgtatagtttttctttactttatgaatattgatatgtattgtacaccaattatatgtatagatgttgaatttcccaccagtcttgatccaaacaatcgagagctagggatcgttctgagataaaagctttgcacaaggaggtgaagaaactctgcttcaaatgtttcaccttacatattagatttttaccaatttactactctttggttataagttatacattgctcatttgactgtaataatgacaaaacatgggcttttgagatggca

SEQ ID NO: 212560 - DNA, 3592 bp, Zea Mays
  misc_feature (3592)..(3592): n is a, c, g, or t
ttttttttatataaaccgattgaatttgcttatttccggatttctaaatcatctcccgattcctccgctcgtcaaatcctcgccgtgtccgtgtagcaattccttgcgttggcgaatcatagcagtctcctctctccggcggcaaatcgtcgaactgccacgcctggccccgccgccagcctcctcgtctgaagaagaacggaagacgtcgggctccggtggttctgaacggcaggtagccagtcgcgcttctcacgccggagactcgattggcgttgtatttgcctttccgtttgttgagttctcgaagcaaaacgatcggatgagattcttcaaggggagcaaggtggaggtattgcaggaggcagaggtgccatttggttcttggaggcctggtgagatcatctccggcaatggacacacctacctggtgagatatgatgaaagtcccgttgactctagcgtggctgttgaaaggatgccaaggaggttgattagacctagccctcctacggatgatcctgtacgctggagtttgggtagtattcttgaggcctttgacagctactcgtggaaggttgctgaggtggtgagagtgcttagaaagaatcaatatctagtcaggctccttgggtcgtcgctggagttgagtgcacatgcatcagatcttcgattgaggaagctttggttagatgacagatggattgtgactcagaagtattccgcaagatgcttggatggtgcattcagaggtcaatctgaagatggaaatttagactgcaacttgagaaaggacagccatattcaacttgagaaccggaatgcttttgagggtgatacatctagaggcatgaagagaaaatcgtctgctatatcaacacatcctcattgcagcgacatcagtaagagattgcaatgcagtgacgccactaagagattctggacactaaatagagatggaaggcacacaaagctggttgatagaggttttttccctttggctgaaaaggtagatgctgttgattccccatgcttaatgctgcgtgggaaatacatgcatgctagtcataaagggcatactagaacaactgaagaatttagtgacacagagagtacctcatcttctgttggtagttctagtcctaatagtaccccccatagatcacagtattataatttggtcaaccaaagtggagatatctgtagtagaactgatggtgatgaagcttttacattcgaaagagaaacatcagaacatggtaacgatggatcgaggggagaaacccatttgctggaattacatgcttatcgtgcgacaatgttagccttgtatgcttgtgggtcaattagctgggagcaagaggctttgttgactaacctaaggttaacactgaacatctcaactgatgaacatctagctgaattgaggagtttggttacccatgctgttacttccagatagccttttcttgttaatttcctggggacatttcatatattccaaattattggccaaggttggaggcttgtaaagcatccttccataggttcttataaatggaggagtctgccacatgttttgcagtgtgataaatgtgacaatatttccattgaacttccattggttaagcagggccaagagtgtggttccagattggtactggttgctggataaaagggtcaaattggattagtttatgatccaaacaaaaaggtgatctgattgttgtgtgaattttcacagaacaagcataatccctcttaggtaagtgctcctgtaactcttggttttatttaaatcctttttggaggagaaagatttgaatgatacttacaaggtatactaaaaatgtattttgatcattgtacacatttttcatgtaataaagcaactggcagtcttagctgtattttcatattattatatggatttatggtaaacaactctaaaaatatcagtaagttaagaccttgtttggtggagcaggtcattaagtgctctctaggaaatcgtggagctagatctataagcctttagaagacatttagataaatcattttgtttattatttagattaatttttttaaaactatttaaatcgatattataaactacaactccacactagagctggaacatggagccatcacaaacacccccctaaattgcaattgatgcctacccttcagcaaaaaaacagtagtttaggtaggcaattgtaggtcgcttgcagaggctttatatatccattgtgttgaagttaagaaatattcaagatatatgttgcggagtgcatattgttttgagttaaaatttaaatatgaagtagggactataatttaggggttgtttggtacctttgctagctactgtttggatgtctagatagcctaccttgattcctgcgctagcgagcttttctttgctgcttcaattgcttgtttggattggaggagattgaaggggattggagggtattgagggggaaatgaactaatttccccttctaaccaaacaagccccaagcaagcccaattggctctccttagccgggaagcattcagttactcacgctggtgaagcaaggcaacctggttcgggaaccaagcatgcccttaattggttgtctggcaaggacattgatctatgcattgttaagattttccttgctagtgtggtgagcaaatttggctcgtctggacgggcaagatccttgtggcttgtgcgccttaagaaatgggaggtggcttgtgccagcccctcaatacctcaaccaactacttgtgtttatgggtgttcacctaagaatcttgcatcaagacaagggtgttgttccatgaatgcctacacattatgactatcattgtacgcttgaaatctttgttagataaaaaggacataaccagtgctggcaaggacatgatggggtttgaggaaggaataaccgaggcaagtcttacccctacattttgtggagaggttgtgttgaaccaaggaccttttggcttagtggaaagacctctcaccaccatggttattaaagcgtcgttaaaacatcgtttaaacgctaaaacgtgattatcatgtagaacgcccgaaagttttgaccaaatctcatagaacatccatgaaatttgtttaaacgttcgtttttgcgtcgtttaaacgttttgggatgttttaggcgcgttttagaagttttagactatgggacctctgaaaggcccatcaagccccagaggtaagacgtcggccttccctctcatgttctccttctccagcgcctccacccacctccctcagtccctcctcctctcctccagtttcgcccgctctagtgtcggttccatcaattctagccatccaacgtcgctcgctccatcgtcgtccgctccagtgtcgcccgctccagaatcaccctcctccagcgtcgcctctctcctccctcctccaacgccaccacccatcaaccactgccagtagccagctggtcccaggtcaagacgctaggtgccagcagccagtaaatcaccggttcaccatttcattgtcgccctgctctatttggtatctgtttgtcatcttgctcan

SEQ ID NO: 212561 - DNA, 3287 bp, Zea Mays
  misc_feature (3287)..(3287): n is a, c, g, or t
ttttttttatataaaccgattgaatttgcttatttccggatttctaaatcatctcccgattcctccgctcgtcaaatcctcgccgtgtccgtgtagcaattccttgcgttggcgaatcatagcagtctcctctctccggcggcaaatcgtcgaactgccacgcctggccccgccgccagcctcctcgtctgaagaagaacggaagacgtcgggctccggtggttctgaacggcagagttctcgaagcaaaacgatcggatgagattcttcaaggggagcaaggtggaggtattgcaggaggcagaggtgccatttggttcttggaggcctggtgagatcatctccggcaatggacacacctacctggtgagatatgatgaaagtcccgttgactctagcgtggctgttgaaaggatgccaaggaggttgattagacctagccctcctacggatgatcctgtacgctggagtttgggtagtattcttgaggcctttgacagctactcgtggaaggttgctgaggtggtgagagtgcttagaaagaatcaatatctagtcaggctccttgggtcgtcgctggagttgagtgcacatgcatcagatcttcgattgaggaagctttggttagatgacagatggattgtgactcagaagtattccgcaagatgcttggatggtgcattcagaggtcaatctgaagatggaaatttagactgcaacttgagaaaggacagccatattcaacttgagaaccggaatgcttttgagggtgatacatctagaggcatgaagagaaaatcgtctgctatatcaacacatcctcattgcagcgacatcagtaagagattgcaatgcagtgacgccactaagagattctggacactaaatagagatggaaggcacacaaagctggttgatagaggttttttccctttggctgaaaaggtagatgctgttgattccccatgcttaatgctgcgtgggaaatacatgcatgctagtcataaagggcatactagaacaactgaagaatttagtgacacagagagtacctcatcttctgttggtagttctagtcctaatagtaccccccatagatcacagtattataatttggtcaaccaaagtggagatatctgtagtagaactgatggtgatgaagcttttacattcgaaagagaaacatcagaacatggtaacgatggatcgaggggagaaacccatttgctggaattacatgcttatcgtgcgacaatgttagccttgtatgcttgtgggtcaattagctgggagcaagaggctttgttgactaacctaaggttaagcagggccaagagtgtggttccagattggtactggttgctggataaaagggtcaaattggattagtttatgatccaaacaaaaaggtgatctgattgttgtgtgaattttcacagaacaagcataatccctcttaggtaagtgctcctgtaactcttggttttatttaaatcctttttggaggagaaagatttgaatgatacttacaaggtatactaaaaatgtattttgatcattgtacacatttttcatgtaataaagcaactggcagtcttagctgtattttcatattattatatggatttatggtaaacaactctaaaaatatcagtaagttaagaccttgtttggtggagcaggtcattaagtgctctctaggaaatcgtggagctagatctataagcctttagaagacatttagataaatcattttgtttattatttagattaatttttttaaaactatttaaatcgatattataaactacaactccacactagagctggaacatggagccatcacaaacacccccctaaattgcaattgatgcctacccttcagcaaaaaaacagtagtttaggtaggcaattgtaggtcgcttgcagaggctttatatatccattgtgttgaagttaagaaatattcaagatatatgttgcggagtgcatattgttttgagttaaaatttaaatatgaagtagggactataatttaggggttgtttggtacctttgctagctactgtttggatgtctagatagcctaccttgattcctgcgctagcgagcttttctttgctgcttcaattgcttgtttggattggaggagattgaaggggattggagggtattgagggggaaatgaactaatttccccttctaaccaaacaagccccaagcaagcccaattggctctccttagccgggaagcattcagttactcacgctggtgaagcaaggcaacctggttcgggaaccaagcatgcccttaattggttgtctggcaaggacattgatctatgcattgttaagattttccttgctagtgtggtgagcaaatttggctcgtctggacgggcaagatccttgtggcttgtgcgccttaagaaatgggaggtggcttgtgccagcccctcaatacctcaaccaactacttgtgtttatgggtgttcacctaagaatcttgcatcaagacaagggtgttgttccatgaatgcctacacattatgactatcattgtacgcttgaaatctttgttagataaaaaggacataaccagtgctggcaaggacatgatggggtttgaggaaggaataaccgaggcaagtcttacccctacattttgtggagaggttgtgttgaaccaaggaccttttggcttagtggaaagacctctcaccaccatggttattaaagcgtcgttaaaacatcgtttaaacgctaaaacgtgattatcatgtagaacgcccgaaagttttgaccaaatctcatagaacatccatgaaatttgtttaaacgttcgtttttgcgtcgtttaaacgttttgggatgttttaggcgcgttttagaagttttagactatgggacctctgaaaggcccatcaagccccagaggtaagacgtcggccttccctctcatgttctccttctccagcgcctccacccacctccctcagtccctcctcctctcctccagtttcgcccgctctagtgtcggttccatcaattctagccatccaacgtcgctcgctccatcgtcgtccgctccagtgtcgcccgctccagaatcaccctcctccagcgtcgcctctctcctccctcctccaacgccaccacccatcaaccactgccagtagccagctggtcccaggtcaagacgctaggtgccagcagccagtaaatcaccggttcaccatttcattgtcgccctgctctatttggtatctgtttgtcatcttgctcan

SEQ ID NO: 212562 - DNA, 2123 bp, Zea Mays
ttttttttatataaaccgattgaatttgcttatttccggatttctaaatcatctcccgattcctccgctcgtcaaatcctcgccgtgtccgtgtagcaattccttgcgttggcgaatcatagcagtctcctctctccggcggcaaatcgtcgaactgccacgcctggccccgccgccagcctcctcgtctgaagaagaacggaagacgtcgggctccggtggttctgaacggcaggtagccagtcgcgcttctcacgccggagactcgattggcgttgtatttgcctttccgtttgttgagttctcgaagcaaaacgatcggatgagattcttcaaggggagcaaggtggaggtattgcaggaggcagaggtgccatttggttcttggaggcctggtgagatcatctccggcaatggacacacctacctggtgagatatgatgaaagtcccgttgactctagcgtggctgttgaaaggatgccaaggaggttgattagacctagccctcctacggatgatcctgtacgctggagtttgggtagtattcttgaggcctttgacagctactcgtggaaggttgctgaggtggtgagagtgcttagaaagaatcaatatctagtcaggctccttgggtcgtcgctggagttgagtgcacatgcatcagatcttcgattgaggaagctttggttagatgacagatggattgtgactcagaagtattccgcaagatgcttggatggtgcattcagaggtcaatctgaagatggaaatttagactgcaacttgagaaaggacagccatattcaacttgagaaccggaatgcttttgagggtgatacatctagaggcatgaagagaaaatcgtctgctatatcaacacatcctcattgcagcgacatcagtaagagattgcaatgcagtgacgccactaagagattctggacactaaatagagatggaaggcacacaaagctggttgatagaggttttttccctttggctgaaaagggccaaggttggaggcttgtaaagcatccttccataggttcttataaatggaggagtctgccacatgttttgcagtgtgataaatgtgacaatatttccattgaacttccattggttaagcagggccaagagtgtggttccagattggtactggttgctggataaaagggtcaaattggattagtttatgatccaaacaaaaaggtgatctgattgttgtgtgaattttcacagaacaagcataatccctcttaggcacccaggatgatgagggagtcaagtcctttcttgaagagcccattcacagcctccgaggctttttcccaccactcaaagaaggatgtggcacctggttgtggtgctaaagaatgcataccaatctttctcaacatcttgtaccagaagagtcttgcaaatacacaccacacaaacaaatgatttattgtttcagcttcctggttacataaaggacatttgcttgggtgattcagatctctcttagccaatctgtcatgtaatgtccaaaggagcttgaccccaagaaaagatccttataagcagcctttgcggtgtatctgccatatgaagcaatgctaaagatatgcttatcctccctattgggctgcagttcaaaatctgagggaacttcctaaagatgaagatagtccatctcctatttgataaggcgtcttggacagttctcttgttaataaatctctttggaattgagccaaacagccgaggagccaaatcagaaactcttttcccatgtagccacttatccatccaaaacatggtgtttgatccatccccaacctcagagatcaaggccctggaaaagaaagcttgagccttgccaggtacctgaataggtaagccagtccaaggacgtccagggtcagtttttttgtaaccaaagccatctgtaccccatgccaccaagcaatgctctactacgatttttgtaaaagcatacaaatgtgccctagttcaggacttgcagctgatttccatgtacacacaaaacgttgggattacatggtctggccttgcatcaaagaatacttgcagatattgtagctgttcttcatgagacttattttggagaattatt

SEQ ID NO: 212563 - DNA, 855 bp, Zea Mays
atcaaaagcgggttgaatccatttggattttggatgatccaaatccattttctggtacaatgtggtctaccggaactagaaaaggaagttgacgaaaagatagaccagttcagtgcatgggtggagaaacacccaaaccgcagaagccagatctgcctctcctttttcgacgagaaacacagacaccctggttggtttgtcaacaaaacagagcgcatctattgggagcaatggttcatcaatttgcaagtcatgttccccaaaagatacagcaagtcaaacagctccaaagggctgacaaacatccaagcaaatgccgtggaggagaccagcacaaggcgtgctgcattggaggcgtcgattaacgaagtgctgttccagatcataaagttcgccaacgagaaaaaggaccacattcctgctatccctgacaggattttcaatcacgagatcatgatcccaagctcggattctgtatttggatggaacacggacgtcattcgcagagttctgaatagcgggcacccatactcgctttaactgaagacgacatctcagtgggcgcccgtattcagtttattagcgtgctgccgccctgtttggaagacggctctgttaaccatcgtggtgaaccatataatatgcctaaggaaaaacctagttctgtgtacatcaccctgctcatctggcatgtacatactgtgttgggatcttgctcatcggtcaaacattcttaagttcgattaagtttataaataacaatattatgattctaaataagtttatcatgtaaaagtatttttcatgattgatacttattgcgaagcatctccgagtgagttaggtggttcgagt

SEQ ID NO: 212564 - DNA, 1271 bp, Zea Mays
gattggttggtcttcgagtcggcttggactcttctcttcctcgccaactcctccgtggcgccgccgtcttgcctgcagctttttgagccttcgtcatatccacccttctctctgtctcggcatctgtttgagcaatctaattatcccaagcacgcttcctcgacttcctatctcgactctcccaagtcacaaccctcgacctcccccctactccaactactggaagcgccgatccatcaggttctgatcgattcttctgccccgatccgcagcggcaagcggagatgaactgcgagacctgtcagctgaaagaactggagctggaactgacggagatcagggatgttctgcgctgtattttgcacaccatattcttccatagaaccctcagcctggttcgccccaaagatgttgactgtgatttcctcgatattacttatgtacaatgtggtctaccggaactagaaaaggaagttgacgaaaagatagaccagttcagtgcatgggtggagaaacacccaaaccgcagaagccagatctgcctctcctttttcgacgagaaacacagacaccctggttggtttgtcaacaaaacagagcgcatctattgggagcaatggttcatcaatttgcaagtcatgttccccaaaagatacagcaagtcaaacagctccaaagggctgacaaacatccaagcaaatgccgtggaggagaccagcacaaggcgtgctgcattggaggcgtcgattaacgaagtgctgttccagatcataaagttcgccaacgagaaaaaggaccacattcctgctatccctgacaggattttcaatcacgagatcatgatcccaaggtgaccccttttccttggacgtgttgacagctcggattctgtatttggatggaacacggacgtcattcgcagagttctgaatagcgggcacccatactcgctttaactgaagacgacatctcagtgggcgcccgtattcagtttattagcgtgctgccgccctgtttggaagacggctctgttaaccatcgtggtgaaccatataatatgcctaaggaaaaacctagttctgtgtacatcaccctgctcatctggcatgtacatactgtgttgggatcttgctcatcggtcaaacattcttaagttcgattaagtttataaataacaatattatgattctaaataagtttatcatgtaaaagtatttttcatgattgatacttattgcgaagcatctccgagtgagttaggtggttcgagt

SEQ ID NO: 212565 - DNA, 1305 bp, Zea Mays
gattggttggtcttcgagtcggcttggactcttctcttcctcgccaactcctccgtggcgccgccgtcttgcctgcagctttttgagccttcgtcatatccacccttctctctgtctcggcatctgtttgagcagtacaaaccctatttttggaattttatagcattgtttcgtgatcagtcagttatatttaacatatgatctaattatcccaagcacgcttcctcgacttcctatctcgactctcccaagtcacaaccctcgacctcccccctactccaactactggaagcgccgatccatcaggttctgatcgattcttctgccccgatccgcagcggcaagcggagatgaactgcgagacctgtcagctgaaagaactggagctggaactgacggagatcagggatgttctgcgctgtattttgcacaccatattcttccatagaaccctcagcctggttcgccccaaagatgttgactgtgatttcctcgatattacttatgtacaatgtggtctaccggaactagaaaaggaagttgacgaaaagatagaccagttcagtgcatgggtggagaaacacccaaaccgcagaagccagacaccctggttggtttgtcaacaaaacagagcgcatctattgggagcaatggttcatcaatttgcaagtcatgttccccaaaagatacagcaagtcaaacagctccaaagggctgacaaacatccaagcaaatgccgtggaggagaccagcacaaggcgtgctgcattggaggcgtcgattaacgaagtgctgttccagatcataaagttcgccaacgagaaaaaggaccacattcctgctatccctgacaggattttcaatcacgagatcatgatcccaaggtgaccccttttccttggacgtgttgacagctcggattctgtatttggatggaacacggacgtcattcgcagagttctgaatagcgggcacccatactcgctttaactgaagacgacatctcagtgggcgcccgtattcagtttattagcgtgctgccgccctgtttggaagacggctctgttaaccatcgtggtgaaccatataatatgcctaaggaaaaacctagttctgtgtacatcaccctgctcatctggcatgtacatactgtgttgggatcttgctcatcggtcaaacattcttaagttcgattaagtttataaataacaatattatgattctaaataagtttatcatgtaaaagtatttttcatgattgatacttattgcgaagcatctccgagtgagttaggtggttcgagt

SEQ ID NO: 212566 - DNA, 1668 bp, Zea Mays
atggagttgtgcttctactaacaaatttttatttgggcctaagctagcaaggtcgatggtctgcgggagcatgtgaagaaaagtgggcttgcagagaagattgaattggttattacttcccctttactgaggactatgcaaactgcagttggggtctttggtggtgaaaagtatactgatggtgtaaatgcacctccactaatggttgaaaatgctggacacagtggacgtccagctgtttcaagtttgaactgccccccatttattgcagttgaaacctgcagagagcacttgggtgtccatccatgtgacaagaggaggagcataacagaataccggcctctcttccctgccattgatttttcattgatagagaatgatggagatgttctttgggaaccagatgtgagagaaacaaatgaggctgtcgcattgaggggtatgaagtttatggactggttgtggacaagagaagagaaagagatagctattgtcagtcacagtggtttcttgtttcacaccttaagcatgtacagcaaggagtgccatccaaccataagagacgaagttagcaagcactttgcaaactgcgagctacggtcgatggtgttggttgacagaagcatgcttgggtcatattcgtcaagattcaactatgctggcaagaatccaaccgggctagatgtgcctagtgatattgcagataagaagcaggttgatgaagctcagaagaactgaggcaaccttgaaagcataccgtagatgacttggattatcaaaaagccactctgacctttgcgaagcttgcttgcttgctttgaagagggcatctactacagatagagtttacacataccattgcgttagtcgagatgaactacgcagcaatgtataagcatgtctgctcttttgtctcagcctacatttgagattcagggcattggactaagatcgcctatttatgataataataataataataaccggatcaccccacattcaccaggtgatgcacgtcaaaattctattggtttcctagctgttttaaaacctaggggtggtttctgatggatggcgataaaaccgatcgatgtatggttttgggttgtgcgctgtatttctgatttctggttcagagataatggaggccggcgctgctgcatatgcatccaaactgtttacattgtgtaaaaaccatatatgttttgtttacaacgtggaaggcgagacggatcacaacgtgcaatgcaggctgaccgcctgcgagagcatgtgaaggaatctggacttgcagagaagatcgagctggttatttgttctcctttatcgaggtacagttttgcatgatcttttctgcccagcgatgacaagaagcaaccaggaggaagctcaagacagaatctgagcggctgagcctgccttatgaccccaagggcttgtttggtgaattggtgttcaccgctgattccttttgtcatcctattttgaaaattccctagctacatccagtccatttgttaactattctgagaatactactctgaacttcccatttatggcgattagggttttgacactcttttcctttagggctagtttaaaaaaaaaaattaaatctcccgattgtgggcgcaacacctacgcccttatagacaccatctgatgaag

SEQ ID NO: 212567 - DNA, 2494 bp, Zea Mays
cgcccttttcctccttcaccctagatcccgttagtctaggtagcattgcgatctgcagatgtccttccgttcccgcggttccctttctcgcccttttcccgcccggggacctcatccttccctcagcaatgggatccacgtcttctcaccctcctccacagatttaccagtgatgatacgattcgtcgtcgtctcatcggccccttgggatctagaatggaacttggcgccaccactgccctgtaccctctgcaccgctgcaaaaccatttacctggtcaggcatgcccagggcattcacaacgtcgcaggcgagaaggacttcggcgcctacatgtcacatgaactgttcgatgctcagctcacccctttgggttggaaccaaggtgttagtttctactgacaaaataagctgcatggatggagttgtgcttctactaacaaatttttatttgggcctaagctagcaaggtaggtccaaattgcacacgtttattctaataactgatgctcgctaagcagtaacaaatgtagaattagccatggagattattctgtatgttatcctcttcaattttagcacacaaagcatcacccattcatgacaaaatagattagccatggaaataattcaagtgaaaaaatctgaaagtctcaatcccccacttactgatttccaactacttttaccttacttcatatgctactgtcatcaataatcatgtctcttctttttacaaacatgcattttgatagaaggcttcatagtcctaagacaggtgggtgcaggttttgtttttgaagaataaggaagaggaatagaatctcattcatgtgttcgtgcaaacagaagagcagatccaatacgcatacataaggtcgatggtctgcgggagcatgtgaagaaaagtgggcttgcagagaagattgaattggttattacttcccctttactgaggactatgcaaactgcagttggggtctttggtggtgaaaagtatactgatggtgtaaatgcacctccactaatggttgaaaatgctggacacagtggacgtccagctgtttcaagtttgaactgccccccatttattgcagttgaaacctgcagagagcacttgggtgtccatccatgtgacaagaggaggagcataacagaataccggcctctcttccctgccattgatttttcattgatagagaatgatggagatgttctttgggaaccagatgtgagagaaacaaatgaggctgtcgcattgaggggtatgaagtttatggactggttgtggacaagagaagagaaagagatagctattgtcagtcacagtggtttcttgtttcacaccttaagcatgtacagcaaggagtgccatccaaccataagagacgaagttagcaagcactttgcaaactgcgagctacggtcgatggtgttggttgacagaagcatgcttgggtcatattcgtcaagattcaactatgctggcaagaatccaaccgggctagatgtgcctagtgatattgcagataagaagcaggttgatgaagctcagaagaactgaggcaaccttgaaagcataccgtagatgacttggattatcaaaaagccactctgacctttgcgaagcttgcttgcttgctttgaagagggcatctactacagatagagtttacacataccattgcgttagtcgagatgaactacgcagcaatgtataagcatgtctgctcttttgtctcagcctacatttgagattcagggcattggactaagatcgcctatttatgataataataataataataaccggatcaccccacattcaccaggtgatgcacgtcaaaattctattggtttcctagctgttttaaaacctaggggtggtttctgatggatggcgataaaaccgatcgatgtatggttttgggttgtgcgctgtatttctgatttctggttcagagataatggaggccggcgctgctgcatatgcatccaaactgtttacattgtgtaaaaaccatatatgttttgtttacaacgtggaaggcgagacggatcacaacgtgcaatgcaggctgaccgcctgcgagagcatgtgaaggaatctggacttgcagagaagatcgagctggttatttgttctcctttatcgaggtacagttttgcatgatcttttctgcccagcgatgacaagaagcaaccaggaggaagctcaagacagaatctgagcggctgagcctgccttatgaccccaagggcttgtttggtgaattggtgttcaccgctgattccttttgtcatcctattttgaaaattccctagctacatccagtccatttgttaactattctgagaatactactctgaacttcccatttatggcgattagggttttgacactcttttcctttagggctagtttaaaaaaaaaaattaaatctcccgattgtgggcgcaacacctacgcccttatagacaccatctgatgaag

SEQ ID NO: 212568 - DNA, 2192 bp, Zea Mays
actaagcttatataaattccgttagatactcggtttgacatctcttttttatatacatttcgataagatcgtaaaaatctcacctcgcgcgcaaagcgcgcgttagacacaagttgcttctcacttggaaggaattatttgagttagaagaggagctccgtgctctgcttccttcccggccaatttttattttttatttcacagtcccattctgatcctgtggacagtgggttaataatagtaataaaaatgataatccacctcctctgcttcccaggcccagcagcaggagctcccccgtctccgtcctcctccgcctctgtcagggtcccggtcggacttcctcacgaccgccgcgccaaatcccgtctcgttcctccgttccgctgcgcatcctcaggaatggaacttggcgccaccactgccctgtaccctctgcaccgctgcaaaaccatttacctggtcaggcatgcccagggcattcacaacgtcgcaggcgagaaggacttcggcgcctacatgtcacatgaactgttcgatgctcagctcacccctttgggttggaaccaagtaaggtcgatggtctgcgggagcatgtgaagaaaagtgggcttgcagagaagattgaattggttattacttcccctttactgaggactatgcaaactgcagttggggtctttggtggtgaaaagtatactgatggtgtaaatgcacctccactaatggttgaaaatgctggacacagtggacgtccagctgtttcaagtttgaactgccccccatttattgcagttgaaacctgcagagagcacttgggtgtccatccatgtgacaagaggaggagcataacagaataccggcctctcttccctgccattgatttttcattgatagagaatgatggagatgttctttgggaaccagatgtgagagaaacaaatgaggctgtcgcattgaggggtatgaagtttatggactggttgtggacaagagaagagaaagagatagctattgtcagtcacagtggtttcttgtttcacaccttaagcatgtacagcaaggagtgccatccaaccataagagacgaagttagcaagcactttgcaaactgcgagctacggtcgatggtgttggttgacagaagcatgcttgggtcatattcgtcaagattcaactatgctggcaagaatccaaccgggctagatgtgcctagtgatattgcagataagaagcaggttgatgaagctcagaagaactgaggcaaccttgaaagcataccgtagatgacttggattatcaaaaagccactctgacctttgcgaagcttgcttgcttgctttgaagagggcatctactacagatagagtttacacataccattgcgttagtcgagatgaactacgcagcaatgtataagcatgtctgctcttttgtctcagcctacatttgagattcagggcattggactaagatcgcctatttatgataataataataataataaccggatcaccccacattcaccaggtgatgcacgtcaaaattctattggtttcctagctgttttaaaacctaggggtggtttctgatggatggcgataaaaccgatcgatgtatggttttgggttgtgcgctgtatttctgatttctggttcagagataatggaggccggcgctgctgcatatgcatccaaactgtttacattgtgtaaaaaccatatatgttttgtttacaacgtggaaggcgagacggatcacaacgtgcaatgcaggctgaccgcctgcgagagcatgtgaaggaatctggacttgcagagaagatcgagctggttatttgttctcctttatcgaggtacagttttgcatgatcttttctgcccagcgatgacaagaagcaaccaggaggaagctcaagacagaatctgagcggctgagcctgccttatgaccccaagggcttgtttggtgaattggtgttcaccgctgattccttttgtcatcctattttgaaaattccctagctacatccagtccatttgttaactattctgagaatactactctgaacttcccatttatggcgattagggttttgacactcttttcctttagggctagtttaaaaaaaaaaattaaatctcccgattgtgggcgcaacacctacgcccttatagacaccatctgatgaag

SEQ ID NO: 212569 - DNA, 737 bp, Zea Mays
ctcctgtggcctcccatatcctccttgggaatcaacattcaacaatgaggtgtggggcggtctccgacatgcgcctacataaggggcaacaagggttttgcggccatccacaggcgattgtgttatctggtgcattgagacaaagagcaaaggcgaaagggggtctccttgcctcaaggcccttccatggaagaacaattgccccggaattccattgagcagtatctaggacgaggttgttgacaacaccgatgcaatccagcttctccatctagcaaggaagccaagacgagttaaaaggagtagaaggtagtcccacctatcagagtcaaaagctttcatgatgtctaccttgatgagaagcattggagaactattttggtggaatctctgcgctaaactacataaagaaaattgtcgtggatgcttctacccttgatgaaggcactttagcacttggatatgatgtccgctattactggggccagcctaagcaaggacagtttcataaaaaagcttagccacattatgaattaggctgattggtctgaagtcctcgatttttccacaccctccttcttcaacatcaagatgatgtttgccgtgttgagtaggtcgaagttttagaatctctggctatgacgatagtgtattattgctgaaagatcgaccttgatgatgggccagcaacatttataagtttaagttgaataaatccttgttctcgaaaaaattct

SEQ ID NO: 212570 - DNA, 1142 bp, Zea Mays
agaccaaccagccaggacaaacaaggtgacatccatggtcaatacagtgatcttctaaggctttttgaatatggaggctttcctcctgaagccaattatctattcttaggtgattatgttgatcgaggcaaacaaagtttggagactatatgccttcttcttgcttacaaaatcaagtaccctgagaacttttttcttctgaggggcaatcatgaatgcgcctcaataaacagaatatatggattctatgatgaatgcaagcgtcgatttaatgtgcggctatggaaggtcttcacagaatgttttaacactctacctgtggctgctcttatcgatgataaaatattatgtatgcacggtggactctctcctgatctagcacacttggatgagataaagaacttgcagcgtccaactgatgtaccagatcaaggtctactgtgtgacttgctttggtcagatccaggaaaagatgctcaagggtggggcatgaatgatagaggggtctcatatacctttggtgctgacaaggtttcagaattcttgcaaaagcatgatcttgatcttatctgtcgtgctcaccaggttgtcgaggatgggtatgaattttttgctgacagacagcttgtcaccatattctcggcccccaattattgtggtgaatttgataatgctggtgcaatgatgagtgtcgatgaaactttgatgtgctcattccaaattctgaaacctgctgagagaaaaaacaaatttatggggtccaacaaaatgtgatagtgaaagccattttgcttccagcagctctagcctgttaaggttctcctgtggatgcatcgagacaacagcatgctggcgccaagtttgagggcagcattgggctactatcagagaaaccaaataatcccatacctaactgttcatctggaagttactcatcatgacaagtgcctgaaatttttcctctttcctgttaccttgtgtcagaacattatgtagctgtagatatattgattatggaaggatgaagttgccaaattgacctgaggagattcctttctccagccaggaaaaattctgaacatcaaggagtttctgtttgcaagtttcactatttaaaagcagttatgttgcttgaaaataaa

SEQ ID NO: 212571 - DNA, 784 bp, Zea Mays
gcgtcccgtccgtccgatccgacagcacggcgtatctacgccgtcggccgcagccggcgcctgctggccacacccgccggaccggcccggcaggtggcagtttaatagtacaaaccaggctgatcctggcggcaaggaccaacgtgctcgatctccatctcgaccgtcgctcaccgggaagctacgctacgacgaagcatggcgatgctgggcgtggccgggatgctgatcccggaggtgctgaccaaggccgggctgatcaacgcgccgcagtggtacgacgccggcaagtcggagtacttcgcgtcgtcgtcgacgctgttcgtgatcgagttcatcctgtttcactacgtggagatccggcggtggcaggacatcaagaaccccggcagcgtcaaccaggaccccatcttcaagagctacagcctgccgccgcacgagtgcggctaccccggcagcgtcttcaacccgctcaacttcgcgcccacgctcgaggccaaggagaaggagctcgccaacgcacaacgtcaccggcaaggggcccttcgacaacctgctgcagcacctgtccgacccatggcacaacaccatcatccagaccctgtcgggttgagtcgacggtccatcaggtcatgtggtccgagctgaaaggccgagactcgaagacagttcgtgtgatgcgttcttaatcgactgagggctaaggaatgtgacgtactggtatatgtacattagttgaagcggaggctataaagggtgtagagattgtttcatcaaaaaaaat

SEQ ID NO: 212572 - DNA, 1472 bp, Zea Mays
attggattctactgcttgaagcctcgcaggcctggaatggtcaaatataactcgtattggacgtatggagataaatgggggaaatggagtgaggtcaatccaagaggggcagcaatggcatttatgtaaccatggaatcgagattgggcgtccatcaccaggaggggatgaacctggtaccatccccagagatgtgagagtggagaatgggcatggagttgttggaagaagagacgggggtcctgcatccagctattgggacctgttgagagcacacctctctgatcctttaacaggtgttctcatggatgatgcattgattttatcatgtggccattcatatggaagtagtggaatgcaacatgtctacagaatgaaagcttgtggtaagtgtggcatgccaattactgaggccgccattcgaccaaacttggctcttcgccttgcagttcaggcattcaaacgtgaagaagactcagcaaagtcattgaaaagaagaagagagcgccttgaactggtatacgcccttttccagcttatcagtcacccttcaaatcgggcagctatatttgttgcatgttcttaaatccattctaccctatgtgaggataaatgtggtgacgatgatccaaatcgaactgaacttgctactagaggtaaaggtgtgcagtttcctttttctgtcttcgacagggtcataatcaagggaaacaagaggaccccggaacggtttgtgggacgtcaagcagttgtgacagcgcagtgcttaaatggatggtatgttgtgaagacttcagacaacgcagagagtgtgaagctgcaataccgttccttggcaaaggttgctgatggcaatgggccttctggtcttgtcccaagcaatgtccaaagtacaagctggctataggctacaacagtaccggtagtaggccccaagcccctcttcaacttcacgcatttgctgaggttctgcgatgacgtgagcatgccaaattcagattaggcttgctttgcctttgtcccctctttttgtatcctggggacgcggatcttgtgagtatggccaaagaaatgtttactactttagcagtgttggaaacgcgtgacatcactggttacgagtagttttagccgtcttctgtctagcggtgtggccggtagtggcagcatgcgtctgcagagaacatatctggtacacataaaagtttagtgcacatgatttatatattaaattatcactatctattttagatctaacgtctctgttgaccattgtaatctataaataacaccttctaccattacactccaccatgtcagggtgtctttagcaaaatataccaaataattagagacgttagatataagatgagtgatgataatttaatatatgtaatatgtgcattaaacttatacgtgcaccagatatcttctcttacacgaatggaggcaatccttcctttcctgagatt

SEQ ID NO: 212573 - DNA, 1558 bp, Zea Mays
aaaactagcgcttactgttttgcacggccatagtctcgatccccaccgagtccagcaaacagcaccaccccaccctcttcgcggctccggcagccgcgccaccatggcttctcctgcgggggctaacagcggggcctcctcctcgagagggacacccttgcctttgcccttccccttccccgctgcggcgcacttcccctcccgcggcgccggtcccttcctgtcgcagcactatcacccgccctccacctccgacggcgacgatgaggtcgaagaagacgagggaagcatggacgacggcagcgccgaagaggatgatgccgagctgtccgacggaggggctctcggctcgccgcggcgacgcgccttctccgctccagaggtgttctcatggatgatgcattgattttatcatgtggccattcatatggaagtagtggaatgcaacatgtctacagaatgaaagcttgtggtaagtgtggcatgccaattactgaggccgccattcgaccaaacttggctcttcgccttgcagttcaggcattcaaacgtgaagaagactcagcaaagtcattgaaaagaagaagagagcgccttgaactggtatacgcccttttccagcttatcagtcacccttcaaatcgggcagctatatttgttgcatgttcttaaatccattctaccctatgtgaggataaatgtggtgacgatgatccaaatcgaactgaacttgctactagaggtaaaggtgtgcagtttcctttttctgtcttcgacagggtcataatcaagggaaacaagaggaccccggaacggtttgtgggacgtcaagcagttgtgacagcgcagtgcttaaatggatggtatgttgtgaagacttcagacaacgcagagagtgtgaagctgcaataccgttccttggcaaaggttgctgatggcaatgggccttctggtcttgtcccaagcaatgtccaaagtacaagctggctataggctacaacagtaccggtagtaggccccaagcccctcttcaacttcacgcatttgctgaggttctgcgatgacgtgagcatgccaaattcagattaggcttgctttgcctttgtcccctctttttgtatcctggggacgcggatcttgtgagtatggccaaagaaatgtttactactttagcagtgttggaaacgcgtgacatcactggttacgagtagttttagccgtcttctgtctagcggtgtggccggtagtggcagcatgcgtctgcagagaacatatctggtacacataaaagtttagtgcacatgatttatatattaaattatcactatctattttagatctaacgtctctgttgaccattgtaatctataaataacaccttctaccattacactccaccatgtcagggtgtctttagcaaaatataccaaataattagagacgttagatataagatgagtgatgataatttaatatatgtaatatgtgcattaaacttatacgtgcaccagatatcttctcttacacgaatggaggcaatccttcctttcctgagatt

SEQ ID NO: 212574 - DNA, 874 bp, Zea Mays
caccggagaatgagatgaatgaacgtgagttatctgcgctgaaatctgtcattaagtgcattgaagagcacaaacttgagcagcagtaccctgtggatccacttcagaaaagggttttgcagctagagaaagcaaaggcagacaagaggatggctgttgaagcagcaaagccgcagtccaagaggcctcgtgccaatggatcggcctttgcaacccgtgctacaggctttgctgacaagagcttctactcagcaaccccagagaggcatccattcaatccttgcgagaggcagtttgtgtatggcgctgaggttcatcttcctcccatgatgacctcagcgtcttacacgatgcaacctgcccatggaccttattacggtaatggctacccagttcagtaccaggtctcgtatatccactaatggagacagccaggtgcaggtgctctttcctaacaatctagcttaacctgctgctctttgctgtagtcgtatcagttactctgcaagtttccctagctggaaatatttggaccactcaatgtgtgtgctctgagtggctgttgtggtaattttatgccctaatgacatgacataaattactcctaatatttagctatcgatgaatctcccaatgtacttcattcggcttgtgaaatgcctgtcactgaagaagcgcccaggggcatgaaaatatcatgtcgtcatggacgcctgccaaactgtcagttgcatcctgactggttgttgtttttagtttggtgtatcttttatgcccaagtatatttgctgagttatcatcttcagtttgccgattctaattggtttgtactccctcttttttctaaattataagatactttgatttttttgat

SEQ ID NO: 212575 - DNA, 1155 bp, Zea Mays
cattgacagtgcacaccagctgctcgaggcattgttggcgtctttttccagcctctttaatgaacctcagggccttcctccaccatgacaccatgatcatcgcatcaagctacttccaggtgtcattgaagttctggtggaaagtggaagacctattgatgcaattaatttggcttatgtgtttgagcttactgaacaatttgaaccagtacaccttcttaaagcatatctaagggatgttaagaaaatgtcacacgccaggaatgtcaaaacttctcctggagcacagaatgagatgaatgaacgtgagttatctgcgctgaaatctgtcattaagtgcattgaagagcacaaacttgagcagcagtaccctgtggatccacttcagaaaagggttttgcagctagagaaagcaaaggcagacaagaggatggctgttgaagcagcaaagccgcagtccaagaggcctcgtgccaatggatcggcctttgcaacccgtgctacaggctttgctgacaagagcttctactcagcaaccccagagaggcatccattcaatccttgcgagaggcagtttgtgtatggcgctgaggttcatcttcctcccatgatgacctcagcgtcttacacgatgcaacctgcccatggaccttattacggtaatggctacccagttcagtaccaggtctcgtatatccactaatggagacagccaggtgcaggtgctctttcctaacaatctagcttaacctgctgctctttgctgtagtcgtatcagttactctgcaagtttccctagctggaaatatttggaccactcaatgtgtgtgctctgagtggctgttgtggtaattttatgccctaatgacatgacataaattactcctaatatttagctatcgatgaatctcccaatgtacttcattcggcttgtgaaatgcctgtcactgaagaagcgcccaggggcatgaaaatatcatgtcgtcatggacgcctgccaaactgtcagttgcatcctgactggttgttgtttttagtttggtgtatcttttatgcccaagtatatttgctgagttatcatcttcagtttgccgattctaattggtttgtactccctcttttttctaaattataagatactttgatttttttgat

SEQ ID NO: 212576 - DNA, 1127 bp, Zea Mays
ctaggcgtccagaggttttcaagtcgataagtcgagtcgacaagcaagatagggaaaaacttgaacagcagttgcatgacatggctttgatgattgagaggctagaggggagtcgtcaaaaactgctaatggaggtgcttaatgccgctttactttttgaattgtactagtctcaaatgttgattattttttaccgcggtagacagattgattctcaatcgtcagaaatagagaaactgtttgaggagaactcagccttatctgcttcttatcaagaagccattgatgttactgtacaatgggaaaaccaggtgtgccattggccttcttgatcacttagtgcatctatgttatgcaaccctttgcataagaaatctgcctcgacttaacagaaaatttcaggttagagactgtctgaagcaaaatgaagagctccgttctcacttggagaaactaagacttgaacaagttagcctgttgaaagtaagcaatatcgctacccaatcagatgggcaaactgaaaacagtatctcaaacccaccacaaatggtcatcgagaatatttctctaaaggatcagcttataaaagaacagagcagatctgaggggttgtcggcagagataatgaaactttcagctgagcttaggaaagcagtccatgcacagaataaccttgcacgcttatacagacctgtattaagagacattgagagcaatctgatgaaaatgaaacaagaaacttatgcgacgatccagtgatacatgttgacatgttgtgaaactcagtcctctggcatggccgcatgggctccacgttactgattttcgtcgtggatgtatttatctcatgccatcttcaagatgctggtgcaaagcagttcttttcgtggccaccatttataagtagagttcagtcgagatcgttgtacttgtatcatactcatgtatacccgattcccagactggttcatctcgtaaattggaagcgatgtttggatgcctatgtatcaagtggatcataaacatccaaacaacgccttaaaatagatcgtttcgacattattattttcctgcttgcaatccaggctctaacaacttctcggtcttgtttaatcctttcatttggc

SEQ ID NO: 212577 - DNA, 1972 bp, Zea Mays
gctcttaccggcgtggttcgacttctacaacaaacatggcatctgtctcaccctgccctctttcatcatttcccgaagcttcgcatccgtccttcggtccttcctcacccgttcgtctgtctcgcctcacccacccacccacagcatcagaacggagggaattagggagcttcggccggatccgcaacatcggggaacggcgggaaccagggagctcccgccgcctagaaccggagctcccaatcgatccactggccgttgagccgacacttcaatggaagcccacgcctcgcggggccgccgcaccctggaggagattcggcagaagagagccgcggagaggatgcaacacgccgtcccgatcgcggcgtctcacgtcgactctcacgggaaccaaagagctggagctgagcatcttgctcgagttcaagaacttgaaaatggcaacacggaattggagagggaaaacaaaatgctcttgtccaagatcgctgagaaggaagttgagaaggacgcccttgtaaaccgtttgaatgatctcgagcggaatgtagtgccctctttgaaaaaaagcttgaatgacatttatttggagaaagatgctgctgtagttgctaaggaggatgctctagctcaactcaggagcatgaagaaacgactcaaggaagcagaggaagaacagtatagggcagaagaagactcggcctccttgagagcacagctaaataccctgcagcagcaaatgggccacacttacagtggatatacaatgggaacatcaagtgaggaatctgttgccatggaaaaggagatacaagatttacaggcacagctaaagcaagagtcactgctaaggcaacaggagcaacaacaattagctgaacaatcccagctgaggcaacaagagcaagaaaaactagccaaagagcaaacccgtattgcttctctggaggctgaaaagcaacagttggaagaccaaattactatgttgacaaagaaagctacagaggacgcttctgagtttgctgcacgcaaggcattttcaatgcaagatagggaaaaacttgaacagcagttgcatgacatggctttgatgattgagaggctagaggggagtcgtcaaaaactgctaatggagacagattgattctcaatcgtcagaaatagagaaactgtttgaggagaactcagccttatctgcttcttatcaagaagccattgatgttactgtacaatgggaaaaccaggttagagactgtctgaagcaaaatgaagagctccgttctcacttggagaaactaagacttgaacaagttagcctgttgaaagtaagcaatatcgctacccaatcagatgggcaaactgaaaacagtatctcaaacccaccacaaatggtcatcgagaatatttctctaaaggatcagcttataaaagaacagagcagatctgaggggttgtcggcagagataatgaaactttcagctgagcttaggaaagcagtccatgcacagaataaccttgcacgcttatacagacctgtattaagagacattgagagcaatctgatgaaaatgaaacaagaaacttatgcgacgatccagtgatacatgttgacatgttgtgaaactcagtcctctggcatggccgcatgggctccacgttactgattttcgtcgtggatgtatttatctcatgccatcttcaagatgctggtgcaaagcagttcttttcgtggccaccatttataagtagagttcagtcgagatcgttgtacttgtatcatactcatgtatacccgattcccagactggttcatctcgtaaattggaagcgatgtttggatgcctatgtatcaagtggatcataaacatccaaacaacgccttaaaatagatcgtttcgacattattattttcctgcttgcaatccaggctctaacaacttctcggtcttgtttaatcctttcatttggc

SEQ ID NO: 212578 - DNA, 1968 bp, Zea Mays
gctcttaccggcgtggttcgacttctacaacaaacatggcatctgtctcaccctgccctctttcatcatttcccgaagcttcgcatccgtccttcggtccttcctcacccgttcgtctgtctcgcctcacccacccacccacagcatcagaacggagggaattagggagcttcggccggatccgcaacatcggggaacggcgggaaccagggagctcccgccgcctagaaccggagctcccaatcgatccactggccgttgagccgacacttcaatggaagcccacgcctcgcggggccgccgcaccctggaggagattcggcagaagagagccgcggagaggatgcaacacgccgtcccgatcgcggcgtctcacgtcgactctcacgggaaccaaagagctggagctgagcatcttgctcgagttcaagaacttgaaaatggcaacacggaattggagagggaaaacaaaatgctcttgtccaagatcgctgagaaggaagttgagaaggacgcccttgtaaaccgtttgaatgatctcgagcggaatgtagtgccctctttgaaaaaaagcttgaatgacatttatttggagaaagatgctgctgtagttgctaaggaggatgctctagctcaactcaggagcatgaagaaacgactcaaggaagcagaggaagaacagtatagggcagaagaagactcggcctccttgagagcacagctaaataccctgcagcagcaaatgggccacacttacagtggatatacaatgggaacatcaagtgaggaatctgttgccatggaaaaggagatacaagatttacaggcacagctaaagcaagagtcactgctaaggcaacaggagcaacaacaattagctgaacaatcccagctgaggcaacaagagcaagaaaaactagccaaagagcaaacccgtattgcttctctggaggctgaaaagcaacagttggaagaccaaattactatgttgacaaagaaagctacagaggacgcttctgagtttgctgcacgcaaggcattttcaatgatagggaaaaacttgaacagcagttgcatgacatggctttgatgattgagaggctagaggggagtcgtcaaaaactgctaatggagacagattgattctcaatcgtcagaaatagagaaactgtttgaggagaactcagccttatctgcttcttatcaagaagccattgatgttactgtacaatgggaaaaccaggttagagactgtctgaagcaaaatgaagagctccgttctcacttggagaaactaagacttgaacaagttagcctgttgaaagtaagcaatatcgctacccaatcagatgggcaaactgaaaacagtatctcaaacccaccacaaatggtcatcgagaatatttctctaaaggatcagcttataaaagaacagagcagatctgaggggttgtcggcagagataatgaaactttcagctgagcttaggaaagcagtccatgcacagaataaccttgcacgcttatacagacctgtattaagagacattgagagcaatctgatgaaaatgaaacaagaaacttatgcgacgatccagtgatacatgttgacatgttgtgaaactcagtcctctggcatggccgcatgggctccacgttactgattttcgtcgtggatgtatttatctcatgccatcttcaagatgctggtgcaaagcagttcttttcgtggccaccatttataagtagagttcagtcgagatcgttgtacttgtatcatactcatgtatacccgattcccagactggttcatctcgtaaattggaagcgatgtttggatgcctatgtatcaagtggatcataaacatccaaacaacgccttaaaatagatcgtttcgacattattattttcctgcttgcaatccaggctctaacaacttctcggtcttgtttaatcctttcatttggc

SEQ ID NO: 212579 - DNA, 1192 bp, Zea Mays
cagtcccctcccctctcggaagttagctgaataccgctaacgacgttaaagtcaggctcacagacggcctgtatgacccttgcctctgcctttcccttttctcctcctatccctaacgcagccgccgccgccgctcggctctcccttgccaatgcacacatgcactcgccgccgccgctcgactctcccctcccaatggcaccccgtcgctcaccatcaaatgtttcctcccctacaagtgcaagatcgccaatgagatattgatggcgctgttggtggacccacctgacatcaagagggagatgtagatggagatgcagcccgcaccaccaccatctgctgcggcgtcggcatcgcagacggcgtggccactggattggccggtggacgggcgctcgctcaatcctccatcgccgcccactatatcagtccagtatgtgagtcatattgattttataattgattttatgcgccagttcttgcctcgactaatgggtcctcttccattttgtaatcacctctgcatgtttactgtatcactttggtaaattactattgttccatgttgtcttccacaacatactgcactagttcagtggttagtttcctattcaaccatttcgtaatgaaggaggtattggtatttaggtaaatatttatttatgattgtgctggtattatctcaataggctggaaaattttaaataacctaatatgacataaacctcaactgcccatgcactcttagttgttgttttgaaccggtctttcgttgtttttcttttcaccaaaaaataaaatcttgatgatgtgtgacacacctgtttggttatatcatgttatctatgtagttcggccaattaaactatgttatcaggtataactagatgaggcaaattatatatatatatatatatatatatatatcgaaataaattgttttatgaatatccaaataaaccatatagtgtcgaagctgggtactttccattgccatcattaatggacaacaatatgctactatctcacatatattatgaaatgtttctacacgcatggagcatttcttgcagtagagcgctaggtatgctctctatgcctacgatgatttatatgaggatgacttagataaggaggtggatcacatgtcagtttcgagcaagtggtttgtagctatctgtcattgcacact

SEQ ID NO: 212580 - DNA, 1986 bp, Zea Mays
ctgaataccgctaacgacgttaaagtcaggctcacagacggcctgtatgacccttgcctctgcctttcccttttctcctcctatccctaacgcagccgccgccgccgctcggctctcccttgccaatgcacacatgcactcgccgccgccgctcgactctcccctcccaatggcaccccgtcgctcaccatcaaatgtttcctcccctacaagtgcaagatcgccaatgagatattgatggcgctgttggtggacccacctgacatcaagagggagatgtagatggagatgcagcccgcaccaccaccatctgctgcggcgtcggcatcgcagacggcgtggccactggattggccggtggacgggcgctcgctcaatcctccatcgccgcccactatatcagtccagtatgtgagtcatattgattttataattgattttatgcgccagttcttgcctcgactaatgggtcctcttccattttgtaatcacctctgcatgtttactgtatcactttggtaaattactattgttccatgttgtcttccacaacatactgcactagttcagtggttagtttcctattcaaccatttcgtaatgaaggaggtattggtatttaggtaaatatttatttatgattgtgctggtattatctcaataggctggaaaattttaaataacctaatatgacataaacctcaactgcccatgcactcttagttgttgttttgaaccggtctttcgttgtttttcttttcaccaaaaaataaaatcttgatgatgtgtgacacacctgtttggttatatcatgttatctatgtagttcggccaattaaactatgttatcaggtataactagatgaggcaaattatatatatatatatatatatatatatatcgaaataaattgttttatgaatatccaaataaaccatatagtgtcgaagctgggtactttccattgccatcattaatggacaacaatatgctactatctcacatatattatgaaatgtttctacacgcatggagcatttcttgcagtagagcgctaggtatgctctctatgcctacgatgatttatatgaggatgacttagataaggaggtggatcacatgtcagtttcgagcaaggattggccaccagggtcgtggagtatatgttgcccaattttaatgaggtctggtgggatatcattaccttagatatcttgatatgcaaatagtttggtgagacatttgaagataattgatgttcatgtcacaaacattcagttaccttgtttatattaatgtgatctgcaataagttagaattaagcagccgacatgtcctccgtttgcttgattttatacagtttctttacatcagatatatatctattagtcagaaaggaaaataaaaactaatacatatttgacatacttctgacatcacattttgtttgactatactatttaatgttatgccacttgtcgaatatgcatggccttgggaatccaagaagaattgttggcatttgtaacattatttggtaatgatagttctatgctttctacttaaacaacaattatttttgatgcaggtgtttggactggaatgcgcacagtctgttactttgatgcaaaacgtatgaattggttggacagagccgccaacgaagtaccatgggtaaggatgtgctggacaatgaaagcttctgtcttgaaataataggatacaagaagcttgcaagtggttttgtgaaggcttttgtgaatcacttgaatcattagttcttttaagaatggttttgtaaagcgttagcaaatatgtgtaaaacacaataagatgtgtggcaaattcagtgatctagttgtacaattttttgtgtttatgggatatgtggatatttcattgtggaatgttaatgaagtgtgtatgtctatgtgattatgtgtataaaatatatgttttgtggtgcttttgtgataatatctattc

SEQ ID NO: 212581 - DNA, 1530 bp, Zea Mays
ctgaataccgctaacgacgttaaagtcaggctcacagacggcctgtatgacccttgcctctgcctttcccttttctcctcctatccctaacgcagccgccgccgccgctcggctctcccttgccaatgcacacatgcactcgccgccgccgctcgactctcccctcccaatggcaccccgtcgctcaccatcaaatgtttcctcccctacaagtgcaagatcgccaatgagatattgatggcgctgttggtggacccacctgacatcaagagggagatgtagatggagatgcagcccgcaccaccaccatctgctgcggcgtcggcatcgcagacggcgtggccactggattggccggtggacgggcgctcgctcaatcctccatcgccgcccactatatcagtccagtatgtgagtcatattgattttataattgattttatgcgccagttcttgcctcgactaatgggtcctcttccattttgtaatcacctctgcatgtttactgtatcactttggtaaattactattgttccatgttgtcttccacaacatactgcactagttcagtggttagtttcctattcaaccatttcgtaatgaaggaggtattggtatttaggtaaatatttatttatgattgtgctggtattatctcaataggctggaaaattttaaataacctaatatgacataaacctcaactgcccatgcactcttagttgttgttttgaaccggtctttcgttgtttttcttttcaccaaaaaataaaatcttgatgatgtgtgacacacctgtttggttatatcatgttatctatgtagttcggccaattaaactatgttatcaggtataactagatgaggcaaattatatatatatatatatatatatatatatcgaaataaattgttttatgaatatccaaataaaccatatagtgtcgaagctgggtactttccattgccatcattaatggacaacaatatgctactatctcacatatattatgaaatgtttctacacgcatggagcatttcttgcagtagagcgctaggtatgctctctatgcctacgatgatttatatgaggatgacttagataaggaggtggatcacatgtcagtttcgagcaaggtgtttggactggaatgcgcacagtctgttactttgatgcaaaacgtatgaattggttggacagagccgccaacgaagtaccatgggatgtgctggacaatgaaagcttctgtcttgaaataataggatacaagaagcttgcaagtggttttgtgaaggcttttgtgaatcacttgaatcattagttcttttaagaatggttttgtaaagcgttagcaaatatgtgtaaaacacaataagatgtgtggcaaattcagtgatctagttgtacaattttttgtgtttatgggatatgtggatatttcattgtggaatgttaatgaagtgtgtatgtctatgtgattatgtgtataaaatatatgttttgtggtgcttttgtgataatatctattc

SEQ ID NO: 212582 - DNA, 1585 bp, Zea Mays
ctgaataccgctaacgacgttaaagtcaggctcacagacggcctgtatgacccttgcctctgcctttcccttttctcctcctatccctaacgcagccgccgccgccgctcggctctcccttgccaatgcacacatgcactcgccgccgccgctcgactctcccctcccaatggcaccccgtcgctcaccatcaaatgtttcctcccctacaagtgcaagatcgccaatgagatattgatggcgctgttggtggacccacctgacatcaagagggagatgtagatggagatgcagcccgcaccaccaccatctgctgcggcgtcggcatcgcagacggcgtggccactggattggccggtggacgggcgctcgctcaatcctccatcgccgcccactatatcagtccagtatgtgagtcatattgattttataattgattttatgcgccagttcttgcctcgactaatgggtcctcttccattttgtaatcacctctgcatgtttactgtatcactttggtaaattactattgttccatgttgtcttccacaacatactgcactagttcagtggttagtttcctattcaaccatttcgtaatgaaggaggtattggtatttaggtaaatatttatttatgattgtgctggtattatctcaataggctggaaaattttaaataacctaatatgacataaacctcaactgcccatgcactcttagttgttgttttgaaccggtctttcgttgtttttcttttcaccaaaaaataaaatcttgatgatgtgtgacacacctgtttggttatatcatgttatctatgtagttcggccaattaaactatgttatcaggtataactagatgaggcaaattatatatatatatatatatatatatatatcgaaataaattgttttatgaatatccaaataaaccatatagtgtcgaagctgggtactttccattgccatcattaatggacaacaatatgctactatctcacatatattatgaaatgtttctacacgcatggagcatttcttgcagtagagcgctaggtatgctctctatgcctacgatgatttatatgaggatgacttagataaggaggtggatcacatgtcagtttcgagcaagtaggattggccaccagggtcgtggagtatatgttgcccaattttaatgaggtgtttggactggaatgcgcacagtctgttactttgatgcaaaacgtatgaattggttggacagagccgccaacgaagtaccatgggtaaggatgtgctggacaatgaaagcttctgtcttgaaataataggatacaagaagcttgcaagtggttttgtgaaggcttttgtgaatcacttgaatcattagttcttttaagaatggttttgtaaagcgttagcaaatatgtgtaaaacacaataagatgtgtggcaaattcagtgatctagttgtacaattttttgtgtttatgggatatgtggatatttcattgtggaatgttaatgaagtgtgtatgtctatgtgattatgtgtataaaatatatgttttgtggtgcttttgtgataatatctattc

SEQ ID NO: 212583 - DNA, 1535 bp, Zea Mays
ctgaataccgctaacgacgttaaagtcaggctcacagacggcctgtatgacccttgcctctgcctttcccttttctcctcctatccctaacgcagccgccgccgccgctcggctctcccttgccaatgcacacatgcactcgccgccgccgctcgactctcccctcccaatggcaccccgtcgctcaccatcaaatgtttcctcccctacaagtgcaagatcgccaatgagatattgatggcgctgttggtggacccacctgacatcaagagggagatgtagatggagatgcagcccgcaccaccaccatctgctgcggcgtcggcatcgcagacggcgtggccactggattggccggtggacgggcgctcgctcaatcctccatcgccgcccactatatcagtccagtatgtgagtcatattgattttataattgattttatgcgccagttcttgcctcgactaatgggtcctcttccattttgtaatcacctctgcatgtttactgtatcactttggtaaattactattgttccatgttgtcttccacaacatactgcactagttcagtggttagtttcctattcaaccatttcgtaatgaaggaggtattggtatttaggtaaatatttatttatgattgtgctggtattatctcaataggctggaaaattttaaataacctaatatgacataaacctcaactgcccatgcactcttagttgttgttttgaaccggtctttcgttgtttttcttttcaccaaaaaataaaatcttgatgatgtgtgacacacctgtttggttatatcatgttatctatgtagttcggccaattaaactatgttatcaggtataactagatgaggcaaattatatatatatatatatatatatatatatcgaaataaattgttttatgaatatccaaataaaccatatagtgtcgaagctgggtactttccattgccatcattaatggacaacaatatgctactatctcacatatattatgaaatgtttctacacgcatggagcatttcttgcagtagagcgctaggtatgctctctatgcctacgatgatttatatgaggatgacttagataaggaggtggatcacatgtcagtttcgagcaaggtgtttggactggaatgcgcacagtctgttactttgatgcaaaacgtatgaattggttggacagagccgccaacgaagtaccatgggtaaggatgtgctggacaatgaaagcttctgtcttgaaataataggatacaagaagcttgcaagtggttttgtgaaggcttttgtgaatcacttgaatcattagttcttttaagaatggttttgtaaagcgttagcaaatatgtgtaaaacacaataagatgtgtggcaaattcagtgatctagttgtacaattttttgtgtttatgggatatgtggatatttcattgtggaatgttaatgaagtgtgtatgtctatgtgattatgtgtataaaatatatgttttgtggtgcttttgtgataatatctattc

SEQ ID NO: 212584 - DNA, 1631 bp, Zea Mays
ctgaataccgctaacgacgttaaagtcaggctcacagacggcctgtatgacccttgcctctgcctttcccttttctcctcctatccctaacgcagccgccgccgccgctcggctctcccttgccaatgcacacatgcactcgccgccgccgctcgactctcccctcccaatggcaccccgtcgctcaccatcaaatgtttcctcccctacaagtgcaagatcgccaatgagatattgatggcgctgttggtggacccacctgacatcaagagggagatgtagatggagatgcagcccgcaccaccaccatctgctgcggcgtcggcatcgcagacggcgtggccactggattggccggtggacgggcgctcgctcaatcctccatcgccgcccactatatcagtccagtatgtgagtcatattgattttataattgattttatgcgccagttcttgcctcgactaatgggtcctcttccattttgtaatcacctctgcatgtttactgtatcactttggtaaattactattgttccatgttgtcttccacaacatactgcactagttcagtggttagtttcctattcaaccatttcgtaatgaaggaggtattggtatttaggtaaatatttatttatgattgtgctggtattatctcaataggctggaaaattttaaataacctaatatgacataaacctcaactgcccatgcactcttagttgttgttttgaaccggtctttcgttgtttttcttttcaccaaaaaataaaatcttgatgatgtgtgacacacctgtttggttatatcatgttatctatgtagttcggccaattaaactatgttatcaggtataactagatgaggcaaattatatatatatatatatatatatatatatcgaaataaattgttttatgaatatccaaataaaccatatagtgtcgaagctgggtactttccattgccatcattaatggacaacaatatgctactatctcacatatattatgaaatgtttctacacgcatggagcatttcttgcagtagagcgctaggtatgctctctatgcctacgatgatttatatgaggatgacttagataaggaggtggatcacatgtcagtttcgagcaaggattggccaccagggtcgtggagtatatgttgcccaattttaatgaggtctggtgggatatcattaccttagatatcttgatatgcaaatagtttggtgtttggactggaatgcgcacagtctgttactttgatgcaaaacgtatgaattggttggacagagccgccaacgaagtaccatgggtaaggatgtgctggacaatgaaagcttctgtcttgaaataataggatacaagaagcttgcaagtggttttgtgaaggcttttgtgaatcacttgaatcattagttcttttaagaatggttttgtaaagcgttagcaaatatgtgtaaaacacaataagatgtgtggcaaattcagtgatctagttgtacaattttttgtgtttatgggatatgtggatatttcattgtggaatgttaatgaagtgtgtatgtctatgtgattatgtgtataaaatatatgttttgtggtgcttttgtgataatatctattc

SEQ ID NO: 212585 - DNA, 1582 bp, Zea Mays
ctgaataccgctaacgacgttaaagtcaggctcacagacggcctgtatgacccttgcctctgcctttcccttttctcctcctatccctaacgcagccgccgccgccgctcggctctcccttgccaatgcacacatgcactcgccgccgccgctcgactctcccctcccaatggcaccccgtcgctcaccatcaaatgtttcctcccctacaagtgcaagatcgccaatgagatattgatggcgctgttggtggacccacctgacatcaagagggagatgtagatggagatgcagcccgcaccaccaccatctgctgcggcgtcggcatcgcagacggcgtggccactggattggccggtggacgggcgctcgctcaatcctccatcgccgcccactatatcagtccagtatgtgagtcatattgattttataattgattttatgcgccagttcttgcctcgactaatgggtcctcttccattttgtaatcacctctgcatgtttactgtatcactttggtaaattactattgttccatgttgtcttccacaacatactgcactagttcagtggttagtttcctattcaaccatttcgtaatgaaggaggtattggtatttaggtaaatatttatttatgattgtgctggtattatctcaataggctggaaaattttaaataacctaatatgacataaacctcaactgcccatgcactcttagttgttgttttgaaccggtctttcgttgtttttcttttcaccaaaaaataaaatcttgatgatgtgtgacacacctgtttggttatatcatgttatctatgtagttcggccaattaaactatgttatcaggtataactagatgaggcaaattatatatatatatatatatatatatatatcgaaataaattgttttatgaatatccaaataaaccatatagtgtcgaagctgggtactttccattgccatcattaatggacaacaatatgctactatctcacatatattatgaaatgtttctacacgcatggagcatttcttgcagtagagcgctaggtatgctctctatgcctacgatgatttatatgaggatgacttagataaggaggtggatcacatgtcagtttcgagcaaggattggccaccagggtcgtggagtatatgttgcccaattttaatgaggtgtttggactggaatgcgcacagtctgttactttgatgcaaaacgtatgaattggttggacagagccgccaacgaagtaccatgggtaaggatgtgctggacaatgaaagcttctgtcttgaaataataggatacaagaagcttgcaagtggttttgtgaaggcttttgtgaatcacttgaatcattagttcttttaagaatggttttgtaaagcgttagcaaatatgtgtaaaacacaataagatgtgtggcaaattcagtgatctagttgtacaattttttgtgtttatgggatatgtggatatttcattgtggaatgttaatgaagtgtgtatgtctatgtgattatgtgtataaaatatatgttttgtggtgcttttgtgataatatctattc

SEQ ID NO: 212586 - DNA, 1538 bp, Zea Mays
ctgaataccgctaacgacgttaaagtcaggctcacagacggcctgtatgacccttgcctctgcctttcccttttctcctcctatccctaacgcagccgccgccgccgctcggctctcccttgccaatgcacacatgcactcgccgccgccgctcgactctcccctcccaatggcaccccgtcgctcaccatcaaatgtttcctcccctacaagtgcaagatcgccaatgaggtgatattgatggcgctgttggtggacccacctgacatcaagagggagatgtagatggagatgcagcccgcaccaccaccatctgctgcggcgtcggcatcgcagacggcgtggccactggattggccggtggacgggcgctcgctcaatcctccatcgccgcccactatatcagtccagtatgtgagtcatattgattttataattgattttatgcgccagttcttgcctcgactaatgggtcctcttccattttgtaatcacctctgcatgtttactgtatcactttggtaaattactattgttccatgttgtcttccacaacatactgcactagttcagtggttagtttcctattcaaccatttcgtaatgaaggaggtattggtatttaggtaaatatttatttatgattgtgctggtattatctcaataggctggaaaattttaaataacctaatatgacataaacctcaactgcccatgcactcttagttgttgttttgaaccggtctttcgttgtttttcttttcaccaaaaaataaaatcttgatgatgtgtgacacacctgtttggttatatcatgttatctatgtagttcggccaattaaactatgttatcaggtataactagatgaggcaaattatatatatatatatatatatatatatatcgaaataaattgttttatgaatatccaaataaaccatatagtgtcgaagctgggtactttccattgccatcattaatggacaacaatatgctactatctcacatatattatgaaatgtttctacacgcatggagcatttcttgcagtagagcgctaggtatgctctctatgcctacgatgatttatatgaggatgacttagataaggaggtggatcacatgtcagtttcgagcaaggtgtttggactggaatgcgcacagtctgttactttgatgcaaaacgtatgaattggttggacagagccgccaacgaagtaccatgggtaaggatgtgctggacaatgaaagcttctgtcttgaaataataggatacaagaagcttgcaagtggttttgtgaaggcttttgtgaatcacttgaatcattagttcttttaagaatggttttgtaaagcgttagcaaatatgtgtaaaacacaataagatgtgtggcaaattcagtgatctagttgtacaattttttgtgtttatgggatatgtggatatttcattgtggaatgttaatgaagtgtgtatgtctatgtgattatgtgtataaaatatatgttttgtggtgcttttgtgataatatctattc

SEQ ID NO: 212587 - DNA, 1495 bp, Zea Mays
ctgaataccgctaacgacgttaaagtcaggctcacagacggcctgtatgacccttgcctctgcctttcccttttctcctcctatccctaacgcagccgccgccgccgctcggctctcccttgccaatgcacacatgcactcgccgccgccgctcgactctcccctcccaatggcaccccgtcgctcaccatcaaatgtttcctcccctacaagtgcaagatcgccaatgagatattgatggcgctgttggtggacccacctgacatcaagagggagatgtagatggagatgcagcccgcaccaccaccatctgctgcggcgtcggcatcgcagacggcgtggccactggattggccggtggacgggcgctcgctcaatcctccatcgccgcccactatatcagtccagtatgtgagtcatattgattttataattgattttatgcgccagttcttgcctcgactaatgggtcctcttccattttgtaatcacctctgcatgtttactgtatcactttggtaaattactattgttccatgttgtcttccacaacatactgcactagttcagtggttagtttcctattcaaccatttcgtaatgaaggaggtattggtatttaggtaaatatttatttatgattgtgctggtattatctcaataggctggaaaattttaaataacctaatatgacataaacctcaactgcccatgcactcttagttgttgttttgaaccggtctttcgttgtttttcttttcaccaaaaaataaaatcttgatgatgtgtgacacacctgtttggttatatcatgttatctatgtagttcggccaattaaactatgttatcaggtataactagatgaggcaaattatatatatatatatatatatatatatatcgaaataaattgttttatgaatatccaaataaaccatatagtgtcgaagctgggtactttccattgccatcattaatggacaacaatatgctactatctcacatatattatgaaatgtttctacacgcatggagcatttcttgcagtagagcgctaggtatgctctctatgcctacgatgatttatatgaggatgacttagataaggaggtggatcacatgtcagtttcgagcaaggtgtttggactggaatgcgcacagtctgttactttgatgcaaaacgtatgaattggttggacagagccgccaacgaagtaccatgggtaaggatacaagaagcttgcaagtggttttgtgaaggcttttgtgaatcacttgaatcattagttcttttaagaatggttttgtaaagcgttagcaaatatgtgtaaaacacaataagatgtgtggcaaattcagtgatctagttgtacaattttttgtgtttatgggatatgtggatatttcattgtggaatgttaatgaagtgtgtatgtctatgtgattatgtgtataaaatatatgttttgtggtgcttttgtgataatatctattc

SEQ ID NO: 212588 - DNA, 1580 bp, Zea Mays
ctgaataccgctaacgacgttaaagtcaggctcacagacggcctgtatgacccttgcctctgcctttcccttttctcctcctatccctaacgcagccgccgccgccgctcggctctcccttgccaatgcacacatgcactcgccgccgccgctcgactctcccctcccaatggcaccccgtcgctcaccatcaaatgtttcctcccctacaagtgcaagatcgccaatgagatattgatggcgctgttggtggacccacctgacatcaagagggagatgtagatggagatgcagcccgcaccaccaccatctgctgcggcgtcggcatcgcagacggcgtggccactggattggccggtggacgggcgctcgctcaatcctccatcgccgcccactatatcagtccagtatgtgagtcatattgattttataattgattttatgcgccagttcttgcctcgactaatgggtcctcttccattttgtaatcacctctgcatgtttactgtatcactttggtaaattactattgttccatgttgtcttccacaacatactgcactagttcagtggttagtttcctattcaaccatttcgtaatgaaggaggtattggtatttaggtaaatatttatttatgattgtgctggtattatctcaataggctggaaaattttaaataacctaatatgacataaacctcaactgcccatgcactcttagttgttgttttgaaccggtctttcgttgtttttcttttcaccaaaaaataaaatcttgatgatgtgtgacacacctgtttggttatatcatgttatctatgtagttcggccaattaaactatgttatcaggtataactagatgaggcaaattatatatatatatatatatatatatatatcgaaataaattgttttatgaatatccaaataaaccatatagtgtcgaagctgggtactttccattgccatcattaatggacaacaatatgctactatctcacatatattatgaaatgtttctacacgcatggagcatttcttgcagtagagcgctaggtatgctctctatgcctacgatgatttatatgaggatgacttagataaggaggtggatcacatgtcagtttcgagcaagtaggattggccaccagggtcgtggagtatatgttgcccaattttaatgaggtgtttggactggaatgcgcacagtctgttactttgatgcaaaacgtatgaattggttggacagagccgccaacgaagtaccatgggatgtgctggacaatgaaagcttctgtcttgaaataataggatacaagaagcttgcaagtggttttgtgaaggcttttgtgaatcacttgaatcattagttcttttaagaatggttttgtaaagcgttagcaaatatgtgtaaaacacaataagatgtgtggcaaattcagtgatctagttgtacaattttttgtgtttatgggatatgtggatatttcattgtggaatgttaatgaagtgtgtatgtctatgtgattatgtgtataaaatatatgttttgtggtgcttttgtgataatatctattc

SEQ ID NO: 212589 - DNA, 978 bp, Zea Mays
atgacccttgcctctgcctttcccttttctcctcctatccctaacgcagccgccgccgccgctcggctctcccttgccaatgcacacatgcactcgccgccgccgctcgactctcccctcccaatggcaccccgtcgctcaccatcaaatgtttcctcccctacaagtgcaagatcgccaatgaggtggtatagccatccgccacacctgccactgtccctttgccatttctggtcctagatctgtgttacctgcatttttctttgccacgggatcgggatggtggaggagcagctggtggggattagcatcttgcttcagatatctattctcgtgctctcgttcatgctcagatattgatggcgctgttggtggacccacctgacatcaagagggagatgtagatggagatgcagcccgcaccaccaccatctgctgcggcgtcggcatcgcagacggcgtggccactggattggccggtggacgggcgctcgctcaatcctccatcgccgcccactatatcagtccagtatagcgctaggtatgctctctatgcctacgatgatttatatgaggatgacttagataaggaggtggatcacatgtcagtttcgagcaaggtgtttggactggaatgcgcacagtctgttactttgatgcaaaacgtatgaattggttggacagagccgccaacgaagtaccatgggtaaggatacaagaagcttgcaagtggttttgtgaaggcttttgtgaatcacttgaatcattagttcttttaagaatggttttgtaaagcgttagcaaatatgtgtaaaacacaataagatgtgtggcaaattcagtgatctagttgtacaattttttgtgtttatgggatatgtggatatttcattgtggaatgttaatgaagtgtgtatgtctatgtgattatgtgtataaaatatatgttttgtggtgcttttgtgataatatctattc

SEQ ID NO: 212590 - DNA, 1033 bp, Zea Mays
atgacccttgcctctgcctttcccttttctcctcctatccctaacgcagccgccgccgccgctcggctctcccttgccaatgcacacatgcactcgccgccgccgctcgactctcccctcccaatggcaccccgtcgctcaccatcaaatgtttcctcccctacaagtgcaagatcgccaatgaggtggtatagccatccgccacacctgccactgtccctttgccatttctggtcctagatctgtgttacctgcatttttctttgccacgggatcgggatggtggaggagcagctggtggggattagcatcttgcttcagatatctattctcgtgctctcgttcatgctcagatattgatggcgctgttggtggacccacctgacatcaagagggagatgtagatggagatgcagcccgcaccaccaccatctgctgcggcgtcggcatcgcagacggcgtggccactggattggccggtggacgggcgctcgctcaatcctccatcgccgcccactatatcagtccagtatcatttcttgcagtagagcgctaggtatgctctctatgcctacgatgatttatatgaggatgacttagataaggaggtggatcacatgtcagtttcgagcaaggtgtttggactggaatgcgcacagtctgttactttgatgcaaaacgtatgaattggttggacagagccgccaacgaagtaccatgggtaaggatgtgctggacaatgaaagcttctgtcttgaaataataggatacaagaagcttgcaagtggttttgtgaaggcttttgtgaatcacttgaatcattagttcttttaagaatggttttgtaaagcgttagcaaatatgtgtaaaacacaataagatgtgtggcaaattcagtgatctagttgtacaattttttgtgtttatgggatatgtggatatttcattgtggaatgttaatgaagtgtgtatgtctatgtgattatgtgtataaaatatatgttttgtggtgcttttgtgataatatctattc

SEQ ID NO: 212591 - DNA, 1232 bp, Zea Mays
atgacccttgcctctgcctttcccttttctcctcctatccctaacgcagccgccgccgccgctcggctctcccttgccaatgcacacatgcactcgccgccgccgctcgactctcccctcccaatggcaccccgtcgctcaccatcaaatgtttcctcccctacaagtgcaagatcgccaatgaggtggtatagccatccgccacacctgccactgtccctttgccatttctggtcctagatctgtgttacctgcatttttctttgccacgggatcgggatggtggaggagcagctggtggggattagcatcttgcttcagatatctattctcgtgctctcgttcatgctcagatattgatggcgctgttggtggacccacctgacatcaagagggagatgtagatggagatgcagcccgcaccaccaccatctgctgcggcgtcggcatcgcagacggcgtggccactggattggccggtggacgggcgctcgctcaatcctccatcgccgcccactatatcagtccagtatgtgagtcatattgattttataattgattttatgcgccagttcttgcctcgactaatgggtcctcttccattttgtaatcacctctgcatgtttactgtatcactttggtaaattactattgttccatgttgtcttccacaacatactgcactagttcagtggttagtttcctattcaaccatttcgtaatgaaggaggtattggtatttagtagagcgctaggtatgctctctatgcctacgatgatttatatgaggatgacttagataaggaggtggatcacatgtcagtttcgagcaaggtgtttggactggaatgcgcacagtctgttactttgatgcaaaacgtatgaattggttggacagagccgccaacgaagtaccatgggtaaggatgtgctggacaatgaaagcttctgtcttgaaataataggatacaagaagcttgcaagtggttttgtgaaggcttttgtgaatcacttgaatcattagttcttttaagaatggttttgtaaagcgttagcaaatatgtgtaaaacacaataagatgtgtggcaaattcagtgatctagttgtacaattttttgtgtttatgggatatgtggatatttcattgtggaatgttaatgaagtgtgtatgtctatgtgattatgtgtataaaatatatgttttgtggtgcttttgtgataatatctattc

SEQ ID NO: 212592 - DNA, 1244 bp, Zea Mays
atgacccttgcctctgcctttcccttttctcctcctatccctaacgcagccgccgccgccgctcggctctcccttgccaatgcacacatgcactcgccgccgccgctcgactctcccctcccaatggcaccccgtcgctcaccatcaaatgtttcctcccctacaagtgcaagatcgccaatgaggtggtatagccatccgccacacctgccactgtccctttgccatttctggtcctagatctgtgttacctgcatttttctttgccacgggatcgggatggtggaggagcagctggtggggattagcatcttgcttcagatatctattctcgtgctctcgttcatgctcagatattgatggcgctgttggtggacccacctgacatcaagagggagatgtagatggagatgcagcccgcaccaccaccatctgctgcggcgtcggcatcgcagacggcgtggccactggattggccggtggacgggcgctcgctcaatcctccatcgccgcccactatatcagtccagtatgtgagtcatattgattttataattgattttatgcgccagttcttgcctcgactaatgggtcctcttccattttgtaatcacctctgcatgtttactgtatcactttggtaaattactattgttccatgttgtcttccacaacatactgcactagttcagtggttagtttcctattcaaccatttcgtaatgaaggaggtattggtatttagcatttcttgcagtagagcgctaggtatgctctctatgcctacgatgatttatatgaggatgacttagataaggaggtggatcacatgtcagtttcgagcaaggtgtttggactggaatgcgcacagtctgttactttgatgcaaaacgtatgaattggttggacagagccgccaacgaagtaccatgggtaaggatgtgctggacaatgaaagcttctgtcttgaaataataggatacaagaagcttgcaagtggttttgtgaaggcttttgtgaatcacttgaatcattagttcttttaagaatggttttgtaaagcgttagcaaatatgtgtaaaacacaataagatgtgtggcaaattcagtgatctagttgtacaattttttgtgtttatgggatatgtggatatttcattgtggaatgttaatgaagtgtgtatgtctatgtgattatgtgtataaaatatatgttttgtggtgcttttgtgataatatctattc

SEQ ID NO: 212593 - DNA, 1683 bp, Zea Mays
atgacccttgcctctgcctttcccttttctcctcctatccctaacgcagccgccgccgccgctcggctctcccttgccaatgcacacatgcactcgccgccgccgctcgactctcccctcccaatggcaccccgtcgctcaccatcaaatgtttcctcccctacaagtgcaagatcgccaatgaggtggtatagccatccgccacacctgccactgtccctttgccatttctggtcctagatctgtgttacctgcatttttctttgccacgggatcgggatggtggaggagcagctggtggggattagcatcttgcttcagatatctattctcgtgctctcgttcatgctcagatattgatggcgctgttggtggacccacctgacatcaagagggagatgtagatggagatgcagcccgcaccaccaccatctgctgcggcgtcggcatcgcagacggcgtggccactggattggccggtggacgggcgctcgctcaatcctccatcgccgcccactatatcagtccagtatgtgagtcatattgattttataattgattttatgcgccagttcttgcctcgactaatgggtcctcttccattttgtaatcacctctgcatgtttactgtatcactttggtaaattactattgttccatgttgtcttccacaacatactgcactagttcagtggttagtttcctattcaaccatttcgtaatgaaggaggtattggtatttagtagagcgctaggtatgctctctatgcctacgatgatttatatgaggatgacttagataaggaggtggatcacatgtcagtttcgagcaaggattggccaccagggtcgtggagtatatgttgcccaattttaatgaggtctggtgggatatcattaccttagatatcttgatatgcaaatagtttggtgagacatttgaagataattgatgttcatgtcacaaacattcagttaccttgtttatattaatgtgatctgcaataagttagaattaagcagccgacatgtcctccgtttgcttgattttatacagtttctttacatcagatatatatctattagtcagaaaggaaaataaaaactaatacatatttgacatacttctgacatcacattttgtttgactatactatttaatgttatgccacttgtcgaatatgcatggccttgggaatccaagaagaattgttggcatttgtaacattatttggtaatgatagttctatgctttctacttaaacaacaattatttttgatgcaggtgtttggactggaatgcgcacagtctgttactttgatgcaaaacgtatgaattggttggacagagccgccaacgaagtaccatgggtaaggatgtgctggacaatgaaagcttctgtcttgaaataataggatacaagaagcttgcaagtggttttgtgaaggcttttgtgaatcacttgaatcattagttcttttaagaatggttttgtaaagcgttagcaaatatgtgtaaaacacaataagatgtgtggcaaattcagtgatctagttgtacaattttttgtgtttatgggatatgtggatatttcattgtggaatgttaatgaagtgtgtatgtctatgtgattatgtgtataaaatatatgttttgtggtgcttttgtgataatatctattc

SEQ ID NO: 212594 - DNA, 1029 bp, Zea Mays
atgacccttgcctctgcctttcccttttctcctcctatccctaacgcagccgccgccgccgctcggctctcccttgccaatgcacacatgcactcgccgccgccgctcgactctcccctcccaatggcaccccgtcgctcaccatcaaatgtttcctcccctacaagtgcaagatcgccaatgaggtggtatagccatccgccacacctgccactgtccctttgccatttctggtcctagatctgtgttacctgcatttttctttgccacgggatcgggatggtggaggagcagctggtggggattagcatcttgcttcagatatctattctcgtgctctcgttcatgctcagatattgatggcgctgttggtggacccacctgacatcaagagggagatgtagatggagatgcagcccgcaccaccaccatctgctgcggcgtcggcatcgcagacggcgtggccactggattggccggtggacgggcgctcgctcaatcctccatcgccgcccactatatcagtccacatttcttgcagtagagcgctaggtatgctctctatgcctacgatgatttatatgaggatgacttagataaggaggtggatcacatgtcagtttcgagcaaggtgtttggactggaatgcgcacagtctgttactttgatgcaaaacgtatgaattggttggacagagccgccaacgaagtaccatgggtaaggatgtgctggacaatgaaagcttctgtcttgaaataataggatacaagaagcttgcaagtggttttgtgaaggcttttgtgaatcacttgaatcattagttcttttaagaatggttttgtaaagcgttagcaaatatgtgtaaaacacaataagatgtgtggcaaattcagtgatctagttgtacaattttttgtgtttatgggatatgtggatatttcattgtggaatgttaatgaagtgtgtatgtctatgtgattatgtgtataaaatatatgttttgtggtgcttttgtgataatatctattc

SEQ ID NO: 212595 - DNA, 631 bp, Zea Mays
gcaagatcgccaatgagatggagatgcagcccgcaccaccaccatctgctgcggcgtcggcatcgcagacggcgtggccactggattggccggtggacgggcgctcgctcaatcctccatcgccgcccactatatcagtccagtatagcgctaggtatgctctctatgcctacgatgatttatatgaggatgacttagataaggaggtggatcacatgtcagtttcgagcaaggtgtttggactggaatgcgcacagtctgttactttgatgcaaaacgtatgaattggttggacagagccgccaacgaagtaccatgggtaaggatgtgctggacaatgaaagcttctgtcttgaaataataggatacaagaagcttgcaagtggttttgtgaaggcttttgtgaatcacttgaatcattagttcttttaagaatggttttgtaaagcgttagcaaatatgtgtaaaacacaataagatgtgtggcaaattcagtgatctagttgtacaattttttgtgtttatgggatatgtggatatttcattgtggaatgttaatgaagtgtgtatgtctatgtgattatgtgtataaaatatatgttttgtggtgcttttgtgataatatctattc

SEQ ID NO: 212596 - DNA, 461 bp, Zea Mays
caaattctctactgtttgcagcaaaaacaacaaagaagattgtgctgaagctgcagtgccagagctgcaagcactactctcaacacccgatcaagaggtgcaagcactttgagatcggtggtgacaagaaaggcaagggaacctctctgttctaagcgtatcataaacttgctcagggtctcaagtatctgtcagaatttaccattacaaacaccctgtgcttagcttctgcatatgttcttttgtcacatctttttggtacgttgtagtttgtatgagaccaagctattgtttcgtgttattattatatttcatgaaattgtcaacatgaccgtttgcttgactgtaaacatagttctgagctttgggcaaacaaaataaaaaaaaatcttattatgggtgattgaattccaaattcatatacatacaagttgaaaattttaagttcatattttgaggca

SEQ ID NO: 212597 - DNA, 1848 bp, Zea Mays
caaagaacaggcagatctgtggagtgttggtgtcattctatatcaacttgttactggaataccaccttttaatggggacaatcagatacagttgcttaaaaatatactcaggacgcatgaaatacgattaccatctgattgtgaattgagccatgactgcatcgacttgtgcagaaagttgctgcggctcaattcagtggagcggcttacagttgaagaatttgtgcaccacccatttctttctgaacatgctccagagaggaccttgagccggacattatctgaaataagagatggctttccaataaataatatcagtccaacaaggccttcaagccaaagttcacaagaagattgtatgccttttcctttggatgatgagtcaagtggacaggatgagggtccaattcctgacagtaagagtccgatgaaatcttatgggtttcccacagtctgttctccaggtatgtcttgggaaataatcatgcacctagtagccaacaccatggccatactgataaaatgaccaaggaaagcaagattcatgaagtgcaaggtccaaaaggtgtttatccagaagatcaggaatatgtatttgtgtctggaccacacccagagggatcatcgtcttcaacaaatgcttctcagcagcttaacttaccggcaaaatatgataatttatctgtttcaccaccgaagttaactttcttgagtgcaccaatgccgataaacggtttgccgattaatagacaacaatctgctgggactggtagcttcgacagccactattctcctgcatctgtcatttcacagggatctgcggatataagtgatgccatggatcagcccccatctgattatctgacgaggattagattgttagagcaatatgcatcagccatagcagggttggtcagggatgagatcaaaggtggcaggcacttggtggcgttctctattcagctaattgttcttgcaacctggaagcaagcaattcatttatgcaatacctttgtagcttcacttgcaagggagagtccctcacaggatatccatatgaaggggcttagtgctgatgcttcgcatttgcttgcgaactcaaagctagctgatgatgtctgcgtgcagatagagaaacagtttctctccgaagttgaatatgcggaagaactagccagcactgtgggacagatagctgatggtacagagatgccagatgcaatcgaaatgatatttcagtctgctttacttacaggaaggcgaggcggtgttgatgagatgtttgggaaagcagcggatgccatgactgggtatacgagggcggtatccatgctgcggtttctcctgatcgaggcaccatcacttgccctcaaccctcctttgactctgacaagatccgatcggcatcgacttcgcacatacattgaagctctcaacaccaggctctgtcagatgcagagccagaggcattgactgctgccatgtgtcctcaaatcttgttcaggttgagggacggtagacttgtgcaatattttttcatttgtaaatatatttgttggcccaagataggacatgtaagatgtcagaaatttggaactaggcagagcagcgaaaatctattataactcgaccagactactattatgatatggaattaggtggagtgtacgtgttaggttcattctgtgtgaattcaggcagaagcttgaaaacgaaatgaccaatcatggtcacttgtggaaatgtaaactacttcgtagattctttattagtactctatttcgttcttttttatttgttgtggtttagttaaaaaaatgaattagctttcgacaaatattcgagaaa

SEQ ID NO: 212598 - DNA, 1775 bp, Zea Mays
ggcatttgtaaacgtagctaaacaaagatttttgcaaccctttgccctagccgaaacactttgtggttcaccactttacatggctccagaagtcatgcaaggtcagaagtatgatgcaaaggcagatctgtggagtgttggtgtcattctatatcaacttgttactggaataccaccttttaatggggacaatcagatacagttgcttaaaaatatactcaggacgcatgaaatacgattaccatctgattgtgaattgagccatgactgcatcgacttgtgcagaaagttgctgcggctcaattcagtggagcggcttacagttgaagaatttgtgcaccacccatttctttctgaacatgctccagagaggaccttgagccggacattatctgaaataagagatggctttccaataaataatatcagtccaacaaggccttcaagccaaagttcacaagaagattgtatgccttttcctttggatgatgagtcaagtggacaggatgagggtccaattcctgacagtaagagtccgatgaaatcttatgggtttcccacaggtaaaagattggataaaacttcaggccagagtccatcaaaacataccagtctgttctccaggtatgtcttgggaaataatcatgcacctagtagccaacaccatggccatactgataaaatgaccaaggaaagcaagattcatgaagtgcaaggtccaaaaggtgtttatccagaagggatctgcggatataagtgatgccatggatcagcccccatctgattatctgacgaggattagattgttagagcaatatgcatcagccatagcagggttggtcagggatgagatcaaaggtggcaggcacttggtggcgttctctattcagctaattgttcttgcaacctggaagcaagcaattcatttatgcaatacctttgtagcttcacttgcaagggagagtccctcacaggatatccatatgaaggggcttagtgctgatgcttcgcatttgcttgcgaactcaaagctagctgatgatgtctgcgtgcagatagagaaacagtttctctccgaagttgaatatgcggaagaactagccagcactgtgggacagatagctgatggtacagagatgccagatgcaatcgaaatgatatttcagtctgctttacttacaggaaggcgaggcggtgttgatgagatgtttgggaaagcagcggatgccatgactgggtatacgagggcggtatccatgctgcggtttctcctgatcgaggcaccatcacttgccctcaaccctcctttgactctgacaagatccgatcggcatcgacttcgcacatacattgaagctctcaacaccaggctctgtcagatgcagagccagaggcattgactgctgccatgtgtcctcaaatcttgttcaggttgagggacggtagacttgtgcaatattttttcatttgtaaatatatttgttggcccaagataggacatgtaagatgtcagaaatttggaactaggcagagcagcgaaaatctattataactcgaccagactactattatgatatggaattaggtggagtgtacgtgttaggttcattctgtgtgaattcaggcagaagcttgaaaacgaaatgaccaatcatggtcacttgtggaaatgtaaactacttcgtagattctttattagtactctatttcgttcttttttatttgttgtggtttagttaaaaaaatgaattagctttcgacaaatattcgagaaa

SEQ ID NO: 212599 - DNA, 2057 bp, Zea Mays
gatcttttagggcgattgcaagtagcgatctttctgaagtctctggcatttgtaaacgtagctaaacaaagatttttgcaaccctttgccctagccgaaacactttgtggttcaccactttacatggctccagaagtcatgcaaggtcagaagtatgatgcaaaggcagatctgtggagtgttggtgtcattctatatcaacttgttactggaataccaccttttaatggggacaatcagatacagttgcttaaaaatatactcaggacgcatgaaatacgattaccatctgattgtgaattgagccatgactgcatcgacttgtgcagaaagttgctgcggctcaattcagtggagcggcttacagttgaagaatttgtgcaccacccatttctttctgaacatgctccagagaggaccttgagccggacattatctgaaataagagatggctttccaataaataatatcagtccaacaaggccttcaagccaaagttcacaagaagattgtatgccttttcctttggatgatgagtcaagtggacaggatgagggtccaattcctgacagtaagagtccgatgaaatcttatgggtttcccacaggtaaaagattggataaaacttcaggccagagtccatcaaaacataccagtctgttctccaggtatgtcttgggaaataatcatgcacctagtagccaacaccatggccatactgataaaatgaccaaggaaagcaagattcatgaagtgcaaggtccaaaaggtgtttatccagaagtgtagatcaggaatatgtatttgtgtctggaccacacccagagggatcatcgtcttcaacaaatgcttctcagcagcttaacttaccggcaaaatatgataatttatctgtttcaccaccgaagttaactttcttgagtgcaccaatgccgataaacggtttgccgattaatagacaacaatctgctgggactggtagcttcgacagccactattctcctgcatctgtcatttcacagggatctgcggatataagtgatgccatggatcagcccccatctgattatctgacgaggattagattgttagagcaatatgcatcagccatagcagggttggtcagggatgagatcaaaggtggcaggcacttggtggcgttctctattcagctaattgttcttgcaacctggaagcaagcaattcatttatgcaatacctttgtagcttcacttgcaagggagagtccctcacaggatatccatatgaaggggcttagtgctgatgcttcgcatttgcttgcgaactcaaagctagctgatgatgtctgcgtgcagatagagaaacagtttctctccgaagttgaatatgcggaagaactagccagcactgtgggacagatagctgatggtacagagatgccagatgcaatcgaaatgatatttcagtctgctttacttacaggaaggcgaggcggtgttgatgagatgtttgggaaagcagcggatgccatgactgggtatacgagggcggtatccatgctgcggtttctcctgatcgaggcaccatcacttgccctcaaccctcctttgactctgacaagatccgatcggcatcgacttcgcacatacattgaagctctcaacaccaggctctgtcagatgcagagccagaggcattgactgctgccatgtgtcctcaaatcttgttcaggttgagggacggtagacttgtgcaatattttttcatttgtaaatatatttgttggcccaagataggacatgtaagatgtcagaaatttggaactaggcagagcagcgaaaatctattataactcgaccagactactattatgatatggaattaggtggagtgtacgtgttaggttcattctgtgtgaattcaggcagaagcttgaaaacgaaatgaccaatcatggtcacttgtggaaatgtaaactacttcgtagattctttattagtactctatttcgttcttttttatttgttgtggtttagttaaaaaaatgaattagctttcgacaaatattcgagaaa

SEQ ID NO: 212600 - DNA, 2085 bp, Zea Mays
gatcttttagggcgattgcaagtagcgatctttctgaagtctctggcatttgtaaacgtagctaaacaaagatttttgcaaccctttgccctagccgaaacactttgtggttcaccactttacatggctccagaagtcatgcaaggtcagaagtatgatgcaaaggcagatctgtggagtgttggtgtcattctatatcaacttgttactggaataccaccttttaatggggacaatcagatacagttgcttaaaaatatactcaggacgcatgaaatacgattaccatctgattgtgaattgagccatgactgcatcgacttgtgcagaaagttgctgcggctcaattcagtggagcggcttacagttgaagaatttgtgcaccacccatttctttctgaacatgctccagagaggaccttgagccggacattatctgaaataagagatggctttccaataaataatatcagtccaacaaggccttcaagccaaagttcacaagaagattgtatgccttttcctttggatgatgagtcaagtggacaggatgagggtccaattcctgacagtaagagtccgatgaaatcttatgggtttcccacaggtaaaagattggataaaacttcaggccagagtccatcaaaacataccagtctgttctccaggtatgtcttgggaaataatcatgcacctagtagccaacaccatggccatactgataaaatgaccaaggaaagcaagattcatgaagtgcaaggtccaaaaggtgtttatccagaagattcccctatcattgattcattagagtttgtagatcaggaatatgtatttgtgtctggaccacacccagagggatcatcgtcttcaacaaatgcttctcagcagcttaacttaccggcaaaatatgataatttatctgtttcaccaccgaagttaactttcttgagtgcaccaatgccgataaacggtttgccgattaatagacaacaatctgctgggactggtagcttcgacagccactattctcctgcatctgtcatttcacagggatctgcggatataagtgatgccatggatcagcccccatctgattatctgacgaggattagattgttagagcaatatgcatcagccatagcagggttggtcagggatgagatcaaaggtggcaggcacttggtggcgttctctattcagctaattgttcttgcaacctggaagcaagcaattcatttatgcaatacctttgtagcttcacttgcaagggagagtccctcacaggatatccatatgaaggggcttagtgctgatgcttcgcatttgcttgcgaactcaaagctagctgatgatgtctgcgtgcagatagagaaacagtttctctccgaagttgaatatgcggaagaactagccagcactgtgggacagatagctgatggtacagagatgccagatgcaatcgaaatgatatttcagtctgctttacttacaggaaggcgaggcggtgttgatgagatgtttgggaaagcagcggatgccatgactgggtatacgagggcggtatccatgctgcggtttctcctgatcgaggcaccatcacttgccctcaaccctcctttgactctgacaagatccgatcggcatcgacttcgcacatacattgaagctctcaacaccaggctctgtcagatgcagagccagaggcattgactgctgccatgtgtcctcaaatcttgttcaggttgagggacggtagacttgtgcaatattttttcatttgtaaatatatttgttggcccaagataggacatgtaagatgtcagaaatttggaactaggcagagcagcgaaaatctattataactcgaccagactactattatgatatggaattaggtggagtgtacgtgttaggttcattctgtgtgaattcaggcagaagcttgaaaacgaaatgaccaatcatggtcacttgtggaaatgtaaactacttcgtagattctttattagtactctatttcgttcttttttatttgttgtggtttagttaaaaaaatgaattagctttcgacaaatattcgagaaa

SEQ ID NO: 212601 - DNA, 2566 bp, Zea Mays
ctctcgcttttctgttccgcgcagcaacgacgcggttgcttctccccacggcggcatctcctgcgcggcggcgccgcccccgcgagagccgcgacggcgcactaggcgagttactggacacgggagcgatgggggacggcgccagcggccgcggcggtcgaagcggcgccgggcgccgggtgggggagtacgagctgctgcgaccgattgggtcgggagcctactcgcaggtgtggctgggacggcaccgggtgcggggcacggaggtggcggtgaaggagatcgccatggaacgtctcagcaaaaagctccgcgagagcctcctctccgaggtcgacatccttcgtcgcatccgacacgataacgtcatcgcactccacgactccgtcaaggatcatgggagtatatatctcatactggagtattgtcgaggtggtgacttacatgcataccttcaacgtcataaaagagtttctgaaaaggttgctaagcacttcatccgtcagttagcatctggtctgaaaatgcttcgcgataataacgtggttcaccgagacctaaaacctcagaacattcttcttgttgaaaataatgaaaatactctgttgaagattgccgactttggatttgcaaaatttttgcaaccctttgccctagccgaaacactttgtggttcaccactttacatggctccagaagtcatgcaaggtcagaagtatgatgcaaaggcagatctgtggagtgttggtgtcattctatatcaacttgttactggaataccaccttttaatggggacaatcagatacagttgcttaaaaatatactcaggacgcatgaaatacgattaccatctgattgtgaattgagccatgactgcatcgacttgtgcagaaagttgctgcggctcaattcagtggagcggcttacagttgaagaatttgtgcaccacccatttctttctgaacatgctccagagaggaccttgagccggacattatctgaaataagagatggctttccaataaataatatcagtccaacaaggccttcaagccaaagttcacaagaagattgtatgccttttcctttggatgatgagtcaagtggacaggatgagggtccaattcctgacagtaagagtccgatgaaatcttatgggtttcccacagtctgttctccaggtatgtcttgggaaataatcatgcacctagtagccaacaccatggccatactgataaaatgaccaaggaaagcaagattcatgaagtgcaaggtccaaaaggtgtttatccagaagatcaggaatatgtatttgtgtctggaccacacccagagggatcatcgtcttcaacaaatgcttctcagcagcttaacttaccggcaaaatatgataatttatctgtttcaccaccgaagttaactttcttgagtgcaccaatgccgataaacggtttgccgattaatagacaacaatctgctgggactggtagcttcgacagccactattctcctgcatctgtcatttcacagggatctgcggatataagtgatgccatggatcagcccccatctgattatctgacgaggattagattgttagagcaatatgcatcagccatagcagggttggtcagggatgagatcaaaggtggcaggcacttggtggcgttctctattcagctaattgttcttgcaacctggaagcaagcaattcatttatgcaatacctttgtagcttcacttgcaagggagagtccctcacaggatatccatatgaaggggcttagtgctgatgcttcgcatttgcttgcgaactcaaagctagctgatgatgtctgcgtgcagatagagaaacagtttctctccgaagttgaatatgcggaagaactagccagcactgtgggacagatagctgatggtacagagatgccagatgcaatcgaaatgatatttcagtctgctttacttacaggaaggcgaggcggtgttgatgagatgtttgggaaagcagcggatgccatgactgggtatacgagggcggtatccatgctgcggtttctcctgatcgaggcaccatcacttgccctcaaccctcctttgactctgacaagatccgatcggcatcgacttcgcacatacattgaagctctcaacaccaggctctgtcagatgcagagccagaggcattgactgctgccatgtgtcctcaaatcttgttcaggttgagggacggtagacttgtgcaatattttttcatttgtaaatatatttgttggcccaagataggacatgtaagatgtcagaaatttggaactaggcagagcagcgaaaatctattataactcgaccagactactattatgatatggaattaggtggagtgtacgtgttaggttcattctgtgtgaattcaggcagaagcttgaaaacgaaatgaccaatcatggtcacttgtggaaatgtaaactacttcgtagattctttattagtactctatttcgttcttttttatttgttgtggtttagttaaaaaaatgaattagctttcgacaaatattcgagaaa

SEQ ID NO: 212602 - DNA, 1102 bp, Zea Mays
gcgacctgaccctgtttccttctctggtagtctggtctctcgcttttctgttccgcgcagcaacgacgcggttgcttctccccacggcggcatctcctgcgcggcggcgccgcccccgcgagagccgcgacggcgcactaggcgagttactggacacgggagcgatgggggacggcgccagcggccgcggcggcacttggtggcgttctctattcagctaattgttcttgcaacctggaagcaagcaattcatttatgcaatacctttgtagcttcacttgcaagggagagtccctcacaggatatccatatgaaggggcttagtgctgatgcttcgcatttgcttgcgaactcaaagctagctgatgatgtctgcgtgcagatagagaaacagtttctctccgaagttgaatatgcggaagaactagccagcactgtgggacagatagctgatggtacagagatgccagatgcaatcgaaatgatatttcagtctgctttacttacaggaaggcgaggcggtgttgatgagatgtttgggaaagcagcggatgccatgactgggtatacgagggcggtatccatgctgcggtttctcctgatcgaggcaccatcacttgccctcaaccctcctttgactctgacaagatccgatcggcatcgacttcgcacatacattgaagctctcaacaccaggctctgtcagatgcagagccagaggcattgactgctgccatgtgtcctcaaatcttgttcaggttgagggacggtagacttgtgcaatattttttcatttgtaaatatatttgttggcccaagataggacatgtaagatgtcagaaatttggaactaggcagagcagcgaaaatctattataactcgaccagactactattatgatatggaattaggtggagtgtacgtgttaggttcattctgtgtgaattcaggcagaagcttgaaaacgaaatgaccaatcatggtcacttgtggaaatgtaaactacttcgtagattctttattagtactctatttcgttcttttttatttgttgtggtttagttaaaaaaatgaattagctttcgacaaatattcgagaaa

SEQ ID NO: 212603 - DNA, 1940 bp, Zea Mays
aaacaaagatttttgcaaccctttgccctagccgaaacactttgtggttcaccactttacatggctccagaagtcatgcaaggtcagaagtatgatgcaaaggcagatctgtggagtgttggtgtcattctatatcaacttgttactggaataccaccttttaatggggacaatcagatacagttgcttaaaaatatactcaggacgcatgaaatacgattaccatctgattgtgaattgagccatgactgcatcgacttgtgcagaaagttgctgcggctcaattcagtggagcggcttacagttgaagaatttgtgcaccacccatttctttctgaacatgctccagagaggaccttgagccggacattatctgaaataagagatggctttccaataaataatatcagtccaacaaggccttcaagccaaagttcacaagaagattgtatgccttttcctttggatgatgagtcaagtggacaggatgagggtccaattcctgacagtaagagtccgatgaaatcttatgggtttcccacagtctgttctccaggtatgtcttgggaaataatcatgcacctagtagccaacaccatggccatactgataaaatgaccaaggaaagcaagattcatgaagtgcaaggtccaaaaggtgtttatccagaagatcaggaatatgtatttgtgtctggaccacacccagagggatcatcgtcttcaacaaatgcttctcagcagcttaacttaccggcaaaatatgataatttatctgtttcaccaccgaagttaactttcttgagtgcaccaatgccgataaacggtttgccgattaatagacaacaatctgctgggactggtagcttcgacagccactattctcctgcatctgtcatttcacagggatctgcggatataagtgatgccatggatcagcccccatctgattatctgacgaggattagattgttagagcaatatgcatcagccatagcagggttggtcagggatgagatcaaaggtggcaggcacttggtggcgttctctattcagctaattgttcttgcaacctggaagcaagcaattcatttatgcaatacctttgtagcttcacttgcaagggagagtccctcacaggatatccatatgaaggggcttagtgctgatgcttcgcatttgcttgcgaactcaaagctagctgatgatgtctgcgtgcagatagagaaacagtttctctccgaagttgaatatgcggaagaactagccagcactgtgggacagatagctgatggtacagagatgccagatgcaatcgaaatgatatttcagtctgctttacttacaggaaggcgaggcggtgttgatgagatgtttgggaaagcagcggatgccatgactgggtatacgagggcggtatccatgctgcggtttctcctgatcgaggcaccatcacttgccctcaaccctcctttgactctgacaagatccgatcggcatcgacttcgcacatacattgaagctctcaacaccaggctctgtcagatgcagagccagaggcattgactgctgccatgtgtcctcaaatcttgttcaggttgagggacggtagacttgtgcaatattttttcatttgtaaatatatttgttggcccaagataggacatgtaagatgtcagaaatttggaactaggcagagcagcgaaaatctattataactcgaccagactactattatgatatggaattaggtggagtgtacgtgttaggttcattctgtgtgaattcaggcagaagcttgaaaacgaaatgaccaatcatggtcacttgtggaaatgtaaactacttcgtagattctttattagtactctatttcgttcttttttatttgttgtggtttagttaaaaaaatgaattagctttcgacaaatattcgagaaa

SEQ ID NO: 212604 - DNA, 1436 bp, Zea Mays
ggattaccacggttcactccgctttttcaactgagaaaagaagtattctacctgttggagacatcagtcagacaatatctgatgataaagcggatattgcagtgctagaagagccagaacatcttacttggtaccaccatgggcggaggttataagattgtctgcagcaactcaggatgttccaaggtctgtgatttgtaatgttcatggagttaaccccaaatttattgagattggcaaattgaaacatcagcagctatgccaaagagagcaagcattcttcaagggtgcatattatatcggaaagatggtatggagtaaaggttacacagagcttcttcagcttcttcataagcaccaaatggaattgtctggccttaaaatggagttgtatggcagtggggaagatgctgatgaagtaaaggcatcagctgagcgactgagcttagatattagagtctatccaggccgtgatcatggagattcaatatttcacgactacaaggtcttcataaacccaagtacaactgatgtggtatgcacaacaactgcagaagctttggcaatggggaagattgtgatctgtgcaaaccatccttcaaatgtttttttcaaaagatttcctaattgtcacatgtacaatactgatgaagagtttgtgagactaacaatgaaagctttggcagaagaacctatcccactgtcagatgatttgcggcatgaactttcctgggaggcagcaacagaaagatttattagggttgctgatattgcaccaactgtgcctgtgggacaaccaccaccctcctcacagcatttcatgcgcatctccccagatgaactgcagaagaacatggaagaggcatcggcatttttccataatacaatctctgggtttgaagctgtgcgttgtgtgttcggtgcaataccaaacacactgcagccggatgaacagcaatgcaaggaacttgggtggaatttgcagggatagcattagcttttcttgcgatgctgttgccatggaccatagaatgaaccagtctaactcaacggcaaaaagatgtgtcgctcggagaggttctcagattgatcaaacatacattctatgtggtgttctggtgtggcggcactgcattttttcttcatatatcaaaggcgttctgaagttcctggatgcatcgtatcttctgattgttaatcttaagcagtctgaagtgcacactagtattacagtctcatatatgtggactgtttttcatcgtgttgtttcccaggattgacgcgtgtgttgaaaatcttattgtataataatatgccccttgttttcgcagccatccatgctgaaacttttactacaccgcctaaaatctgtgtgctagttgatactacctgtgttctcgataaataaaaaagaacagaaaaagtaaaaaaaaaaa

SEQ ID NO: 212605 - DNA, 2490 bp, Zea Mays
ctccagtcctccctcccggctccctcccagtacccacggtcccaccccacccggagaaaacgaaacaaaccaaatctcgctgcgagctgggcggcgagggcgcgcggcgccatggcgaggagcaggacgtcgggcggcggcgagtacgagagcggcagcgaccacgacggcgcgctgcagaagccgctgctgcccaacagcgggagctggtaccggatggggatggggtcgcgccagtccagcctcaacgccgccggcacctcctccatggccgtcctgcgcgagtcccacgtctccgccttcctctgcacgctcatcgtcgcgctcggccccatccagttcggcttcaccggcggctactcctccccgacgcaggccagcatcatccgggacctcaacctctccatctccgagttctcggtgttcggctcgctgtccaacgtgggcgccatggtcggggcgatcgccagcggccagatggccgagtacgttggccgcaaagggtcgttgatgattgcagcaattccaaacgtcattggttggcttgcgatctcctttgcaaaagactcttcatttctgtatatgggacgcttgcttgaaggattcggtgtcggtatcatttcctatgtggtaccggtatacatagcagagatatctccacaaaacatgagaggggctcttggctctgtgaaccaggtttgcctatacttgcaagcatctcatctatttgtgaggttgaggtaaacacttggcttgtttatgcggatctcattgtacatttgaaaatttgttaattctgcagttatctgtaacccttggtatcatgtttgcctatttgctcggcttgtttgttccttggaggcttcttgcagtaataggaaccttgccctgcatagtgttgatacctggccttttcttcattccggaatctccaagatggctggcaaagatgaatatgatggatgattgcgagacttctctacaagttctgagaggattcgatgctgacatcactgcagaattgaatgatataaagagagcagtaatgtcagcaaacaaaagggctacaattcgtttccaagagttgaaccaaaagaaataccgaacgcccctaattataggaattggtctacttgtgctgcaacagctaagtggaataaatggtatactattttatgcaagtagcatcttcaaagctgccggtaagctgtgcacttgttcactggcttgtgattttcattactagttggacatcatatttttaggtgaggaagcactgtatctagaaaagccaaaacgtcttatagttcagaatcgagggaatatctaattgataattcggaacagtgtattggactacaaatatcaaaacagcgaactgggataaagtggacttattgttcctaatgcattataacaggttcagaaaagctaataactgtacacccttataagtggtaacatggtttatcattctcataccttgatgaaagacggcacttcgctgtttatattatttcaaaagcatttaagcatcacgtctttgtgtttgtctacaacagtgctggtgtagttggtttagattttaatttaacaataaaaggtcttcaggtctgaaggacagtgacttggacacctttgcacttggagctattcaggttcttgccacttttgttacaaccatgttcttggacagagctgggcggcgaatcctccttattatttcttctgctgggatgactctaagtcttcttgtagttgctattgtattttacatcaaggataatatttcacatgactctgacttgtatgacatcttaagtatggtgtccttggttggtgtcgtggcttatgtcattgccttctccttcggtatgggtgccattccttggatcataatgtctgagatcctcccagttagcatcaagagtcttgcaggaagcttcgcgacccttgccaactggttgacatcctttggaataacaatgacggcaaatttgctgatcagctggagtgctggaggtacgtttacctcctacatgattgtgagtgccttcactctcgtgttcgtaatcgtttgggtgccagagacaaagggaagaaccctcgaagagatacaatggtcgttccgctgagcaccaacatcgtcaaaatgcgaaatggttcttcgagttttgtcgctttagatactcaaatcactcgacgaaggccacacattctttctgttcataaaaggtcttgtacatgagattgcatacaccgttgttataactttacccccaatagacttgtaaatgcttgtgcagtaactcttatattacttttgcttcaacattgtaagatagaagacttgccaaaataaaatctgaaccttgggtccaatattccatgtaaacacgagcatgtttcttgatcaatcaaaatctcaagcatttttgttgaagtctgcctgcttttgacgtttttccagtttaaaaaggtcctcccgct

SEQ ID NO: 212606 - DNA, 1509 bp, Zea Mays
gccccccggcctttctgtgctcgttactgctcgctctcgctctccccttccgcctcttttagtgctgcgctgccgatgcggtgcccagcgagccaggcacggaggaggcgcgtgctctgctccactccacctccccccccccccccccccctgcgccactgacgccgctcgttcgcgcagttttggtcttctggccagcagggcagggggggaacccgcgggagcgaggcgcgcgagcgagcgagcggagggaggaggaggatgatgcacgccaagtcggagtcggacgtgacgagcctggcgtcgtcgcgccgcggtcgccgaagcggggcgttcgcggcggcaccggcggcggcggcggcggctactacgtgcagagcccgtcgcgggagtcgcacgacggcggcggcggcgggtacaagtcgtcgtcgatgcaggccacgccggtgtacaacaacagccccagcgagtcgccgtcgcacccctctacggccgccactcccgctcctcctccgtcagcgcttctccggcggctcgcgggggcggcggcggcgggcgcaaggtgctcaacgacaagggctggcccgagtgcagcgtcatcgaggaggaagggccctacgagggcctcggcgccggggacagcggcctctcccgccgctgccagatcgtgctcggcttcctcaccttcgtcctcctcttcaccgtcttctgcctcgtcatctggggcgccgcccgcccgtacgagcccgaggtcgtcgtcaagagcctggtgatggacgacttctacgctggtgaaggcacagaccacagcggcgttccgaccaaattggtcacgacgaactgttcgctgcacgtatcggtgtacaaccctgccacaatgtttgggatccatgtcacctccggccccatccgtctgatctattcagagatctcaatagcagtcggccaggtccgcaggtactaccagccgaggaagagccaccggacggtgacggcggtgatccacggcgagaaggtgccgctgtacggcgccgggggcggcctgacgctgtccacgagcgcgggcgggggggcggtgcccctgacgctggacttcgacctcacctcccggggctacgtgatcggcaggctcgtgcgggtgacgcacagggcgcacgtgacgtgccccgtcgtcgtggacgccaggaggaccaagcctgtcaggttctccaagaaggcgtgcgccgtgtacaaggcctgagcttgagagctcgtgaaacctgtgatcgaccgagcgttagcaatgcgtgttcttgcaaagatgtagctattgtgttgatggtgaagaacaataagcgcacacgtatggtcttgtcgatatatcgcgctgtaaaggcctgttgttcttgtgtgtgtatccctttttcagggcatgatcgtagagatggaagatgacttaccatgacaattttcctatacctttataacttcaaatttttttattcagggctgttattcttagcagacaaa

SEQ ID NO: 212607 - DNA, 1133 bp, Zea Mays
cctcatacctctactctgcttaccctgatctcaagcctggtcaactaacagatctgaaatcattagctgtcaataacaattcatttgcttatgtcgccgttaagaaatctatccataggtatctcataaaggattctaactatcttacgacagcggtaaataaattcgcgaattatgttaacctttccagttcagagaaagacttgttagaagaaccaacatgtccaaaggtgatatggtccgcaaaacagcaaggtcattcctttatgaattatgtgctgcaaactattggaaacctcctgaatttgagttatgcaacgatgaaggaccaagtcaccttcgaaagttcacatgtaaggtccttattgagatcacgggaacttcggtgagccttttggagtgctatagtgatcctaagctacaaaagagagccgcgcaggagcatgcggcagagggagctctgtggtacctcaagcaccttggatacctaccaagagatgaaaatcgtttctagcgacattttaggttttgtagccttcagtcacataaataaacctcggatgggaagagttctgttattgtaagcatgcagtctattcagaggtatatagcatcctggaatctcaatccaacagtcaacagtgcaaaaaaatcataaaagatgcaaaaatgatgacgtgcttctcatcaggctgacatcggaggacatctgcattgtacaacatccaaattgtatgggaagattttcgtcggtatgggtacatatttgggagaaaatcttctcattagctatggtgggtatgtgtatgggaatgcagaattcgaacctgattataactagcaaaattagttgtgtaacccaatagataataaacccaataactaacccacttgtcctaacccttttaagcatccatctacccaacttagacgatcaaccacccgttgtcccatccactagttcacgtgtcatttatttttgttgttttatatagttaaacaatttttttcttgttaaatatcagtatatttgtgttatgttgttgactgtgaaccatacatgtgtcaggatcagaaattcacttacataactggatatcatcatacagtgttcaaataatagcgtaaaaaat

SEQ ID NO: 212608 - DNA, 1718 bp, Zea Mays
cctcatacctctactctgcttaccctgatctcaagcctggtcaactaacagatctgaaatcattagctgtcaataacaattcatttgcttatgtcgccgttaagaaatctatccataggtatctcataaaggattctaactatcttacgacagcggtaaataaattcgcgaattatgttaacctttccagttcagagaaagacttgttagaagaaccaacatgtccaaagattctggcttcaacctgaaccatgtttggaagctaatgctaatgcttcttaaaccaatattgagcttttgtggcatgcacatcgatcctatgagagaactccgagaaacttgtcaatataatggttttgacttgggacttcccgaacctacgaagtacaatggagagttccatgtcaaagtagaagttaacataaacggcaagatgataagctgtactgcagcaaaccggaattcaaaagatgctagaaaagtagctgcacaagaaacactttcgaaactgaagaattatgggtacaagcataaaagaaagtcgctggaggaaattttgcgttctaccacgaaaaaagaatcggaactgataggctatgatgaagaaccaatcaatgttgaggatgacattgacatgcaaatgaataatctactgataaatggagaaagaacctccattcagagtacagcgggagataacaaggttgacaagaatgatgctaatagtggaaggaataataagtccaatgtggtcatgcagaatggttgcctacctagaggggcaactgataaaataaaccaaaaagaatatcatggtgatatggtccgcaaaacagcaaggtcattcctttatgaattatgtgctgcaaactattggaaacctcctgaatttgagttatgcaacgatgaaggaccaagtcaccttcgaaagttcacatgtaaggtccttattgagatcacgggaacttcggtgagccttttggagtgctatagtgatcctaagctacaaaagagagccgcgcaggagcatgcggcagagggagctctgtggtacctcaagcaccttggatacctaccaagagatgaaaatcgtttctagcgacattttaggttttgtagccttcagtcacataaataaacctcggatgggaagagttctgttattgtaagcatgcagtctattcagaggtatatagcatcctggaatctcaatccaacagtcaacagtgcaaaaaaatcataaaagatgcaaaaatgatgacgtgcttctcatcaggctgacatcggaggacatctgcattgtacaacatccaaattgtatgggaagattttcgtcggtatgggtacatatttgggagaaaatcttctcattagctatggtgggtatgtgtatgggaatgcagaattcgaacctgattataactagcaaaattagttgtgtaacccaatagataataaacccaataactaacccacttgtcctaacccttttaagcatccatctacccaacttagacgatcaaccacccgttgtcccatccactagttcacgtgtcatttatttttgttgttttatatagttaaacaatttttttcttgttaaatatcagtatatttgtgttatgttgttgactgtgaaccatacatgtgtcaggatcagaaattcacttacataactggatatcatcatacagtgttcaaataatagcgtaaaaaat

SEQ ID NO: 212609 - DNA, 2259 bp, Zea Mays
cacaaaactacctggctcttcgcatgcaatggactgactcgttcagtctctctcggccaagaagactcaacaaacctcccgctccctcttgcgacactcaatagtatcgtcagatcgagacatccccgtcgatcgaccggacgcacccggccgccatgatctcgtggcacgacctgtacacggtgctgtgcgcggtggtgccgctgtacgtggcgatgatcctggcgtacggctccgtgcagtggtggggcgtgctgacgccggaccagtgctccggcatcaaccgcttcgtcgccgtcttcgccgtgccgctcctctccttccactgcatctccgccagcaacccgtacgtgatgaacctccgcttcatcgccgccgacacgctgcagaaggtcctcgtcctcgccgcgctcgccgtctggtcgcacctcccgcccgcgcgcggctgcggcggcggcacgaagctgcgggagccgttcgactggtccatcacgctcttctccctgtccaccctgcccaacacgctcatcatggggataccgctcgtcgtggccatgtacgggcggtactcgggcgacctcctggtgcaggtggtggtgctccagtgcatcgtgtggtacacgctcctgctcgtcctctacgagttccgcgccgcgcgggtgctcatcgcggggcagtgcccggacggcgccgcggcgcgcatcgccgacgtgcgcgtggacccggacgtcgtgtccctgtgcggcagccaggcggaggcggaggccgaggtggcgccggacggccgggtgcgcctcgtcgtgcgtcggtccacgtcggcgtcgcggcggtcgctggcgacgccgcgcccgtccaacctggcgggcgtggagatctactcggtgagctcgtcgcgcaatgccacgcccagggggtccagcggcatcgcgcacgcggacgccatctgcgccgccgcgccgccgccgcacggcgcgtcgtcgctgcgcatgtcgagcttcggcgcggcggacctcttctccctgcacccgacgccgcggccgtccagcttcgaggagcaggcggtgcgggccaggtctgccgccgcggtggcgcccagcaacgaccccagggacgcgcacatgttcgagtggagctccggtgcgtccgcgacgtcggaggtgcgcggcttgccggtgttccacggcggcgacatccaccgcggcatggatccccgccggctcgtcccctccgaggcgcctccgagagcgatgcggccgggggagcgcgtcgttacggggtacccggcggacgccgggcaggacatcgttctggccaagctggaatccggctcgacggaggccgagcggaaggacgcctgcggaagagatggcggcgccggagagcagcaggcggcggcgccggccggcgtgatgatgcggctgatcgtgacgatggtatggcggcggctgatccgcaaccccaacacgtacgccagcgtcgtcggcctcacctggtctctcatctcgttccgattccacttcgcgatgccagccatagtgaagaactccatcacgatactctccgatgcagggctaggcatggccatgtttagcttagggctcttcatggccttgcagcccaagatcatcgcctgcgggaacaccgtcgcggccgtcaccatggcaatccgcttcttcctcggccccgccgtcatggccgccacgtccgccgccgtcggcctccgcggcacgctcctgcgcgtcgccgtcgttcaggctgctctgccgcaggggatcgtgcccttcgtgttcgccagagagtacagcctgcacgccaccattctttccaccggggtcatatttggcatgctaatcgctcttcccatcggcttggtctactacgttgttctgggactactgtgaacggtgtcactccaaccgcgccaaaagccagctgaagctgacatgatcatcggccggtgatggataacggtggtgcatgccctcacgacgctatgtctagttggagagagtcgctggagtacttgcagttttttgtatattattgtgataggtttgtctgctaagaataacagccctgaataaaaaaatttgaagttataaaggtataggaaaattgtcatggtaagtcatcttccatctctacgatcatgccctgaaaaagggatacacacacaagaacaacaggcctttacagcgcgatatatcgacaagaccatacgtgtttcacgagctctcaagctcaggccttgtacacggc

SEQ ID NO: 212610 - DNA, 779 bp, Zea Mays
tacggatagagctatagatggatcacgcattcaggccctgatgcgagcgctccccccgccatttccttcaacttctgctaaatagcctaatacccccatcggccgatcggctcctctacctgcatttgccgattggcgtcttcctcgtcaacgaccagatccatcccctctccacccggggacggggggtctagaacgtcgtcaggtcgtccttatccgcgtgctggccttcggatttcggctgccgcgttggtttaacacaaaccacgcgtccatgcctgccgcttccgcaggctccatgccactgccacctgggtgggttttctttccgggggcacatcacacatggcgtccgtccgcgtaggcacagaaggcttctcctggaggtgtgggagctgagttgggaggaggactgctgctgcagccatgaaggccctcattctcgtcggaggcttcggcacccgcctgcgcccgctcacgctcagcgtgcccaagccgctcgtggatttcggcaacaagcccatgatcctgcaccagatcgaggctctgaaggaagttggtgttacagaggttgtcctggccatcaattaccagcctgaggtcatgctcaactttctcaaggacttcgagagcaagcttggcatcaagatcacctgctcgcaggagacggagcccctcgggaccgcaggcccgctggccctggcccgcgacaagctcgccgacggatccggcgaccctttcttcgtgctcaacagcgacgtgatcagcgagtaccacag

SEQ ID NO: 212611 - DNA, 391 bp, Zea Mays
caaagaaggagttgattacaaagtacagaggctctgtcgaagagctccttaagggagatcaaagataaagaaagcatcataaggcttaatatttaaggatttattgtcgtcaatacttgaactctgttacttgaattcggtggtatgcatcaatagagccggaagatgttctggagtaaggacctggcagtgtgatacgggaatttgacatctgaatagatattctcccttgtccctctggtaaaaaaaactgttgtcacatttgccttcgctgtgacttggatgtatcatgtatatctttgaccattgatatcttggttaatcagacggtgcattacaatcctggcctcattcatataccacgattggtttgcataagtagtacccctcc

SEQ ID NO: 212612 - DNA, 1461 bp, Zea Mays
ctatcgtacaacaacagttctttagacggccatatcagctggacacagccaccgtactccgagattagcgcccccgtcggccaaacagtaccggactggccgccgttcacagttcacgccccgcgtggtccctatttcccggcgagcactaggctaccgccgccgccgtcaggtgccggtgcccagaccttcgtcgtgcccatttcaccggcgacgagcacccactagcccctgcccgcaggtgttgggaactggggatagagatggatcaccaccacccgcagcagcagcagcagcagtacggcgatccttaccgtgggctcatgacgtccccgcagcccgaccaccacctccacgctcttcagtaccatcagccgcagccgcagcaacagccggcgcttatgtctccaccgcagccacagccagcactgatgtctccacagccgcagcagacactgatgtctccaccgcagccgcagcagcatcaccacgcctctcttgcctcccacttccacctcctacatttggttacaagattagccgatgctattggtacaggaacaagggaccaaaatttcgatgcactggtaagaatcaccatttactaattttcatttgttttatggatcaatgttcttgtactcatagtgcatgatcttgtcagaaacaatagttgtagcttcttctaggcgtggagcctgaatattcttatacagagtttgaattgacatgtgatgtaattcttaaatcacttcccagagaagagacaggtcacaaacaatgctctagtgttggtggtgcacaggaagcttgggaccagcccagggtgacagggtctgcacggttcagttttccatagccaaaaccaagccagtggaagacatacccttagttatgcaattatgcaattgcagaagcatgttaaaattactactatgttgaagaattgaccagccagtttgctaggtgccaacaattgttgaactccatatcgggaacaataagctcaaagtctactacggttgagggacaaaggcagagtttggacgaaacacggcagctgcttgatcaaagaaaggagttgattacaaagtacagaggctctgtcgaagagctccttaagggagatcaaagataaagaaagcatcataaggcttaatatttaaggatttattgtcgtcaatacttgaactctgttacttgaattcggtggtatgcatcaatagagccggaagatgttctggagtaaggacctggcagtgtgatacgggaatttgacatctgaatagatattctcccttgtccctctggtaaaaaaaactgttgtcacatttgccttcgctgtgacttggatgtatcatgtatatctttgaccattgatatcttggttaatcagacggtgcattacaatcctggcctcattcatataccacgattggtttgcataagtagtacccctcc

SEQ ID NO: 212613 - DNA, 1098 bp, Zea Mays
ctatcgtacaacaacagttctttagacggccatatcagctggacacagccaccgtactccgagattagcgcccccgtcggccaaacagtaccggactggccgccgttcacagttcacgccccgcgtggtccctatttcccggcgagcactaggctaccgccgccgccgtcaggtgccggtgcccagaccttcgtcgtgcccatttcaccggcgacgagcacccactaggtgttgggaactggggatagagatggatcaccaccacccgcagcagcagcagcagcagtacggcgatccttaccgtgggctcatgacgtccccgcagcccgaccaccacctccacgctcttcagtaccatcagccgcagccgcagcaacagccggcgcttatgtctccaccgcagccacagccagcactgatgtctccacagccgcagcagacactgatgtctccaccgcagccgcagcagcatcaccacgcctctcttgcctcccacttccacctcctacatttggttacaagattagccgatgctattggtacaggaacaagggaccaaaatttcgatgcactggttgaagaattgaccagccagtttgctaggtgccaacaattgttgaactccatatcgggaacaataagctcaaagtctactacggttgagggacaaaggcagagtttggacgaaacacggcagctgcttgatcaaagaaaggagttgattacaaagtacagaggctctgtcgaagagctccttaagggagatcaaagataaagaaagcatcataaggcttaatatttaaggatttattgtcgtcaatacttgaactctgttacttgaattcggtggtatgcatcaatagagccggaagatgttctggagtaaggacctggcagtgtgatacgggaatttgacatctgaatagatattctcccttgtccctctggtaaaaaaaactgttgtcacatttgccttcgctgtgacttggatgtatcatgtatatctttgaccattgatatcttggttaatcagacggtgcattacaatcctggcctcattcatataccacgattggtttgcataagtagtacccctcc

SEQ ID NO: 212614 - DNA, 2390 bp, Zea Mays
aaaagcaaatgtcgacgaagatgcagagatgcgagtggccgagacctatttcagctagtcctacggaccatccagatccagcacacccaaacccagcagctgattcgcccggccgcatcgcccgagccttctaacagctgactcgtcctcgtcgctccggcgcggcgacaaggcacgcagccaccgcgcgatggccgacggcgccagcagcagcggcggggcgcagaacgggggtgagtcggtggtgattgactacggccggcgccgcactacctgcggctactgccgatcctccgggcccacgagcatctcccacggtatgtgggctaacagtctgaaagctgatgactatcaagctcttcttgatcgtggttggaggagatctggttgttttctttacaaacctgagatggaacggacatgctgcccctcatatacgatacgcttgaaggcaaatgatttcatttgttccaaagagcaagctcgggtacttaaaaagatacaaaggttccttgatggcgagctcgatccacagattggaagccctcagtgtaaggcaagtccaacaaagcgctcactgggtgaacctctgaattcaccaacctcgaaagtatcaaaggtatcagcggaagagtttcaaaaaggcacaagtccaaatatattgaaagaagatgacatcatttgttgcctggcaaacaaaatcaatgaggccacagctacatgcttccgaggtggggtatttggttctgttcaactccccaaagctgttgtgaagaccgttaaacctcaagtcaaaaggaaagttggagaagcagtgcaagaaaagaaagtaggagaagcagtgcaagctttggtttatacgtgtaatataagtttccaaatagtggcagcagttagacgggcattgcctaaagaaaatggtgctactcaaactgaagtaccagcagatctttctccaaattctgttgcagaaaagctatccgtggcaatggaacgtcttggagaactagctggttttgaagtaaaagcttgtaatgggcatctaaatttctatttggcctccaatcaggcaatgcagaaccataccagcgttgttgtacctgtgcaagcttcagacaaatctagtggttcaaagccaagctctgtgaaccaaactaatgcaaaatatcctctgaaaaggaaaaacctggagattaggttgagcacatctcattttgatcctgaggagtttgctctgtaccgaaggtatcagacaaaggtgcataaggagaaggcagttacagaaagctcatacaagagatttctagtagatacaccaatcctgtttgtccccccaaagactggtgataatacagttccaccgtgtgggtttgggtcttttcatcagcagtacaggattgatggaaaacttgtggctgttggtgtagttgatatccttcctaaatgtttgtcaagcaagtacttgttctgggatcctgaccttcctttcttatctcttggaaagtatactgctctgaaggagatagattgggtcaagacgacacaggagcactgtcccagccttcagtactactatctcggttattatatacattcttgcaataagatgagatacaaagctgcatatcgaccatcagaacttctatgtccactccgttatgagtgggttcgctatgatttagccaagcctctactggatgccagtcaatactccgttctatctgattatgctacaatgcaagcgatgaggatgaggacgacgacgatgaagatttcgacaactatgaatcagatatgatggtcgatgaagagacaattcattcagaaaaacccgatacagctgaaggcagttccgagataaatgacataaacaacatcaccctggacctgaaaggctcgagggttaaatttaagcaagtttttgggccaatcgagaggcgacacctcaatgcgctagaaaggcaactgagcagatacgtcaaggttgttgggaaggagctgtctgatcgaatggtgtattgtctttcttgatatgcagccggtcccgagatctcaattctactgtgaaaggtgcacatgagagttaaactagtttcattcagaaagaaaggtcatattgctgcgtgtttctgcatggttttcgttgtaaaggtacgagagctgaggctgacatagaacattctccggtcgattttgtatgtgtattttggcactaaagtcttcatggatggcttatactgaagagaagtggcgattcggtacgcctaattgtgcttatagggcaattgaaccggcacagtaataaagttgcagcgaatgggcttctgtcgaaacagcagtctttacgtgcacagcgaccgctcgtgactacacaaattctcgtcgtacgt

SEQ ID NO: 212615 - DNA, 755 bp, Zea Mays
ccggccatctgctgctggcctgctgctgatgtttgcccccttgctcacttgtcacttcacttcttcctcatgcctgcagggtcccaggagcatccacacctctagtctcttcttgttgctttctgctttagtctttgcttattgggcaacttgccattctttaaaaaggctccgttcggtggcctgtttgatgctacaacaacgcctacttcgccaaggtcgggggcatcagcctggtggagatgaactacctggaggtggacttcctgttcggcgtcggcttcgacctcaacgtggcgccggagacgttcggcgactactgcgccgtgctgcggtcggagctactgtgcgcggaggctgccccccgcgccactcaggctgcagcactgctgcctgtccgaggatgacgccggggcccggatgcagcgcccagcagcagctcgctgcatgaatgaaagaaacctaagcccatcgatcgacgactcatccggtggcttgggcgcaggagttgtaagccggtgcaaatttttccaaattattagatgttttgtcttttctagattataaagctttcgatatatacacacatctatatatacagtgtgtctagaggtgtagtggtggtgtaggtcgtcgtcggttgtaccagctgctacagtagattgtgtatacagtgctggtgtctttggtgactttctgaatcgtgtgcgtgttcgttccggtagcgaaggtaacttgaacaagcaatgaggtgc

SEQ ID NO: 212616 - DNA, 621 bp, Zea Mays
ttgtcacttcacttcttcctcatgcctgcagggtcccaggagcatccacacctctaatgctacaacaacgcctacttcgccaaggtcgggggcatcagcctggtggagatgaactacctggaggtggacttcctgttcggcgtcggcttcgacctcaacgtggcgccggagacgttcggcgactactgcgccgtgctgcggtcggagctactgtgcgcggaggctgccccccgcgccactcaggctgcagcactgctgcctgtccgaggatgacgccggggcccggatgcagcgcccagcagcagctcgctgcatgaatgaaagaaacctaagcccatcgatcgacgactcatccggtggcttgggcgcaggagttgtaagccggtgcaaatttttccaaattattagatgttttgtcttttctagattataaagctttcgatatatacacacatctatatatacagtgtgtctagaggtgtagtggtggtgtaggtcgtcgtcggttgtaccagctgctacagtagattgtgtatacagtgctggtgtctttggtgactttctgaatcgtgtgcgtgttcgttccggtagcgaaggtaacttgaacaagcaatgaggtgc

SEQ ID NO: 212617 - DNA, 1199 bp, Zea Mays
ggaaaaccatgcctgccagcttcttctgctacttctggtatcgccagcatgggtaggggaaggattgagatcaagaggatcgagaacaacacgagccggcaggtcaccttctgcaagcgccgcaatgggctcctcaagaaggcgtatgagctctccgtcctctgcgacgctgaggtggccctcatcgtcttctctagccgtggtcgcctctacgagtatgccaacaacagtgtcaaggctactattgagaggtacaagaaggcacacaccgttggctcttcctctgggccaccgctcctagagcacaatgcccagcaattctaccagcaagaatcagcaaaactgcgcaaccagatccagatgctgcaaaacactaacaggcacttggttggtgattccgtgggaaacctgtcactcaaggagctgaagcagctggagagccgccttgagaaaggcatctctaagatcagggccaggaagagtgagctgctggctgcggagatcagttacatggccaaaagggagactgagcttcagaatgaccacatgaccctcaggaccaagattgaggagggagagcaacagctgcagcaggtgaccgtggcacggtcagttgcagcagcagcagcagctgccaccaacttggagctgaacccattcttagagatggataccaaatgcttcttcactggcggccccttcgcaacgctggacatgaagtgctttctccccggcagcttgcagcagatgctggaggcacagcagcgccagatgctcgccaccgagctgaacctcggctaccaactggcgccgcctggttctgacgctgccgacaataaccctcatcatcagttctaaactggatgcatgcacgagaagcttttcaagcgaactgtgaacgatggaagctggctgttgcctctagatgttcttggcttccatgacctagcttattatggtgtgtattgttgttgccttttgtgtgtgattctccttgctactctactgatggagaactaaacctaatcgattggacataatgatcaaatgctacagatcctgtgatgctgtgatcaggttaaggcaaaacatgtatactgattgcttaaatgggtttacgagtgacgacaatgctatttgttgcttctattactgctcaactctctcttgcttccggttttggacacaatttgtttgac

SEQ ID NO: 212618 - DNA, 1191 bp, Zea Mays
gagtagtatcgcttttttccatctagctggtatcgccagcatgggtaggggaaggattgagatcaagaggatcgagaacaacacgagccggcaggtcaccttctgcaagcgccgcaatgggctcctcaagaaggcgtatgagctctccgtcctctgcgacgctgaggtggccctcatcgtcttctctagccgtggtcgcctctacgagtatgccaacaacagtgtcaaggctactattgagaggtacaagaaggcacacaccgttggctcttcctctgggccaccgctcctagagcacaatgcccagcaattctaccagcaagaatcagcaaaactgcgcaaccagatccagatgctgcaaaacactaacaggcacttggttggtgattccgtgggaaacctgtcactcaaggagctgaagcagctggagagccgccttgagaaaggcatctctaagatcagggccaggaagagtgagctgctggctgcggagatcagttacatggccaaaagggagactgagcttcagaatgaccacatgaccctcaggaccaagattgaggagggagagcaacagctgcagcaggtgaccgtggcacggtcagttgcagcagcagcagcagctgccaccaacttggagctgaacccattcttagagatggataccaaatgcttcttcactggcggccccttcgcaacgctggacatgaagtgctttctccccggcagcttgcagcagatgctggaggcacagcagcgccagatgctcgccaccgagctgaacctcggctaccaactggcgccgcctggttctgacgctgccgacaataaccctcatcatcagttctaaactggatgcatgcacgagaagcttttcaagcgaactgtgaacgatggaagctggctgttgcctctagatgttcttggcttccatgacctagcttattatggtgtgtattgttgttgccttttgtgtgtgattctccttgctactctactgatggagaactaaacctaatcgattggacataatgatcaaatgctacagatcctgtgatgctgtgatcaggttaaggcaaaacatgtatactgattgcttaaatgggtttacgagtgacgacaatgctatttgttgcttctattactgctcaactctctcttgcttccggttttggacacaatttgtttgac

SEQ ID NO: 212619 - DNA, 1432 bp, Zea Mays
atacaaactaaaaaaacgaacacccccgttcaccgaatcaccgcctcgtcacactccagcccttccccccgcgccggcgcggcgaggccaccgaccggctggcgggtgttgcttcttcttctcccggcccacccggcctgcccgcaccaccgacccctccgctgagcgcgctcccacgcccattgaatcatagcgcgccgctcagtcgagcgaggatttctctaggatagcagccgccatcacctcctcgcctcgccgcgctccgctggtgctgctgggtcgctgctgagcggagcgggaatcggaccggactcggttcgaattcgtcctcaccttttcgtcgttcggatgccagaagccgagtggaatgatgaacacactaggattgtctgcgaactctttgaagaacaagttcgggctgggaacaggccaaacacgcatctgaacaacattggttaccgccaagttgcggctaagtttcagcagaggacagagcttctctatacaaaattgcagcttaagaacaaatgggacaagtttaagaatgattacatcacctggaggaagttgcttgtagtagggaagggtttaccctgggacacagcaaaggggacatttgttgctgacgaagaatggtggaagaagatcaataaggagctgccgggtgcaaggaaatttcgacatggcggtctacatcatgaggataagttgaatgtaatgtttgactacatcaccagtaatggtgtggatccttcaccgcctgcgccggaaagcccgaagaatggggtgaatcattcgccaccggctgcaactggtttgccatctgctccagactgcgcgctcaatggagtggatcattcgcctgtgactgcacatggtttgccatctggtccatacagccccatgaatgggatggatcagttgccactacccgcacatgatttgcgaagtgttcaagaaatccccatgaatggtgtgaacctcgatggattggacaacaacactgaagataatgatgacatttatcaagagcctgtgtttcagtatacttcaaacaggaagaagagaccgattagtttcagtgctacaaagaagaacaagaaaaacaaggctgaaactgctctgctcatgcaagctcatttgtatcgcataactgagctggctcagaaagcacaggatactttcaaaaagttcagctcccaagctgacttggtgccatggcctagcatccaggatgttatgacacttgtctgggaatgcggagcacggtgtggaagcaatgagcatttcatcgcaactgaactgtttgtcagtagagaacagagggagatgttcctgaccatggaaacggctgaggaacggttccagtggcttcgaagaaagtacattgtcaagtatttgtcagcaattatatctttcggacgcaaggcgg

SEQ ID NO: 212620 - DNA, 3435 bp, Zea Mays
gttgtgttcaaaaaaattcagttaaactcagaacaaaaaaataattatcaggagatggagaaaagcaagttgaaaaaggttagagaatacagacttggaaaatgctatcataacaaaacgggagaggagtttgtggcgcactcgtccaatgttaactgcctcaagattgggaggaagacctcgcgggttcttgtcacaggaggagaggaccataaggtcaatctttgggctattgggaagcccaattcaatactgagcttatcaggtcacacaagtgctgtggagtcggttggttttgattccacggaagtgtttgtggctgcaggagcagccagtggaacaataaagctatgggatttggaggaggcaaagattgtccgcactcttactggacatagatcaaactgcatgtcagttgattttcatccgtttggggaattctttgcctctgggtcactggacactaatctgaagatatgggatataagaaggaagaattgcatccatacatacaaaggtcacacacgaggggtgaacactattagatttacacccgatgggcggtgggttgtgtctggtggcgaagataatatagtaaagctctgggatctgacagctggaaagttattacatgaattcaagtgtcatgagggtcagatccagtgcatagatttccacccccacgagttccttctggcaacaggttcagctgataaaactgtcaaattctgggatttggagacatttgaattgattggatctacaggacctgagacaacaggtgtccgatccatgacattcaatcctgatggaagatctttgttatgtgggctgcacgaaagcttaaaggttttctcttgggagccaataagatgccatgatactgtggacgtgggatggtctagacttgccgatttgaatgtccatgagggaaaacttcttggttgttctttcaatcaaagttgtgttggaatatgggttgttgatctgacgcgtcttgagccatatacaatgggtacttcaacaaaagtaaatggtcattctgaattgaagactgtttctagcggcactttgcctttacaaaatgatagtggttcaagggctaacatagggcgatcatcagtcttgcaaaatacagagaacaaccttaaaactacttcaggaagactgtcggcttcacagaactcagattctgcacccaaagaaactaactcggcaccttcaagcgggttgatcccaagcacaccacatagggctggagttggctcccataatagatctgttggaaattcagcttttcaatctggtggtaccaccttgaagagaagttcgttgaggaataacagtgcctctaatgttcacaatttcagtaaagctgatgtagtgcctgtcattgttcccagaactagctcaggaggggagttggctactgattctagaagcgatgctgctgatgtggcacccgttcttccgaaggtaaccagaagggttgaacctgctaccgattctagaaaagaaagtaatgatgtggaacttgttgttcctagagcaagctcaagaatggaaatagccgatttagcacccatttctagttccaagtcaggcagaaggttggagtctgcccctgattcgaaagaagaaagtgctgatacagcacctgttgttgtttccaatcccagggctaatgtaagaatggaaatagtctctgattctgcgcccgctctttcaaagtcaaacagaaagctagattctggcactaactcaaagaaagaaagtgctgatgcagtcattgtacccagaacaaattctagaatggaaatgatttctgattctaggagagaaccctctgctggaagaatatcaccattcagaatccagtcaagatatgctgagccacggaagctagcccatgccagaactgattcaaacaaagttgatagcagaagtaaaattactgaaacagaagacttcaattgccaaatatttcttccccgtagaaacagtgtttttcaaacaataagttctgaagaacctcgtgaagatgtaaagtgtggtccagttgacagggtgggattttcaaattcatcagaaccaaatgcgagtgtccgcaatgagaattatgttcctagaatgcgcaaaccaggagacaactgctatatcgaagtttcaagagcaggaagagcaaggtcaagtgtctctaattgggaagggagggatcagccccctagtcatgaagaaccaacaacaagcagttctacactggctcctaccggccatccatattcatctagaggaagcaatcaagcttctgaagctccaatcatagctagtgatgaagatgttctatctcttatcatggagcgacatgatctatttttaagctcaactaagtctcggctgatgaaattgcagattattcatcaaatgtgggaaagaaatgacatcaggggtgtgctctctgcgatggacaggatgggtgatcatgctgtctgtgctgatatggctagcgttctcatggagaaaagtgaaacaatcacactagatttatgtacctctatcctgcctgtcgtcaccgatcttctggagagcaaaattgacagacacttagtcgtcgcattggaattgttggtgaagcttgtaaggacttttggtccaatgatacattcaacagtatcgtcaggtccttgtgttggtgtagaccttgaggcagagcaaaggagggagcgctgcaacttatgcttcatcgaattggagaaggccaaaaataagcttccatctctaacaagaagaaaaggggcggttgcaaatgctgcacaagaacttgctcttgtcttccaggaaatcatgagttgactgacgacacactagatatacacaattagatgggacatgcttcggcctctgatggcaacaagattggatatcagctgccatggagggtgctagctattcagtcttagcgacgtcatcaagctccaaggccacagcaccaacaaatgcattttgttgctgctgttcgtgccttttgtacacatgctaacacataatccatgtcatttgtgaagagaagctgccatggacagtgacttcatccacaatattatgtggatggcggcagctggagatgttaggccccgatcgaatggtgatcagcagatgagacttgcttgggcttttctggcactcgtagttctttgctgtctgtaacatctttctcatgtaccgttatcatgtgcatgtgcaacagtcaagtggttgcatttggtagtttatggttgtgctgtgtgttggtcgatttagtggtcgttgatgagtgaagcgagccatgtacatcatttttttttaagatttgatatcttctttttccttgatgactcctctcgttatacttgagtgaaaatgatatcttgtgtacttgccttgacagcttttcgg

SEQ ID NO: 212621 - DNA, 3311 bp, Zea Mays
atggagaaaagcaagttgaaaaaggttagagaatacagacttggaaaatgctatcataacaaaacgggagaggagtttgtggcgcactcgtccaatgttaactgcctcaagattgggaggaagacctcgcgggttcttgtcacaggaggagaggaccataaggtcaatctttgggctattgggaagcccaattcaatactggagcagccagtggaacaataaagctatgggatttggaggaggcaaagattgtccgcactcttactggacatagatcaaactgcatgtcagttgattttcatccgtttggggaattctttgcctctgggtcactggacactaatctgaagatatgggatataagaaggaagaattgcatccatacatacaaaggtcacacacgaggggtgaacactattagatttacacccgatgggcggtgggttgtgtctggtggcgaagataatatagtaaagctctgggatctgacagctggaaagttattacatgaattcaagtgtcatgagggtcagatccagtgcatagatttccacccccacgagttccttctggcaacaggttcagctgataaaactgtcaaattctgggatttggagacatttgaattgattggatctacaggacctgagacaacaggtgtccgatccatgacattcaatcctgatggaagatctttgttatgtgggctgcacgaaagcttaaaggttttctcttgggagccaataagatgccatgatactgtggacgtgggatggtctagacttgccgatttgaatgtccatgagggaaaacttcttggttgttctttcaatcaaagttgtgttggaatatgggttgttgatctgacgcgtcttgagccatatacaatgggtacttcaacaaaagtaaatggtcattctgaattgaagactgtttctagcggcactttgcctttacaaaatgatagtggttcaagggctaacatagggcgatcatcagtcttgcaaaatacagagaacaaccttaaaactacttcaggaagactgtcggcttcacagaactcagattctgcacccaaagaaactaactcggcaccttcaagcgggttgatcccaagcacaccacatagggctggagttggctcccataatagatctgttggaaattcagcttttcaatctggtggtaccaccttgaagagaagttcgttgaggaataacagtgcctctaatgttcacaatttcagtaaagctgatgtagtgcctgtcattgttcccagaactagctcaggaggggagttggctactgattctagaagcgatgctgctgatgtggcacccgttcttccgaaggtaaccagaagggttgaacctgctaccgattctagaaaagaaagtaatgatgtggaacttgttgttcctagagcaagctcaagaatggaaatagccgatttagcacccatttctagttccaagtcaggcagaaggttggagtctgcccctgattcgaaagaagaaagtgctgatacagcacctgttgttgtttccaatcccagggctaatgtaagaatggaaatagtctctgattctgcgcccgctctttcaaagtcaaacagaaagctagattctggcactaactcaaagaaagaaagtgctgatgcagtcattgtacccagaacaaattctagaatggaaatgatttctgattctaggagagaaccctctgctggaagaatatcaccattcagaatccagtcaagatatgctgagccacggaagctagcccatgccagaactgattcaaacaaagttgatagcagaagtaaaattactgaaacagaagacttcaattgccaaatatttcttccccgtagaaacagtgtttttcaaacaataagttctgaagaacctcgtgaagatgtaaagtgtggtccagttgacagggtgggattttcaaattcatcagaaccaaatgcgagtgtccgcaatgagaattatgttcctagaatgcgcaaaccaggagacaactgctatatcgaagtttcaagagcaggaagagcaaggtcaagtgtctctaattgggaagggagggatcagccccctagtcatgaagaaccaacaacaagcagttctacactggctcctaccggccatccatattcatctagaggaagcaatcaagcttctgaagctccaatcatagctagtgatgaagatgttctatctcttatcatggagcgacatgatctatttttaagctcaactaagtctcggctgatgaaattgcagattattcatcaaatgtgggaaagaaatgacatcaggggtgtgctctctgcgatggacaggatgggtgatcatgctgtctgtgctgatatggctagcgttctcatggagaaaagtgaaacaatcacactagatttatgtacctctatcctgcctgtcgtcaccgatcttctggagagcaaaattgacagacacttagtcgtcgcattggaattgttggtgaagcttgtaaggacttttggtccaatgatacattcaacagtatcgtcaggtccttgtgttggtgtagaccttgaggcagagcaaaggagggagcgctgcaacttatgcttcatcgaattggagaaggccaaaaataagcttccatctctaacaagaagaaaaggggcggttgcaaatgctgcacaagaacttgctcttgtcttccaggaaatcatgagttgactgacgacacactagatatacacaattagatgggacatgcttcggcctctgatggcaacaagattggatatcagctgccatggagggtgctagctattcagtcttagcgacgtcatcaagctccaaggccacagcaccaacaaatgcattttgttgctgctgttcgtgccttttgtacacatgctaacacataatccatgtcatttgtgaagagaagctgccatggacagtgacttcatccacaatattatgtggatggcggcagctggagatgttaggccccgatcgaatggtgatcagcagatgagacttgcttgggcttttctggcactcgtagttctttgctgtctgtaacatctttctcatgtaccgttatcatgtgcatgtgcaacagtcaagtggttgcatttggtagtttatggttgtgctgtgtgttggtcgatttagtggtcgttgatgagtgaagcgagccatgtacatcatttttttttaagatttgatatcttctttttccttgatgactcctctcgttatacttgagtgaaaatgatatcttgtgtacttgccttgacagcttttcgg

SEQ ID NO: 212622 - DNA, 3329 bp, Zea Mays
atggagaaaagcaagttgaaaaaggttagagaatacagacttggaaaatgctatcataacaaaacgggagaggagtttgtggcgcactcgtccaatgttaactgcctcaagattgggaggaagacctcgcgggttcttgtcacaggaggagaggaccataaggtcaatctttgggctattgggaagcccaattcaatactgagcttatcaggtcacacaagtgctgtggagtcggttggttttgattccacggaagtgtttgtggctgcaggagcagccagtggaacaataaagctatgggatttggaggaggcaaagattgtccgcactcttactggacatagatcaaactgcatgtcagttgattttcatccgtttggggaattctttgcctctgggtcactggacactaatctgaagatatgggatataagaaggaagaattgcatccatacatacaaaggtcacacacgaggggtgaacactattagatttacacccgatgggcggtgggttgtgtctggtggcgaagataatatagtaaagctctgggatctgacagctggaaagttattacatgaattcaagtgtcatgagggtcagatccagtgcatagatttccacccccacgagttccttctggcaacaggttcagctgataaaactgtcaaattctgggatttggagacatttgaattgattggatctacaggacctgagacaacaggtgtccgatccatgacattcaatcctgatggaagatctttgttatgtgggctgcacgaaagcttaaaggttttctcttgggagccaataagatgccatgatactgtggacgtgggatggtctagacttgccgatttgaatgtccatgagggaaaacttcttggttgttctttcaatcaaagttgtgttggaatatgggttgttgatctgacgcgtcttgagccatatacaatgggtacttcaacaaaagtaaatggtcattctgaattgaagactgtttctagcggcactttgcctttacaaaatgatagtggttcaagggctaacatagggcgatcatcagtcttgcaaaatacagagaacaaccttaaaactacttcaggaagactgtcggcttcacagaactcagattctgcacccaaagaaactaactcggcaccttcaagcgggttgatcccaagcacaccacatagggctggagttggctcccataatagatctgttggaaattcagcttttcaatctggtggtaccaccttgaagagaagttcgttgaggaataacagtgcctctaatgttcacaatttcagtaaagctgatgtagtgcctgtcattgttcccagaactagctcaggaggggagttggctactgattctagaagcgatgctgctgatgtggcacccgttcttccgaaggtaaccagaagggttgaacctgctaccgattctagaaaagaaagtaatgatgtggaacttgttgttcctagagcaagctcaagaatggaaatagccgatttagcacccatttctagttccaagtcaggcagaaggttggagtctgcccctgattcgaaagaagaaagtgctgatacagcacctgttgttgtttccaatcccagggctaatgtaagaatggaaatagtctctgattctgcgcccgctctttcaaagtcaaacagaaagctagattctggcactaactcaaagaaagaaagtgctgatgcagtcattgtacccagaacaaattctagaatggaaatgatttctgattctaggagagaaccctctgctggaagaatatcaccattcagaatccagtcaagatatgctgagccacggaagctagcccatgccagaactgattcaaacaaagttgatagcagaagtaaaattactgaaacagaagacttcaattgccaaatatttcttccccgtagaaacagtgtttttcaaacaataagttctgaagaacctcgtgaagatgtaaagtgtggtccagttgacaggatgttcctagaatgcgcaaaccaggagacaactgctatatcgaagtttcaagagcaggaagagcaaggtcaagtgtctctaattgggaagggagggatcagccccctagtcatgaagaaccaacaacaagcagttctacactggctcctaccggccatccatattcatctagaggaagcaatcaagcttctgaagctccaatcatagctagtgatgaagatgttctatctcttatcatggagcgacatgatctatttttaagctcaactaagtctcggctgatgaaattgcagattattcatcaaatgtgggaaagaaatgacatcaggggtgtgctctctgcgatggacaggatgggtgatcatgctgtctgtgctgatatggctagcgttctcatggagaaaagtgaaacaatcacactagatttatgtacctctatcctgcctgtcgtcaccgatcttctggagagcaaaattgacagacacttagtcgtcgcattggaattgttggtgaagcttgtaaggacttttggtccaatgatacattcaacagtatcgtcaggtccttgtgttggtgtagaccttgaggcagagcaaaggagggagcgctgcaacttatgcttcatcgaattggagaaggccaaaaataagcttccatctctaacaagaagaaaaggggcggttgcaaatgctgcacaagaacttgctcttgtcttccaggaaatcatgagttgactgacgacacactagatatacacaattagatgggacatgcttcggcctctgatggcaacaagattggatatcagctgccatggagggtgctagctattcagtcttagcgacgtcatcaagctccaaggccacagcaccaacaaatgcattttgttgctgctgttcgtgccttttgtacacatgctaacacataatccatgtcatttgtgaagagaagctgccatggacagtgacttcatccacaatattatgtggatggcggcagctggagatgttaggccccgatcgaatggtgatcagcagatgagacttgcttgggcttttctggcactcgtagttctttgctgtctgtaacatctttctcatgtaccgttatcatgtgcatgtgcaacagtcaagtggttgcatttggtagtttatggttgtgctgtgtgttggtcgatttagtggtcgttgatgagtgaagcgagccatgtacatcatttttttttaagatttgatatcttctttttccttgatgactcctctcgttatacttgagtgaaaatgatatcttgtgtacttgccttgacagcttttcgg

SEQ ID NO: 212623 - DNA, 3268 bp, Zea Mays
atggagaaaagcaagttgaaaaaggttagagaatacagacttggaaaatgctatcataacaaaacgggagaggagtttgtggcgcactcgtccaatgttaactgcctcaagattgggaggaagacctcgcgggttcttgtcacaggaggagaggaccataaggtcaatctttgggctattgggaagcccaattcaatactgagcttatcaggtcacacaagtgctgtggagtcggttggttttgattccacggaagtgtttgtggctgcaggagcagccagtggaacaataaagctatgggatttggaggaggcaaagattgtccgcactcttactggacatagatcaaactgcatgtcagttgattttcatccgtttggggaattctttgcctctgggtcactggacactaatctgaagatatgggatataagaaggaagaattgcatccatacatacaaaggtcacacacgaggggtgaacactattagatttacacccgatgggcggtgggttgtgtctggtggcgaagataatatagtaaagctctgggatctgacagctggaaagttattacatgaattcaagtgtcatgagggtcagatccagtgcatagatttccacccccacgagttccttctggcaacaggttcagctgataaaactgtcaaattctgggatttggagacatttgaattgattggatctacaggacctgagacaacaggtgtccgatccatgacattcaatcctgatggaagatctttgttatgtgggctgcacgaaagcttaaaggttttctcttgggagccaataagatgccatgatactgtggacgtgggatggtctagacttgccgatttgaatgtccatgagggaaaacttcttggttgttctttcaatcaaagttgtgttggaatatgggttgttgatctgacgcgtcttgagccatatacaatgggtacttcaacaaaagtaaatggtcattctgaattgaagactgtttctagcggcactttgcctttacaaaatgatagtggttcaagggctaacatagggcgatcatcagtcttgcaaaatacagagaacaaccttaaaactacttcaggaagactgtcggcttcacagaactcagattctgcacccaaagaaactaactcggcaccttcaagcgggttgatcccaagcacaccacatagggctggagttggctcccataatagatctgttggaaattcagcttttcaatctggtggtaccaccttgaagagaagttcgttgaggaataacagtgcctctaatgttcacaatttcagtaaagctgatgtagtgcctgtcattgttcccagaactagctcaggaggggagttggctactgattctagaagcgatgctgctgatgtggcacccgttcttccgaaggtaaccagaagggttgaacctgctaccgattctagaaaagaaagtaatgatgtggaacttgttgttcctagagcaagctcaagaatggaaatagccgatttagcacccatttctagttccaagtcaggcagaaggttggagtctgcccctgattcgaaagaagaaagtgctgatacagcacctgttgttgtttccaatcccagggctaatgtaagaatggaaatagtctctgattctgcgcccgctctttcaaagtcaaacagaaagctagattctggcactaactcaaagaaagaaagtgctgatgcagtcattgtacccagaacaaattctagaatggaaatgatttctgattctaggagagaaccctctgctggaagaatatcaccattcagaatccagtcaagatatgctgagccacggaagctagcccatgccagaactgattcaaacaaagttgatagcagaagtaaaattactgaaacagaagacttcaattgccaaatatttcttccccgtagaaacagtgtttttcaaacaataagttctgaagaacctcgtgaagatgtaaagtgtggtccagttgacagggtgggattttcaaattcatcagaaccaaatgcgagtgtccgcaatgagaattatgttcctagaatgcgcaaaccaggagacaactgctatatcgaagtttcaagagcagagaggaagcaatcaagcttctgaagctccaatcatagctagtgatgaagatgttctatctcttatcatggagcgacatgatctatttttaagctcaactaagtctcggctgatgaaattgcagattattcatcaaatgtgggaaagaaatgacatcaggggtgtgctctctgcgatggacaggatgggtgatcatgctgtctgtgctgatatggctagcgttctcatggagaaaagtgaaacaatcacactagatttatgtacctctatcctgcctgtcgtcaccgatcttctggagagcaaaattgacagacacttagtcgtcgcattggaattgttggtgaagcttgtaaggacttttggtccaatgatacattcaacagtatcgtcaggtccttgtgttggtgtagaccttgaggcagagcaaaggagggagcgctgcaacttatgcttcatcgaattggagaaggccaaaaataagcttccatctctaacaagaagaaaaggggcggttgcaaatgctgcacaagaacttgctcttgtcttccaggaaatcatgagttgactgacgacacactagatatacacaattagatgggacatgcttcggcctctgatggcaacaagattggatatcagctgccatggagggtgctagctattcagtcttagcgacgtcatcaagctccaaggccacagcaccaacaaatgcattttgttgctgctgttcgtgccttttgtacacatgctaacacataatccatgtcatttgtgaagagaagctgccatggacagtgacttcatccacaatattatgtggatggcggcagctggagatgttaggccccgatcgaatggtgatcagcagatgagacttgcttgggcttttctggcactcgtagttctttgctgtctgtaacatctttctcatgtaccgttatcatgtgcatgtgcaacagtcaagtggttgcatttggtagtttatggttgtgctgtgtgttggtcgatttagtggtcgttgatgagtgaagcgagccatgtacatcatttttttttaagatttgatatcttctttttccttgatgactcctctcgttatacttgagtgaaaatgatatcttgtgtacttgccttgacagcttttcgg

SEQ ID NO: 212624 - DNA, 3714 bp, Zea Mays
gtttgttccccggaagagggagggaggctctggcgggagtgtgttacgggcttacggccgcctcgtgctggtgacaggcgcggcgcgagatccgggctggaagggctggcgggtcccgttggtggcgccgtggcgtcggcgtgatctgagatgagattggacccggctgcgcggtattcgctgcggaggtagacggccatgacgaccaacaccaagcgcgcctacaagctccaggagtttgtggcgcactcgtccaatgttaactgcctcaagattgggaggaagacctcgcgggttcttgtcacaggaggagaggaccataaggtcaatctttgggctattgggaagcccaattcaatactgagcttatcaggtcacacaagtgctgtggagtcggttggttttgattccacggaagtgtttgtggctgcaggagcagccagtggaacaataaagctatgggatttggaggaggcaaagattgtccgcactcttactggacatagatcaaactgcatgtcagttgattttcatccgtttggggaattctttgcctctgggtcactggacactaatctgaagatatgggatataagaaggaagaattgcatccatacatacaaaggtcacacacgaggggtgaacactattagatttacacccgatgggcggtgggttgtgtctggtggcgaagataatatagtaaagctctgggatctgacagctggaaagttattacatgaattcaagtgtcatgagggtcagatccagtgcatagatttccacccccacgagttccttctggcaacaggttcagctgataaaactgtcaaattctgggatttggagacatttgaattgattggatctacaggacctgaggtacatcggtatttggagctgatagttcacaattgtttatttcctttgcatttgtaatcctcagaatttaagcattatttccttaataagtagcttgggtggggatcccatctctaatgttacatcgaaaaagaaatggaaaatgaacataaacttagatgtccctgtttgatgcttctttatacaacaaacagtcatatgctaatgttttgcagcataattcagttcaatttgggcacctatttaattcatttggatacctcttttgtttccatcatttaattcatttgaatcacttcttggaatcacttcttgtgtttccataaaaaatactagacaacaggtgtccgatccatgacattcaatcctgatggaagatctttgttatgtgggctgcacgaaagcttaaaggttttctcttgggagccaataagatgccatgatactgtggacgtgggatggtctagacttgccgatttgaatgtccatgagggaaaacttcttggttgttctttcaatcaaagttgtgttggaatatgggttgttgatctgacgcgtcttgagccatatacaatgggtacttcaacaaaagtaaatggtcattctgaattgaagactgtttctagcggcactttgcctttacaaaatgatagtggttcaagggctaacatagggcgatcatcagtcttgcaaaatacagagaacaaccttaaaactacttcaggaagactgtcggcttcacagaactcagattctgcacccaaagaaactaactcggcaccttcaagcgggttgatcccaagcacaccacatagggctggagttggctcccataatagatctgttggaaattcagcttttcaatctggtggtaccaccttgaagagaagttcgttgaggaataacagtgcctctaatgttcacaatttcagtaaagctgatgtagtgcctgtcattgttcccagaactagctcaggaggggagttggctactgattctagaagcgatgctgctgatgtggcacccgttcttccgaaggtaaccagaagggttgaacctgctaccgattctagaaaagaaagtaatgatgtggaacttgttgttcctagagcaagctcaagaatggaaatagccgatttagcacccatttctagttccaagtcaggcagaaggttggagtctgcccctgattcgaaagaagaaagtgctgatacagcacctgttgttgtttccaatcccagggctaatgtaagaatggaaatagtctctgattctgcgcccgctctttcaaagtcaaacagaaagctagattctggcactaactcaaagaaagaaagtgctgatgcagtcattgtacccagaacaaattctagaatggaaatgatttctgattctaggagagaaccctctgctggaagaatatcaccattcagaatccagtcaagatatgctgagccacggaagctagcccatgccagaactgattcaaacaaagttgatagcagaagtaaaattactgaaacagaagacttcaattgccaaatatttcttccccgtagaaacagtgtttttcaaacaataagttctgaagaacctcgtgaagatgtaaagtgtggtccagttgacaggatgttcctagaatgcgcaaaccaggagacaactgctatatcgaagtttcaagagcagagaggaagcaatcaagcttctgaagctccaatcatagctagtgatgaagatgttctatctcttatcatggagcgacatgatctatttttaagctcaactaagtctcggctgatgaaattgcagattattcatcaaatgtgggaaagaaatgacatcaggggtgtgctctctgcgatggacaggatgggtgatcatgctgtctgtgctgatatggctagcgttctcatggagaaaagtgaaacaatcacactagatttatgtacctctatcctgcctgtcgtcaccgatcttctggagagcaaaattgacagacacttagtcgtcgcattggaattgttggtgaagcttgtaaggacttttggtccaatgatacattcaacagtatcgtcaggtccttgtgttggtgtagaccttgaggcagagcaaaggagggagcgctgcaacttatgcttcatcgaattggagaaggccaaaaataagcttccatctctaacaagaagaaaaggggcggttgcaaatgctgcacaagaacttgctcttgtcttccaggaaatcatgagttgactgacgacacactagatatacacaattagatgggacatgcttcggcctctgatggcaacaagattggatatcagctgccatggagggtgctagctattcagtcttagcgacgtcatcaagctccaaggccacagcaccaacaaatgcattttgttgctgctgttcgtgccttttgtacacatgctaacacataatccatgtcatttgtgaagagaagctgccatggacagtgacttcatccacaatattatgtggatggcggcagctggagatgttaggccccgatcgaatggtgatcagcagatgagacttgcttgggcttttctggcactcgtagttctttgctgtctgtaacatctttctcatgtaccgttatcatgtgcatgtgcaacagtcaagtggttgcatttggtagtttatggttgtgctgtgtgttggtcgatttagtggtcgttgatgagtgaagcgagccatgtacatcatttttttttaagatttgatatcttctttttccttgatgactcctctcgttatacttgagtgaaaatgatatcttgtgtacttgccttgacagcttttcgg

SEQ ID NO: 212625 - DNA, 3543 bp, Zea Mays
gtttgttccccggaagagggagggaggctctggcgggagtgtgttacgggcttacggccgcctcgtgctggtgacaggcgcggcgcgagatccgggctggaagggctggcgggtcccgttggtggcgccgtggcgtcggcgtgatctgagatgagattggacccggctgcgcggtattcgctgcggaggtagacggccatgacgaccaacaccaagcgcgcctacaagctccaggagtttgtggcgcactcgtccaatgttaactgcctcaagattgggaggaagacctcgcgggttcttgtcacaggaggagaggaccataaggtcaatctttgggctattgggaagcccaattcaatactgagcttatcaggtcacacaagtgctgtggagtcggttggttttgattccacggaagtgtttgtggctgcaggagcagccagtggaacaataaagctatgggatttggaggaggcaaagattgtccgcactcttactggacatagatcaaactgcatgtcagttgattttcatccgtttggggaattctttgcctctgggtcactggacactaatctgaagatatgggatataagaaggaagaattgcatccatacatacaaaggtcacacacgaggggtgaacactattagatttacacccgatgggcggtgggttgtgtctggtggcgaagataatatagtaaagctctgggatctgacagctggaaagttattacatgaattcaagtgtcatgagggtcagatccagtgcatagatttccacccccacgagttccttctggcaacaggttcagctgataaaactgtcaaattctgggatttggagacatttgaattgattggatctacaggacctgagacaacaggtgtccgatccatgacattcaatcctgatggaagatctttgttatgtgggctgcacgaaagcttaaaggttttctcttgggagccaataagatgccatgatactgtggacgtgggatggtctagacttgccgatttgaatgtccatgagggaaaacttcttggttgttctttcaatcaaagttgtgttggaatatgggttgttgatctgacgcgtcttgagccatatacaatgggtacttcaacaaaagtaaatggtcattctgaattgaagactgtttctagcggcactttgcctttacaaaatgatagtggttcaagggctaacatagggcgatcatcagtcttgcaaaatacagagaacaaccttaaaactacttcaggaagactgtcggcttcacagaactcagattctgcacccaaagaaactaactcggcaccttcaagcgggttgatcccaagcacaccacatagggctggagttggctcccataatagatctgttggaaattcagcttttcaatctggtggtaccaccttgaagagaagttcgttgaggaataacagtgcctctaatgttcacaatttcagtaaagctgatgtagtgcctgtcattgttcccagaactagctcaggaggggagttggctactgattctagaagcgatgctgctgatgtggcacccgttcttccgaaggtaaccagaagggttgaacctgctaccgattctagaaaagaaagtaatgatgtggaacttgttgttcctagagcaagctcaagaatggaaatagccgatttagcacccatttctagttccaagtcaggcagaaggttggagtctgcccctgattcgaaagaagaaagtgctgatacagcacctgttgttgtttccaatcccagggctaatgtaagaatggaaatagtctctgattctgcgcccgctctttcaaagtcaaacagaaagctagattctggcactaactcaaagaaagaaagtgctgatgcagtcattgtacccagaacaaattctagaatggaaatgatttctgattctaggagagaaccctctgctggaagaatatcaccattcagaatccagtcaagatatgctgagccacggaagctagcccatgccagaactgattcaaacaaagttgatagcagaagtaaaattactgaaacagaagacttcaattgccaaatatttcttccccgtagaaacagtgtttttcaaacaataagttctgaagaacctcgtgaagatgtaaagtgtggtccagttgacagggtgggattttcaaattcatcagaaccaaatgcgagtgtccgcaatgagaattatgttcctagaatgcgcaaaccaggagacaactgctatatcgaagtttcaagagcaggaagagcaaggtcaagtgtctctaattgggaagggagggatcagccccctagtcatgaagaaccaacaacaagcagttctacactggctcctaccggccatccatattcatctagaggaagcaatcaagcttctgaagctccaatcatagctagtgatgaagatgttctatctcttatcatggagcgacatgatctatttttaagctcaactaagtctcggctgatgaaattgcagattattcatcaaatgtgggaaagaaatgacatcaggggtgtgctctctgcgatggacaggatgggtgatcatgctgtctgtgctgatatggctagcgttctcatggagaaaagtgaaacaatcacactagatttatgtacctctatcctgcctgtcgtcaccgatcttctggagagcaaaattgacagacacttagtcgtcgcattggaattgttggtgaagcttgtaaggacttttggtccaatgatacattcaacagtatcgtcaggtccttgtgttggtgtagaccttgaggcagagcaaaggagggagcgctgcaacttatgcttcatcgaattggagaaggccaaaaataagcttccatctctaacaagaagaaaaggggcggttgcaaatgctgcacaagaacttgctcttgtcttccaggaaatcatgagttgactgacgacacactagatatacacaattagatgggacatgcttcggcctctgatggcaacaagattggatatcagctgccatggagggtgctagctattcagtcttagcgacgtcatcaagctccaaggccacagcaccaacaaatgcattttgttgctgctgttcgtgccttttgtacacatgctaacacataatccatgtcatttgtgaagagaagctgccatggacagtgacttcatccacaatattatgtggatggcggcagctggagatgttaggccccgatcgaatggtgatcagcagatgagacttgcttgggcttttctggcactcgtagttctttgctgtctgtaacatctttctcatgtaccgttatcatgtgcatgtgcaacagtcaagtggttgcatttggtagtttatggttgtgctgtgtgttggtcgatttagtggtcgttgatgagtgaagcgagccatgtacatcatttttttttaagatttgatatcttctttttccttgatgactcctctcgttatacttgagtgaaaatgatatcttgtgtacttgccttgacagcttttcgg

SEQ ID NO: 212626 - DNA, 3536 bp, Zea Mays
gtttgttccccggaagagggagggaggctctggcgggagtgtgttacgggcttacggccgcctcgtgctggtgacaggcgcggcgcgagatccgggctggaagggctggcgggtcccgttggtggcgccgtggcgtcggcgtgatctgagatgagattggacccggctgcgcggtattcgctgcggaggtagacggccatgacgaccaacaccaagcgcgcctacaagctccaggagtttgtggcgcactcgtccaatgttaactgcctcaagattgggaggaagacctcgcgggttcttgtcacaggaggagaggaccataaggtcaatctttgggctattgggaagcccaattcaatactgagcttatcaggtcacacaagtgctgtggagtcggttggttttgattccacggaagtgtttgtggctgcaggagcagccagtggaacaataaagctatgggatttggaggaggcaaagattgtccgcactcttactggacatagatcaaactgcatgtcagttgattttcatccgtttggggaattctttgcctctgggtcactggacactaatctgaagatatgggatataagaaggaagaattgcatccatacatacaaaggtcacacacgaggggtgaacactattagatttacacccgatgggcggtgggttgtgtctggtggcgaagataatatagtaaagctctgggatctgacagctggaaagttattacatgaattcaagtgtcatgagggtcagatccagtgcatagatttccacccccacgagttccttctggcaacaggttcagctgataaaactgtcaaattctgggatttggagacatttgaattgattggatctacaggacctgaggtgtccgatccatgacattcaatcctgatggaagatctttgttatgtgggctgcacgaaagcttaaaggttttctcttgggagccaataagatgccatgatactgtggacgtgggatggtctagacttgccgatttgaatgtccatgagggaaaacttcttggttgttctttcaatcaaagttgtgttggaatatgggttgttgatctgacgcgtcttgagccatatacaatgggtacttcaacaaaagtaaatggtcattctgaattgaagactgtttctagcggcactttgcctttacaaaatgatagtggttcaagggctaacatagggcgatcatcagtcttgcaaaatacagagaacaaccttaaaactacttcaggaagactgtcggcttcacagaactcagattctgcacccaaagaaactaactcggcaccttcaagcgggttgatcccaagcacaccacatagggctggagttggctcccataatagatctgttggaaattcagcttttcaatctggtggtaccaccttgaagagaagttcgttgaggaataacagtgcctctaatgttcacaatttcagtaaagctgatgtagtgcctgtcattgttcccagaactagctcaggaggggagttggctactgattctagaagcgatgctgctgatgtggcacccgttcttccgaaggtaaccagaagggttgaacctgctaccgattctagaaaagaaagtaatgatgtggaacttgttgttcctagagcaagctcaagaatggaaatagccgatttagcacccatttctagttccaagtcaggcagaaggttggagtctgcccctgattcgaaagaagaaagtgctgatacagcacctgttgttgtttccaatcccagggctaatgtaagaatggaaatagtctctgattctgcgcccgctctttcaaagtcaaacagaaagctagattctggcactaactcaaagaaagaaagtgctgatgcagtcattgtacccagaacaaattctagaatggaaatgatttctgattctaggagagaaccctctgctggaagaatatcaccattcagaatccagtcaagatatgctgagccacggaagctagcccatgccagaactgattcaaacaaagttgatagcagaagtaaaattactgaaacagaagacttcaattgccaaatatttcttccccgtagaaacagtgtttttcaaacaataagttctgaagaacctcgtgaagatgtaaagtgtggtccagttgacagggtgggattttcaaattcatcagaaccaaatgcgagtgtccgcaatgagaattatgttcctagaatgcgcaaaccaggagacaactgctatatcgaagtttcaagagcaggaagagcaaggtcaagtgtctctaattgggaagggagggatcagccccctagtcatgaagaaccaacaacaagcagttctacactggctcctaccggccatccatattcatctagaggaagcaatcaagcttctgaagctccaatcatagctagtgatgaagatgttctatctcttatcatggagcgacatgatctatttttaagctcaactaagtctcggctgatgaaattgcagattattcatcaaatgtgggaaagaaatgacatcaggggtgtgctctctgcgatggacaggatgggtgatcatgctgtctgtgctgatatggctagcgttctcatggagaaaagtgaaacaatcacactagatttatgtacctctatcctgcctgtcgtcaccgatcttctggagagcaaaattgacagacacttagtcgtcgcattggaattgttggtgaagcttgtaaggacttttggtccaatgatacattcaacagtatcgtcaggtccttgtgttggtgtagaccttgaggcagagcaaaggagggagcgctgcaacttatgcttcatcgaattggagaaggccaaaaataagcttccatctctaacaagaagaaaaggggcggttgcaaatgctgcacaagaacttgctcttgtcttccaggaaatcatgagttgactgacgacacactagatatacacaattagatgggacatgcttcggcctctgatggcaacaagattggatatcagctgccatggagggtgctagctattcagtcttagcgacgtcatcaagctccaaggccacagcaccaacaaatgcattttgttgctgctgttcgtgccttttgtacacatgctaacacataatccatgtcatttgtgaagagaagctgccatggacagtgacttcatccacaatattatgtggatggcggcagctggagatgttaggccccgatcgaatggtgatcagcagatgagacttgcttgggcttttctggcactcgtagttctttgctgtctgtaacatctttctcatgtaccgttatcatgtgcatgtgcaacagtcaagtggttgcatttggtagtttatggttgtgctgtgtgttggtcgatttagtggtcgttgatgagtgaagcgagccatgtacatcatttttttttaagatttgatatcttctttttccttgatgactcctctcgttatacttgagtgaaaatgatatcttgtgtacttgccttgacagcttttcgg

SEQ ID NO: 212627 - DNA, 819 bp, Zea Mays
agcaagttttgcggctggatgcattttagcgaagtcaggtgtcggcgtatgccaaatgtctcgttgagacaccgctgcagtgcagactcgccgaaaacgactcctcacgaactagtccgtttccgtgcgccgctgctgacgagggagtgggagggatcatggtggcgccggatgtgaaggcggagacgatgaagctgatggatcagcggggtgccctagaggcggagatggacgccatcatcgcccgcctcactgcggcaggcggaccgggcatcaccggcggcctcgtcgacgccgagggtttcccaaggtccgacatcgacataccgaacgtcctcgcccagcgccggaggcttgctgaattgcgaaatgaccacaaggatattacaaacaaaattggtaaaaatcttgaggttttacactcagcaaagttatcaaggaatgaacaatcaacctcaaggagatctgatacaacagatccttcacactttggatcatctcaaagtgaacctatggaagaggaccatgtgactggacttccttttgccatgattgatgaaatcgctgatggttctcctgcttctgtggatggtttgcaacttggagatgagattgtaaagtttgggaatgtggaagctggtgatcagttgcaggaaaggctcatgtctgaagctctttccaatgaggacagtcaagtatctttagtcatcattcgccagggatcagcggtgaatttaacaattacaccaaggaagtggcatggaagaggacttctggggtcttccagttagtcatttcaccatttgatgctaatgtctc

SEQ ID NO: 212628 - DNA, 3143 bp, Zea Mays
cttcaatcccactcattactagagtacccaaactaggcccaaactagacctatgtgggatagcgagttcaatctcgacggcttccctgccttccactacactcgcagagtcgcaggcagtcactttgcggcgagacgcttgtgtcgctcctttccaccctcagtctcagtcctctcatgatctcattccccaatcggcgacatttccagcaatttggtagtttcccacgcaggctgcgcgcaagcaaccatcccacccctcttccgcggcagtccactgcctcccggaaaatcccacctcgctccgatccaacccgtccccgcaaccagcgcagccgccgcgacggggtccgactcccggccgatctcccgcctccaccagcgccacgtgttctacctggaagggcatgattctggagtttccttgagaaagggagtaagtgctcaaggatggcctcaagggctatcatcaggaggaggaatgacattctacggcacactcatgtgcctattttgtccccttcattcactagcacaattgggcaaggacaatttgattgtgaggttgatcatcaaagatctgtatgttacttttcaaaggaaagtttagcagattctaatcatgctatggcacattgtactttaaataagcgaaagctttgtcatctcagtagcggtttcgcatggcatccagcttgtgaggtttctcttcctacttatggttctagagcacagaactttgtattcccattgggagtcaggtgtttcctgcagtcagtccgcaccacatcaaacacaactgcacagggtcaagttcatattatggacaagaagagtgaggatgagaagcagaagcaacaaaaaaaggaggcatcccctgaagaatgtgatcaggcagtggaaggattaagcactgcaaaagcgaaagcaaaagctaagctggaggaagtgcaaaagactgaccaatcagtggtacagaaattatgggcaaagcttcttggtattggccctgctttacgaattattgcttcaatgagcagagctgattgggctgcaaagttgaagcattggaaggatgaatttatttctacactgcagcattattggttgggcactaagctactctgggcagatgttagaatctcatcaaggctgttagttaaacttgctagtggaaagagcctcacaagacgagagaggcagcagctcacacgcacaacagcagatctattcaggctagtaccttttgcagtttttattatcgttccattcatggagctcttgctgccagtgttcctcaagttgttcccaaacatgttgccatccactttccaggacaaaatgaaagaagaggaggccctaaaaaggaaactgaaagcaaggatggaatatgcaaagtttttacaagacactgctaaagaaatggcgaaggaagttcaaacatcacgcagtggagaaatgaaacagactgctgaagatctggatgagttcttgaataaggttaggaaaggtgggcatgcctccaatgacgaaattttgagctttgcaaagctatttaatgacgagctgactttggataacatgagcagcattaagaatgatgataagatgattcaagctgagggtgtggagtctctttctgaatatgagcttcgacaagcatgtcgtgagcgtgggcaccttggtttgttgtcaacagaggagatgcgtcaacagctcagagactggctggatctatcactcaatcattctgtgccatcgtctcttctaatactctcaagagcttttactgtatctggtaaaatgaaacctgaggaggccgttgtagcaaccttatcttccctgccagatgaagttgtcgatacagttgggactgtactgccttctgaagattctgtttcagagaggaagagaaaattggaatttctggagatgcaggaagagcttatcaaggaagaggagaaaaggcaagagaaagatgacaaggcaaaactggaggagccaaaggctactgaagaagatttggctttgaaggaaatgactgagcctactgttagggagaaagaggaactaaagaaagcaaaaacccacgataagaaagagcagctttgtaatatcagtcaagcattggctgtgcttgcatctgtttcttctgttaccaaggagcgacaagagtttttaagccttgtcaacaaggagatagaactatataataacatgctcgcaaaggagggtacagatggtgaagaagaagccaggagagcgtacaaggctgctagggaggaatcagaccatgctgcagaggcagctgtgggagaaaaggtctcttcagctttgattgatagggttgatgctatgcttcaaaagttagaaaaggagattgatgatgttgatgctcgaattggcaatcgctggcagctgctggatagggactgcgatggcaaggtgactcctgaagaggtagctgcagctgcaaattatctcaaagacaccataggagcagaaggcgtccaggagcttatcagcaatctttctaaagacaacgaagggaatatccttgtggaagacattgtgaagctggcgtcacaaacagaggaaaacaacgaagctgaagaaactgcacgatgatttggaatagcagccacattcttggctcttaaaactcgacggtccattccttttttaaaaggaaccgcacataataaagctagttcctggcagtctcatgcaaaaatcaccaagcaggatggtcattctttttgttctgactggcggctgcagagaaaattgtatcctgctgttgaaagatattcatttatacagttaagtcccagcacaaccgatcgttaggttaggaattctgtccgaaatggcaacttgcatttcaaacgtctgccatgaaaatgagaataaattcggcgggctctacagatttttcatctattgtctgaacaaaagtataggcatcaaataagtatctgggtaagtttatactatttgaataagaatcagctggatttgtttaaattcttaacaagaccgttttagcagtttgactatatggtcaatcaaaacactattttgtattgtatattgtactatgtgcacttttgcagtgagatttaaatatgggtatagagatag

SEQ ID NO: 212629 - DNA, 3109 bp, Zea Mays
cactcattactagagtacccaaactaggcccaaactagacctatgtgggatagcgagttcaatctcgacggcttccctgccttccactacactcgcagagtcgcaggcagtcactttgcggcgagacgcttgtgtcgctcctttccaccctcagtctcagtcctctcatgatctcattccccaatcggcgacatttccagcaatttggtagtttcccacgcaggctgcgcgcaagcaaccatcccacccctcttccgcggcagtccactgcctcccggaaaatcccacctcgctccgatccaacccgtccccgcaaccagcgcagccgccgcgacggggtccgactcccggccgatctcccgcctccaccagcgccacgtgttctacctggaagggcatgattctggagtttccttgagaaagggagtaagtgctcaaggatggcctcaagggctatcatcaggaggaggaatgacattctacggcacactcatgtgcctattttgtccccttcattcactagcacaattgggcaaggacaatttgattgtgaggttgatcatcaaagatctgtatgttacttttcaaaggaaagtttagcagattctaatcatgctatggcacattgtactttaaataagcgaaagctttgtcatctcagtagcggtttcgcatggcatccagcttgtgaggtttctcttcctacttatggttctagagcacagaactttgtattcccattgggagtcaggtgtttcctgcagtcagtccgcaccacatcaaacacaactgcacagggtcaagttcatattatggacaagaagagtgaggatgagaagcagaagcaacaaaaaaaggaggcatcccctgaagaatgtgatcaggcagtggaaggattaagcactgcaaaagcgaaagcaaaagctaagctggaggaagtgcaaaagactgaccaatcagtggtacagaaattatgggcaaagcttcttggtattggccctgctttacgaattattgcttcaatgagcagagctgattgggctgcaaagttgaagcattggaaggatgaatttatttctacactgcagcattattggttgggcactaagctactctgggcagatgttagaatctcatcaaggctgttagttaaacttgctagtggaaagagcctcacaagacgagagaggcagcagctcacacgcacaacagcagatctattcaggaggccctaaaaaggaaactgaaagcaaggatggaatatgcaaagtttttacaagacactgctaaagaaatggcgaaggaagttcaaacatcacgcagtggagaaatgaaacagactgctgaagatctggatgagttcttgaataaggttaggaaaggtgggcatgcctccaatgacgaaattttgagctttgcaaagctatttaatgacgagctgactttggataacatgagcagaccacggcttgttaatatgtgtaaatacatggggatccaaccttttggcacagaccactacttgcgattcatgcttcggaagaaactacaagacattaagaatgatgataagatgattcaagctgagggtgtggagtctctttctgaatatgagcttcgacaagcatgtcgtgagcgtgggcaccttggtttgttgtcaacagaggagatgcgtcaacagctcagagactggctggatctatcactcaatcattctgtgccatcgtctcttctaatactctcaagagcttttactgtatctggtaaaatgaaacctgaggaggccgttgtagcaaccttatcttccctgccagatgaagttgtcgatacagttgggactgtactgccttctgaagattctgtttcagagaggaagagaaaattggaatttctggagatgcaggaagagcttatcaaggaagaggagaaaaggcaagagaaagatgacaaggcaaaactggaggagccaaaggctactgaagaagatttggctttgaaggaaatgactgagcctactgttagggagaaagaggaactaaagaaagcaaaaacccacgataagaaagagcagctttgtaatatcagtcaagcattggctgtgcttgcatctgtttcttctgttaccaaggagcgacaagagtttttaagccttgtcaacaaggagatagaactatataataacatgctcgcaaaggagggtacagatggtgaagaagaagccaggagagcgtacaaggctgctagggaggaatcagaccatgctgcagaggcagctgtgggagaaaaggtctcttcagctttgattgatagggttgatgctatgcttcaaaagttagaaaaggagattgatgatgttgatgctcgaattggcaatcgctggcagctgctggatagggactgcgatggcaaggtgactcctgaagaggtagctgcagctgcaaattatctcaaagacaccataggagcagaaggcgtccaggagcttatcagcaatctttctaaagacaacgaagggaatatccttgtggaagacattgtgaagctggcgtcacaaacagaggaaaacaacgaagctgaagaaactgcacgatgatttggaatagcagccacattcttggctcttaaaactcgacggtccattccttttttaaaaggaaccgcacataataaagctagttcctggcagtctcatgcaaaaatcaccaagcaggatggtcattctttttgttctgactggcggctgcagagaaaattgtatcctgctgttgaaagatattcatttatacagttaagtcccagcacaaccgatcgttaggttaggaattctgtccgaaatggcaacttgcatttcaaacgtctgccatgaaaatgagaataaattcggcgggctctacagatttttcatctattgtctgaacaaaagtataggcatcaaataagtatctgggtaagtttatactatttgaataagaatcagctggatttgtttaaattcttaacaagaccgttttagcagtttgactatatggtcaatcaaaacactattttgtattgtatattgtactatgtgcacttttgcagtgagatttaaatatgggtatagagatag

SEQ ID NO: 212630 - DNA, 3320 bp, Zea Mays
cactcattactagagtacccaaactaggcccaaactagacctatgtgggatagcgagttcaatctcgacggcttccctgccttccactacactcgcagagtcgcaggcagtcactttgcggcgagacgcttgtgtcgctcctttccaccctcagtctcagtcctctcatgatctcattccccaatcggcgacatttccagcaatttggtagtttcccacgcaggctgcgcgcaagcaaccatcccacccctcttccgcggcagtccactgcctcccggaaaatcccacctcgctccgatccaacccgtccccgcaaccagcgcagccgccgcgacggggtccgactcccggccgatctcccgcctccaccagcgccacggattgccagcatttccccttgctacctgacacccgcagagagctaaaatagctctcctggctaagcaagcttcccggggcatgtgccgataagtgttctacctggaagggcatgattctggagtttccttgagaaagggagtaagtgctcaaggatggcctcaagggctatcatcaggaggaggaatgacattctacggcacactcatgtgcctattttgtccccttcattcactagcacaattgggcaaggacaatttgattgtgaggttgatcatcaaagatctgtatgttacttttcaaaggaaagtttagcagattctaatcatgctatggcacattgtactttaaataagcgaaagctttgtcatctcagtagcggtttcgcatggcatccagcttgtgaggtttctcttcctacttatggttctagagcacagaactttgtattcccattgggagtcaggtgtttcctgcagtcagtccgcaccacatcaaacacaactgcacagggtcaagttcatattatggacaagaagagtgaggatgagaagcagaagcaacaaaaaaaggaggcatcccctgaagaatgtgatcaggcagtggaaggattaagcactgcaaaagcgaaagcaaaagctaagctggaggaagtgcaaaagactgaccaatcagtggtacagaaattatgggcaaagcttcttggtattggccctgctttacgaattattgcttcaatgagcagagctgattgggctgcaaagttgaagcattggaaggatgaatttatttctacactgcagcattattggttgggcactaagctactctgggcagatgttagaatctcatcaaggctgttagttaaacttgctagtggaaagagcctcacaagacgagagaggcagcagctcacacgcacaacagcagatctattcaggctagtaccttttgcagtttttattatcgttccattcatggagctcttgctgccagtgttcctcaagttgttcccaaacatgttgccatccactttccaggacaaaatgaaagaagaggaggccctaaaaaggaaactgaaagcaaggatggaatatgcaaagtttttacaagacactgctaaagaaatggcgaaggaagttcaaacatcacgcagtggagaaatgaaacagactgctgaagatctggatgagttcttgaataaggttaggaaaggtgggcatgcctccaatgacgaaattttgagctttgcaaagctatttaatgacgagctgactttggataacatgagcagaccacggcttgttaatatgtgtaaatacatggggatccaaccttttggcacagaccactacttgcgattcatgcttcggaagaaactacaagacattaagaatgatgataagatgattcaagctgagggtgtggagtctctttctgaatatgagcttcgacaagcatgtcgtgagcgtgggcaccttggtttgttgtcaacagaggagatgcgtcaacagctcagagactggctggatctatcactcaatcattctgtgccatcgtctcttctaatactctcaagagcttttactgtatctggtaaaatgaaacctgaggaggccgttgtagcaaccttatcttccctgccagatgaagttgtcgatacagttgggactgtactgccttctgaagattctgtttcagagaggaagagaaaattggaatttctggagatgcaggaagagcttatcaaggaagaggagaaaaggcaagagaaagatgacaaggcaaaactggaggagccaaaggctactgaagaagatttggctttgaaggaaatgactgagcctactgttagggagaaagaggaactaaagaaagcaaaaacccacgataagaaagagcagctttgtaatatcagtcaagcattggctgtgcttgcatctgtttcttctgttaccaaggagcgacaagagtttttaagccttgtcaacaaggagatagaactatataataacatgctcgcaaaggagggtacagatggtgaagaagaagccaggagagcgtacaaggctgctagggaggaatcagaccatgctgcagaggcagctgtgggagaaaaggtctcttcagctttgattgatagggttgatgctatgcttcaaaagttagaaaaggagattgatgatgttgatgctcgaattggcaatcgctggcagctgctggatagggactgcgatggcaaggtgactcctgaagaggtagctgcagctgcaaattatctcaaagacaccataggagcagaaggcgtccaggagcttatcagcaatctttctaaagacaacgaagggaatatccttgtggaagacattgtgaagctggcgtcacaaacagaggaaaacaacgaagctgaagaaactgcacgatgatttggaatagcagccacattcttggctcttaaaactcgacggtccattccttttttaaaaggaaccgcacataataaagctagttcctggcagtctcatgcaaaaatcaccaagcaggatggtcattctttttgttctgactggcggctgcagagaaaattgtatcctgctgttgaaagatattcatttatacagttaagtcccagcacaaccgatcgttaggttaggaattctgtccgaaatggcaacttgcatttcaaacgtctgccatgaaaatgagaataaattcggcgggctctacagatttttcatctattgtctgaacaaaagtataggcatcaaataagtatctgggtaagtttatactatttgaataagaatcagctggatttgtttaaattcttaacaagaccgttttagcagtttgactatatggtcaatcaaaacactattttgtattgtatattgtactatgtgcacttttgcagtgagatttaaatatgggtatagagatag

SEQ ID NO: 212631 - DNA, 3227 bp, Zea Mays
cactcattactagagtacccaaactaggcccaaactagacctatgtgggatagcgagttcaatctcgacggcttccctgccttccactacactcgcagagtcgcaggcagtcactttgcggcgagacgcttgtgtcgctcctttccaccctcagtctcagtcctctcatgatctcattccccaatcggcgacatttccagcaatttggtagtttcccacgcaggctgcgcgcaagcaaccatcccacccctcttccgcggcagtccactgcctcccggaaaatcccacctcgctccgatccaacccgtccccgcaaccagcgcagccgccgcgacggggtccgactcccggccgatctcccgcctccaccagcgccacgtgttctacctggaagggcatgattctggagtttccttgagaaagggagtaagtgctcaaggatggcctcaagggctatcatcaggaggaggaatgacattctacggcacactcatgtgcctattttgtccccttcattcactagcacaattgggcaaggacaatttgattgtgaggttgatcatcaaagatctgtatgttacttttcaaaggaaagtttagcagattctaatcatgctatggcacattgtactttaaataagcgaaagctttgtcatctcagtagcggtttcgcatggcatccagcttgtgaggtttctcttcctacttatggttctagagcacagaactttgtattcccattgggagtcaggtgtttcctgcagtcagtccgcaccacatcaaacacaactgcacagggtcaagttcatattatggacaagaagagtgaggatgagaagcagaagcaacaaaaaaaggaggcatcccctgaagaatgtgatcaggcagtggaaggattaagcactgcaaaagcgaaagcaaaagctaagctggaggaagtgcaaaagactgaccaatcagtggtacagaaattatgggcaaagcttcttggtattggccctgctttacgaattattgcttcaatgagcagagctgattgggctgcaaagttgaagcattggaaggatgaatttatttctacactgcagcattattggttgggcactaagctactctgggcagatgttagaatctcatcaaggctgttagttaaacttgctagtggaaagagcctcacaagacgagagaggcagcagctcacacgcacaacagcagatctattcaggctagtaccttttgcagtttttattatcgttccattcatggagctcttgctgccagtgttcctcaagttgttcccaaacatgttgccatccactttccaggacaaaatgaaagaagaggaggccctaaaaaggaaactgaaagcaaggatggaatatgcaaagtttttacaagacactgctaaagaaatggcgaaggaagttcaaacatcacgcagtggagaaatgaaacagactgctgaagatctggatgagttcttgaataaggttaggaaaggtgggcatgcctccaatgacgaaattttgagctttgcaaagctatttaatgacgagctgactttggataacatgagcagaccacggcttgttaatatgtgtaaatacatggggatccaaccttttggcacagaccactacttgcgattcatgcttcggaagaaactacaagacattaagaatgatgataagatgattcaagctgagggtgtggagtctctttctgaatatgagcttcgacaagcatgtcgtgagcgtgggcaccttggtttgttgtcaacagaggagatgcgtcaacagctcagagactggctggatctatcactcaatcattctgtgccatcgtctcttctaatactctcaagagcttttactgtatctggtaaaatgaaacctgaggaggccgttgtagcaaccttatcttccctgccagatgaagttgtcgatacagttgggactgtactgccttctgaagattctgtttcagagaggaagagaaaattggaatttctggagatgcaggaagagcttatcaaggaagaggagaaaaggcaagagaaagatgacaaggcaaaactggaggagccaaaggctactgaagaagatttggctttgaaggaaatgactgagcctactgttagggagaaagaggaactaaagaaagcaaaaacccacgataagaaagagcagctttgtaatatcagtcaagcattggctgtgcttgcatctgtttcttctgttaccaaggagcgacaagagtttttaagccttgtcaacaaggagatagaactatataataacatgctcgcaaaggagggtacagatggtgaagaagaagccaggagagcgtacaaggctgctagggaggaatcagaccatgctgcagaggcagctgtgggagaaaaggtctcttcagctttgattgatagggttgatgctatgcttcaaaagttagaaaaggagattgatgatgttgatgctcgaattggcaatcgctggcagctgctggatagggactgcgatggcaaggtgactcctgaagaggtagctgcagctgcaaattatctcaaagacaccataggagcagaaggcgtccaggagcttatcagcaatctttctaaagacaacgaagggaatatccttgtggaagacattgtgaagctggcgtcacaaacagaggaaaacaacgaagctgaagaaactgcacgatgatttggaatagcagccacattcttggctcttaaaactcgacggtccattccttttttaaaaggaaccgcacataataaagctagttcctggcagtctcatgcaaaaatcaccaagcaggatggtcattctttttgttctgactggcggctgcagagaaaattgtatcctgctgttgaaagatattcatttatacagttaagtcccagcacaaccgatcgttaggttaggaattctgtccgaaatggcaacttgcatttcaaacgtctgccatgaaaatgagaataaattcggcgggctctacagatttttcatctattgtctgaacaaaagtataggcatcaaataagtatctgggtaagtttatactatttgaataagaatcagctggatttgtttaaattcttaacaagaccgttttagcagtttgactatatggtcaatcaaaacactattttgtattgtatattgtactatgtgcacttttgcagtgagatttaaatatgggtatagagatag

SEQ ID NO: 212632 - DNA, 3201 bp, Zea Mays
cactcattactagagtacccaaactaggcccaaactagacctatgtgggatagcgagttcaatctcgacggcttccctgccttccactacactcgcagagtcgcaggcagtcactttgcggcgagacgcttgtgtcgctcctttccaccctcagtctcagtcctctcatgatctcattccccaatcggcgacatttccagcaatttggtagtttcccacgcaggctgcgcgcaagcaaccatcccacccctcttccgcggcagtccactgcctcccggaaaatcccacctcgctccgatccaacccgtccccgcaaccagcgcagccgccgcgacggggtccgactcccggccgatctcccgcctccaccagcgccacgtgttctacctggaagggcatgattctggagtttccttgagaaagggagtaagtgctcaaggatggcctcaagggctatcatcaggaggaggaatgacattctacggcacactcatgtgcctattttgtccccttcattcactagcacaattgggcaaggacaatttgattgtgaggttgatcatcaaagatctgtatgttacttttcaaaggaaagtttagcagattctaatcatgctatggcacattgtactttaaataagcgaaagctttgtcatctcagtagcggtttcgcatggcatccagcttgtgaggtttctcttcctacttatggttctagagcacagaactttgtattcccattgggagtcaggtgtttcctgcagtcagtccgcaccacatcaaacacaactgcacagggtcaagttcatattatggacaagaagagtgaggatgagaagcagaagcaacaaaaaaaggaggcatcccctgaagaatgtgatcaggcagtggaaggattaagcactgcaaaagcgaaagcaaaagctaagctggaggaagtgcaaaagactgaccaatcagtggtacagaaattatgggcaaagcttcttggtattggccctgctttacgaattattgcttcaatgagcagagctgattgggctgcaaagttgaagcattggaaggatgaatttatttctacactgcagcattattggttgggcactaagctactctgggcagatgttagaatctcatcaaggctgttagttaaacttgctagtggaaagagcctcacaagacgagagaggcagcagctcacacgcacaacagcagatctattcaggctagtaccttttgcagtttttattatcgttccattcatggagctcttgctgccagtgttcctcaagttgttcccaaacatgttgccatccactttccaggacaaaatgaaagaagaggaggccctaaaaaggaaactgaaagcaaggatggaatatgcaaagtttttacaagacactgctaaagaaatggcgaaggaagttcaaacatcacgcagtggagaaatgaaacagactgctgaagatctggatgagttcttgaataaggtttgcgcttcatatgcttaatcccttgatcataccagttggctgatcatccgtattctgcagaccacggcttgttaatatgtgtaaatacatggggatccaaccttttggcacagaccactacttgcgattcatgcttcggaagaaactacaagacattaagaatgatgataagatgattcaagctgagggtgtggagtctctttctgaatatgagcttcgacaagcatgtcgtgagcgtgggcaccttggtttgttgtcaacagaggagatgcgtcaacagctcagagactggctggatctatcactcaatcattctgtgccatcgtctcttctaatactctcaagagcttttactgtatctggtaaaatgaaacctgaggaggccgttgtagcaaccttatcttccctgccagatgaagttgtcgatacagttgggactgtactgccttctgaagattctgtttcagagaggaagagaaaattggaatttctggagatgcaggaagagcttatcaaggaagaggagaaaaggcaagagaaagatgacaaggcaaaactggaggagccaaaggctactgaagaagatttggctttgaaggaaatgactgagcctactgttagggagaaagaggaactaaagaaagcaaaaacccacgataagaaagagcagctttgtaatatcagtcaagcattggctgtgcttgcatctgtttcttctgttaccaaggagcgacaagagtttttaagccttgtcaacaaggagatagaactatataataacatgctcgcaaaggagggtacagatggtgaagaagaagccaggagagcgtacaaggctgctagggaggaatcagaccatgctgcagaggcagctgtgggagaaaaggtctcttcagctttgattgatagggttgatgctatgcttcaaaagttagaaaaggagattgatgatgttgatgctcgaattggcaatcgctggcagctgctggatagggactgcgatggcaaggtgactcctgaagaggtagctgcagctgcaaattatctcaaagacaccataggagcagaaggcgtccaggagcttatcagcaatctttctaaagacaacgaagggaatatccttgtggaagacattgtgaagctggcgtcacaaacagaggaaaacaacgaagctgaagaaactgcacgatgatttggaatagcagccacattcttggctcttaaaactcgacggtccattccttttttaaaaggaaccgcacataataaagctagttcctggcagtctcatgcaaaaatcaccaagcaggatggtcattctttttgttctgactggcggctgcagagaaaattgtatcctgctgttgaaagatattcatttatacagttaagtcccagcacaaccgatcgttaggttaggaattctgtccgaaatggcaacttgcatttcaaacgtctgccatgaaaatgagaataaattcggcgggctctacagatttttcatctattgtctgaacaaaagtataggcatcaaataagtatctgggtaagtttatactatttgaataagaatcagctggatttgtttaaattcttaacaagaccgttttagcagtttgactatatggtcaatcaaaacactattttgtattgtatattgtactatgtgcacttttgcagtgagatttaaatatgggtatagagatag

SEQ ID NO: 212633 - DNA, 2694 bp, Zea Mays
atttccccttgctacctgacacccgcagagagctaaaatagctctcctggctaagcaagcttcccggggcatgtgccgataagtgttctacctggaagggcatgattctggagtttccttgagaaagggagtaagtgctcaaggatggcctcaagggctatcatcaggaggaggaatgacattctacggcacactcatgtgcctattttgtccccttcattcactagcacaattgggcaaggacaatttgattgtgaggttgatcatcaaagatctgtatgttacttttcaaaggaaagtttagcagattctaatcatgctatggcacattgtactttaaataagcgaaagctttgtcatctcagtagcggtttcgcatggcatccagcttgtgaggtttctcttcctacttatggttctagagcacagaactttgtattcccattgggagtcaggtgtttcctgcagtcagtccgcaccacatcaaacacaactgcacagggtcaagttcatattatggacaagaagagtgaggatgagaagcagaagcaacaaaaaaaggaggcatcccctgaagaatgtgatcaggcagtggaaggattaagcactgcaaaagcgaaagcaaaagctaagctggaggaagtgcaaaagactgaccaatcagtggtacagaaattatgggcaaagcttcttggtattggccctgctttacgaattattgcttcaatgagcagagctgattgggctgcaaagttgaagcattggaaggatgaatttatttctacactgcagcattattggttgggcactaagctactctgggcagatgttagaatctcatcaaggctgttagttaaacttgctagtggaaagagcctcacaagacgagagaggcagcagctcacacgcacaacagcagatctattcaggctagtaccttttgcagtttttattatcgttccattcatggagctcttgctgccagtgttcctcaagttgttcccaaacatgttgccatccactttccaggacaaaatgaaagaagaggaggccctaaaaaggaaactgaaagcaaggatggaatatgcaaagtttttacaagacactgctaaagaaatggcgaaggaagttcaaacatcacgcagtggagaaatgaaacagactgctgaagatctggatgagttcttgaataaggttaggaaaggtgggcatgcctccaatgacgaaattttgagctttgcaaagctatttaatgacgagctgactttggataacatgagcagaccacggcttgttaatatgtgtaaatacatggggatccaaccttttggcacagaccactacttgcgattcatgcttcggaagaaactacaagacattaagaatgatgataagatgattcaagctgagggtgtggagtctctttctgaatatgagcttcgacaagcatgtcgtgagcgtgggcaccttggtttgttgtcaacagaggagatgcgtcaacaggaagaggagaaaaggcaagagaaagatgacaaggcaaaactggaggagccaaaggctactgaagaagatttggctttgaaggaaatgactgagcctactgttagggagaaagaggaactaaagaaagcaaaaacccacgataagaaagagcagctttgtaatatcagtcaagcattggctgtgcttgcatctgtttcttctgttaccaaggagcgacaagagtttttaagccttgtcaacaaggagatagaactatataataacatgctcgcaaaggagggtacagatggtgaagaagaagccaggagagcgtacaaggctgctagggaggaatcagaccatgctgcagaggcagctgtgggagaaaaggtctcttcagctttgattgatagggttgatgctatgcttcaaaagttagaaaaggagattgatgatgttgatgctcgaattggcaatcgctggcagctgctggatagggactgcgatggcaaggtgactcctgaagaggtagctgcagctgcaaattatctcaaagacaccataggagcagaaggcgtccaggagcttatcagcaatctttctaaagacaacgaagggaatatccttgtggaagacattgtgaagctggcgtcacaaacagaggaaaacaacgaagctgaagaaactgcacgatgatttggaatagcagccacattcttggctcttaaaactcgacggtccattccttttttaaaaggaaccgcacataataaagctagttcctggcagtctcatgcaaaaatcaccaagcaggatggtcattctttttgttctgactggcggctgcagagaaaattgtatcctgctgttgaaagatattcatttatacagttaagtcccagcacaaccgatcgttaggttaggaattctgtccgaaatggcaacttgcatttcaaacgtctgccatgaaaatgagaataaattcggcgggctctacagatttttcatctattgtctgaacaaaagtataggcatcaaataagtatctgggtaagtttatactatttgaataagaatcagctggatttgtttaaattcttaacaagaccgttttagcagtttgactatatggtcaatcaaaacactattttgtattgtatattgtactatgtgcacttttgcagtgagatttaaatatgggtatagagatag

SEQ ID NO: 212634 - DNA, 2926 bp, Zea Mays
atttccccttgctacctgacacccgcagagagctaaaatagctctcctggctaagcaagcttcccggggcatgtgccgataagtgttctacctggaagggcatgattctggagtttccttgagaaagggagtaagtgctcaaggatggcctcaagggctatcatcaggaggaggaatgacattctacggcacactcatgtgcctattttgtccccttcattcactagcacaattgggcaaggacaatttgattgtgaggttgatcatcaaagatctgtatgttacttttcaaaggaaagtttagcagattctaatcatgctatggcacattgtactttaaataagcgaaagctttgtcatctcagtagcggtttcgcatggcatccagcttgtgaggtttctcttcctacttatggttctagagcacagaactttgtattcccattgggagtcaggtgtttcctgcagtcagtccgcaccacatcaaacacaactgcacagggtcaagttcatattatggacaagaagagtgaggatgagaagcagaagcaacaaaaaaaggaggcatcccctgaagaatgtgatcaggcagtggaaggattaagcactgcaaaagcgaaagcaaaagctaagctggaggaagtgcaaaagactgaccaatcagtggtacagaaattatgggcaaagcttcttggtattggccctgctttacgaattattgcttcaatgagcagagctgattgggctgcaaagttgaagcattggaaggatgaatttatttctacactgcagcattattggttgggcactaagctactctgggcagatgttagaatctcatcaaggctgttagttaaacttgctagtggaaagagcctcacaagacgagagaggcagcagctcacacgcacaacagcagatctattcaggctagtaccttttgcagtttttattatcgttccattcatggagctcttgctgccagtgttcctcaagttgttcccaaacatgttgccatccactttccaggacaaaatgaaagaagaggaggccctaaaaaggaaactgaaagcaaggatggaatatgcaaagtttttacaagacactgctaaagaaatggcgaaggaagttcaaacatcacgcagtggagaaatgaaacagactgctgaagatctggatgagttcttgaataaggttaggaaaggtgggcatgcctccaatgacgaaattttgagctttgcaaagctatttaatgacgagctgactttggataacatgagcagaccacggcttgttaatatgtgtaaatacatggggatccaaccttttggcacagaccactacttgcgattcatgcttcggaagaaactacaagacattaagaatgatgataagatgattcaagctgagggtgtggagtctctttctgaatatgagcttcgacaagcatgtcgtgagcgtgggcaccttggtttgttgtcaacagaggagatgcgtcaacagagactggctggatctatcactcaatcattctgtgccatcgtctcttctaatactctcaagagcttttactgtatctggtaaaatgaaacctgaggaggccgttgtagcaaccttatcttccctgccagatgaagttgtcgatacagttgggactgtactgccttctgaagattctgtttcagagaggaagagaaaattggaatttctggagatgcaggaagagcttatcaaggaagaggagaaaaggcaagagaaagatgacaaggcaaaactggaggagccaaaggctactgaagaagatttggctttgaaggaaatgactgagcctactgttagggagaaagaggaactaaagaaagcaaaaacccacgataagaaagagcagctttgtaatatcagtcaagcattggctgtgcttgcatctgtttcttctgttaccaaggagcgacaagagtttttaagccttgtcaacaaggagatagaactatataataacatgctcgcaaaggagggtacagatggtgaagaagaagccaggagagcgtacaaggctgctagggaggaatcagaccatgctgcagaggcagctgtgggagaaaaggtctcttcagctttgattgatagggttgatgctatgcttcaaaagttagaaaaggagattgatgatgttgatgctcgaattggcaatcgctggcagctgctggatagggactgcgatggcaaggtgactcctgaagaggtagctgcagctgcaaattatctcaaagacaccataggagcagaaggcgtccaggagcttatcagcaatctttctaaagacaacgaagggaatatccttgtggaagacattgtgaagctggcgtcacaaacagaggaaaacaacgaagctgaagaaactgcacgatgatttggaatagcagccacattcttggctcttaaaactcgacggtccattccttttttaaaaggaaccgcacataataaagctagttcctggcagtctcatgcaaaaatcaccaagcaggatggtcattctttttgttctgactggcggctgcagagaaaattgtatcctgctgttgaaagatattcatttatacagttaagtcccagcacaaccgatcgttaggttaggaattctgtccgaaatggcaacttgcatttcaaacgtctgccatgaaaatgagaataaattcggcgggctctacagatttttcatctattgtctgaacaaaagtataggcatcaaataagtatctgggtaagtttatactatttgaataagaatcagctggatttgtttaaattcttaacaagaccgttttagcagtttgactatatggtcaatcaaaacactattttgtattgtatattgtactatgtgcacttttgcagtgagatttaaatatgggtatagagatag

SEQ ID NO: 212635 - DNA, 2700 bp, Zea Mays
atggcctcaagggctatcatcaggaggaggaatgacattctacggcacactcatgtgcctattttgtccccttcattcactagcacaattgggcaaggacaatttgattgtgaggttgatcatcaaagatctgtatgttacttttcaaaggaaagtttagcagattctaatcatgctatggcacattgtactttaaataagcgaaagctttgtcatctcagtagcggtttcgcatggcatccagcttgtgaggtttctcttcctacttatggttctagagcacagaactttgtattcccattgggagtcaggtgtttcctgcagtcagtccgcaccacatcaaacacaactgcacagggtcaagttcatattatggacaagaagagtgaggatgagaagcagaagcaacaaaaaaaggaggcatcccctgaagaatgtgatcaggcagtggaaggattaagcactgcaaaagcgaaagcaaaagctaagctggaggaagtgcaaaagactgaccaatcagtggtacagaaattatgggcaaagcttcttggtattggccctgctttacgaattattgcttcaatgagcagagctgattgggctgcaaagttgaagcattggaaggatgaatttatttctacactgcagcattattggttgggcactaagctactctgggcagatgttagaatctcatcaaggctgttagttaaacttgctagtggaaagagcctcacaagacgagagaggcagcagctcacacgcacaacagcagatctattcaggctagtaccttttgcagtttttattatcgttccattcatggagctcttgctgccagtgttcctcaagttgttcccaaacatgttgccatccactttccaggacaaaatgaaagaagaggaggccctaaaaaggaaactgaaagcaaggatggaatatgcaaagtttttacaagacactgctaaagaaatggcgaaggaagttcaaacatcacgcagtggagaaatgaaacagactgctgaagatctggatgagttcttgaataaggttaggaaaggtgggcatgcctccaatgacgaaattttgagctttgcaaagctatttaatgacgagctgactttggataacatgagcagcattaagaatgatgataagatgattcaagctgagggtgtggagtctctttctgaatatgagcttcgacaagcatgtcgtgagcgtgggcaccttggtttgttgtcaacagaggagatgcgtcaacagctcagagactggctggatctatcactcaatcattctgtgccatcgtctcttctaatactctcaagagcttttactgtatctggtaaaatgaaacctgaggaggccgttgtagcaaccttatcttccctgccagatgaagttgtcgatacagttgggactgtactgccttctgaagattctgtttcagagaggaagagaaaattggaatttctggagatgcaggaagagcttatcaaggtaatagaagaggagaaaaggcaagagaaagatgacaaggcaaaactggaggagccaaaggctactgaagaagatttggctttgaaggaaatgactgagcctactgttagggagaaagaggaactaaagaaagcaaaaacccacgataagaaagagcagctttgtaatatcagtcaagcattggctgtgcttgcatctgtttcttctgttaccaaggagcgacaagagtttttaagccttgtcaacaaggagatagaactatataataacatgctcgcaaaggagggtacagatggtgaagaagaagccaggagagcgtacaaggctgctagggaggaatcagaccatgctgcagaggcagctgtgggagaaaaggtctcttcagctttgattgatagggttgatgctatgcttcaaaagttagaaaaggagattgatgatgttgatgctcgaattggcaatcgctggcagctgctggatagggactgcgatggcaaggtgactcctgaagaggtagctgcagctgcaaattatctcaaagacaccataggagcagaaggcgtccaggagcttatcagcaatctttctaaagacaacgaagggaatatccttgtggaagacattgtgaagctggcgtcacaaacagaggaaaacaacgaagctgaagaaactgcacgatgatttggaatagcagccacattcttggctcttaaaactcgacggtccattccttttttaaaaggaaccgcacataataaagctagttcctggcagtctcatgcaaaaatcaccaagcaggatggtcattctttttgttctgactggcggctgcagagaaaattgtatcctgctgttgaaagatattcatttatacagttaagtcccagcacaaccgatcgttaggttaggaattctgtccgaaatggcaacttgcatttcaaacgtctgccatgaaaatgagaataaattcggcgggctctacagatttttcatctattgtctgaacaaaagtataggcatcaaataagtatctgggtaagtttatactatttgaataagaatcagctggatttgtttaaattcttaacaagaccgttttagcagtttgactatatggtcaatcaaaacactattttgtattgtatattgtactatgtgcacttttgcagtgagatttaaatatgggtatagagatag

SEQ ID NO: 212636 - DNA, 1747 bp, Zea Mays
cttcttgcatgcttagttaggaaaggtgggcatgcctccaatgacgaaattttgagctttgcaaagctatttaatgacgagctgactttggataacatgagcagaccacggcttgttaatatgtgtaaatacatggggatccaaccttttggcacagaccactacttgcgattcatgcttcggaagaaactacaagacattaagaatgatgataagatgattcaagctgagggtgtggagtctctttctgaatatgagcttcgacaagcatgtcgtgagcgtgggcaccttggtttgttgtcaacagaggagatgcgtcaacagagactggctggatctatcactcaatcattctgtgccatcgtctcttctaatactctcaagagcttttactgtatctggtaaaatgaaacctgaggaggccgttgtagcaaccttatcttccctgccagatgaagttgtcgatacagttgggactgtactgccttctgaagattctgtttcagagaggaagagaaaattggaatttctggagatgcaggaagagcttatcaaggaagaggagaaaaggcaagagaaagatgacaaggcaaaactggaggagccaaaggctactgaagaagatttggctttgaaggaaatgactgagcctactgttagggagaaagaggaactaaagaaagcaaaaacccacgataagaaagagcagctttgtaatatcagtcaagcattggctgtgcttgcatctgtttcttctgttaccaaggagcgacaagagtttttaagccttgtcaacaaggagatagaactatataataacatgctcgcaaaggagggtacagatggtgaagaagaagccaggagagcgtacaaggctgctagggaggaatcagaccatgctgcagaggcagctgtgggagaaaaggtctcttcagctttgattgatagggttgatgctatgcttcaaaagttagaaaaggagattgatgatgttgatgctcgaattggcaatcgctggcagctgctggatagggactgcgatggcaaggtgactcctgaagaggtagctgcagctgcaaattatctcaaagacaccataggagcagaaggcgtccaggagcttatcagcaatctttctaaagacaacgaagggaatatccttgtggaagacattgtgaagctggcgtcacaaacagaggaaaacaacgaagctgaagaaactgcacgatgatttggaatagcagccacattcttggctcttaaaactcgacggtccattccttttttaaaaggaaccgcacataataaagctagttcctggcagtctcatgcaaaaatcaccaagcaggatggtcattctttttgttctgactggcggctgcagagaaaattgtatcctgctgttgaaagatattcatttatacagttaagtcccagcacaaccgatcgttaggttaggaattctgtccgaaatggcaacttgcatttcaaacgtctgccatgaaaatgagaataaattcggcgggctctacagatttttcatctattgtctgaacaaaagtataggcatcaaataagtatctgggtaagtttatactatttgaataagaatcagctggatttgtttaaattcttaacaagaccgttttagcagtttgactatatggtcaatcaaaacactattttgtattgtatattgtactatgtgcacttttgcagtgagatttaaatatgggtatagagatag

SEQ ID NO: 212637 - DNA, 1575 bp, Zea Mays
gcggctgtggcgagaccatttcggcggttgaggcgacacggcagaagtgagcaaagcgttcaggtgcggagccgcggagggatgggcggcaggagggaggccatagagcgggagctgaagaagcttcgggcagagcgggaggagctcgacggccggatacggctgctggaatcgcagctcgaggcagggcctgcgggattcaacggtgcggcggcggggaaaggagtaggggacgatgcgtgcggcgggagtggagcgtgccagagccgcgtgggtaacgagtttgctccggacggtagcctcccggcggatatgatctaccggtacagccgccacctccttctcccggacttcggggtcgaaggccagcggaagctgtcacagtcgtcgattttagttgttggggctggaggtttgggctctcccctggcattgtatctagcagcttgtggtgtcggtcgcttgggcattgtggatggtgatgatgttgaattgaataatcttcatcgacagataattcataaagaagcatatgttggacaatctaaagtgaagtcagcagctgatgcttgccgggagattaattcctctatcaaagtagtagagtatcaccatactctgaagccatgcaatgctttggaggttgcacggaaatatgatatagttgttgatgcaactgacaaccttcctactaggtatatgatcagcgattgctgtgttttgctgaacaagccacttgtatctggtgcggcattaggcttagaagggcagttgactgtttatcatcataatggaagcccatgctatcggtgcctctttccaactccaccacctgtggcagcctgccagagatgctcagacagtggtgtccttggggttgttccgggagtgattggttgcttacaagctctggaggctataaaggttgcaactggtgttggttaaacttcgtggaagctctccagattgcacccattgtggcgaaaactccgttttcacagaagaagactttcagaagtttgactatgagagcttcacacagtcaccaatgtctgataaggcagcaccaagcgtgaacgtactcccagagagcgcgcggatcacttgcagagagtacaagaaactggccgacgatggtgaacctcatctactgttggacgtacggcctgcgcatcacttccagatagcttcgatctctccgtcccacaacatcccgctctccatgctggaagagaagctgcccgcgctcgaagcctcgctgaaggaagcaggagaggggtcagccttggttgtcctgtgtaggagaggtaatgactctcagagagccgtccagcttctccgcgagaagggattcgcctccgcgaaggatatcatcggtgggctgcaggcatggggacgagacgtcgatcctgatttccctgtgtactagcgagatggaaatagatgcactacaccttgtaacagtttgaatgccgccagagattctggtggtgttgcaagaacgagaactctggtactatgatttgggtactaattttgccataccgtgtacttgcaaatatatatatatatata

SEQ ID NO: 212638 - DNA, 1530 bp, Zea Mays
gcggctgtggcgagaccatttcggcggttgaggcgacacggcagaagtgagcaaagcgttcaggtgcggagccgcggagggatgggcggcaggagggaggccatagagcgggagctgaagaagcttcgggcagagcgggaggagctcgacggccggatacggctgctggaatcgcagctcgaggcagggcctgcgggattcaacggtgcggcggcggggaaaggagtaggggacgatgcgtgcggcgggagtggagcgtgccagagccgcgtgggtaacgagtttgctccggacggtagcctcccggcggatatgatctaccggtacagccgccacctccttctcccggacttcggggtcgaaggccagcggaagctgtcacagtcgtcgattttagttgttggggctggaggtcgcttgggcattgtggatggtgatgatgttgaattgaataatcttcatcgacagataattcataaagaagcatatgttggacaatctaaagtgaagtcagcagctgatgcttgccgggagattaattcctctatcaaagtagtagagtatcaccatactctgaagccatgcaatgctttggaggttgcacggaaatatgatatagttgttgatgcaactgacaaccttcctactaggtatatgatcagcgattgctgtgttttgctgaacaagccacttgtatctggtgcggcattaggcttagaagggcagttgactgtttatcatcataatggaagcccatgctatcggtgcctctttccaactccaccacctgtggcagcctgccagagatgctcagacagtggtgtccttggggttgttccgggagtgattggttgcttacaagctctggaggctataaaggttgcaactggtgttggttaaacttcgtggaagctctccagattgcacccattgtggcgaaaactccgttttcacagaagaagactttcagaagtttgactatgagagcttcacacagtcaccaatgtctgataaggcagcaccaagcgtgaacgtactcccagagagcgcgcggatcacttgcagagagtacaagaaactggccgacgatggtgaacctcatctactgttggacgtacggcctgcgcatcacttccagatagcttcgatctctccgtcccacaacatcccgctctccatgctggaagagaagctgcccgcgctcgaagcctcgctgaaggaagcaggagaggggtcagccttggttgtcctgtgtaggagaggtaatgactctcagagagccgtccagcttctccgcgagaagggattcgcctccgcgaaggatatcatcggtgggctgcaggcatggggacgagacgtcgatcctgatttccctgtgtactagcgagatggaaatagatgcactacaccttgtaacagtttgaatgccgccagagattctggtggtgttgcaagaacgagaactctggtactatgatttgggtactaattttgccataccgtgtacttgcaaatatatatatatatata

SEQ ID NO: 212639 - DNA, 3028 bp, Zea Mays
atgacggccattcactctgctcaccaacacggcctccatatacagaatttagatcacaaacttaacattgataaccaatttgaggcattgaagtgctatgagatgatagatagggattgccggtggattaatgcaactttccaatcagttccaacttccatgggaacaaatatgaaagtggacgaccttgttcagatcgaaagcaaaagagcctctggtctagtggttaaggggttccaagtagcacctccaaattgggttcgatcttcctcggggttatgtcctgtgcgccatccttcggctgggcgttgcagagtggacggtgacgaccccgctactgatgggagcgaccagctgacacaagctaacccactctcgcccggcgacgtgctcatctccaaggacggagcctttgctctcggcttcttctccgcaggtaactataacaagagtttatacgtcggcatatggtacaacaaggtgccagagcacaccgtggtgtgggtcgccaaccgtgacagcccagtcatcgccccttccagagcgaagctcgccatcaccggaaaaccagagctggtgctgtctgactcccaaggacgcatccgttggacgacgacgaacagcgccgcagctgggggcgctgacgcttttgccgtgctactcaactcgggtaactttgtccttcaaacgccaaccggcgagaccatatggcaaagctttgattacccaactgataccttactcctaaccatgaggttattgctcaatcacaagggtcaagtgccaactcgcatcatttcttggaagagccctgatgacccatccactgggaatttctcctatggaattggtcccaactggaaccttcagttcttcacttggtacgggaccttgccgtacagccgctcaaatgcgcttaacgatgcatctatgtccagtggcatgtacctcagcagtggtgcctccattgtataccaagccattgtcgacacagggaacaggctctactatatatacacagtctctgaaggatcaccctacacacgtatctggcttgactacaccggtaagatgaggactcagagttggaacagcaacacatcatcttggatgctcgtttttgaacgcccccattctagctgcgatctctatgcccagtgtggtccattcggtttctgcgatagcacaggcgatgtcccaacgtgccggtgtcctgaagggttcgagcccatcgatggtgtcaactattcgagaggatgccggagaaaggaggcactgagatgcgggaaagaagacagcttcgtcaccttgccagcgatgaaggttcctgataagttcttgtacttgcgcaacagaagcttcgaccagtgcgcagccgagtgcagcagaaactgctcatgtgtagcttacgcttatgacaccttgagcctaggtgacagtaatggcgacacgtcgaggtgtttagtttggactggggacctcattgacatggagaaggccagcttccatggtaacttgtacctccggattgctggatctcctgtaaagaagaagaagaagagccatttgacaaagattttactcccgattatagcctttgtgctgccactcacattcacagccctagtctggacatgtaaaagaagaggtcgacgacaaaagaagaaggttcagaagagagtgatgctagaatacttgaggtctccggatgaaatgggggataagaatatagagttcccatttattagctttgaagacattgctgcagcaacagatcatttctctgactccaatatgcttgggaagggaggttttggcaaagtttacaaggttattactaaggtttcctgataaagaatgatggaatcatgcaagggagtgttaggaggtaccaaggaagtagcagtgaagagacttagtaagggttctgttcaaggaatggaggagttcaaaaatgaagcggtcctgattgcaaaactgcagcacaagaacctagttaagcttattggttgctgtatttatgaagatgagaggttgttggtttacgagtacttacccaacaaaagcttggattacttcctattcgactcatcaaaaaaatcagtgcttcagtggacgacaaggttcaagataatccagggggttgctagaggaatcatgtatctccatcaggactcaagactgactataatccatagagatctgaaaacaagcaatatcttgttagataaggagatgagccctaagatatcagattttggcatggcgaggatattctttggcaagcagctccaagcaaatacaaaccgagttgtagggacatacggttacatggctcctgaatatgccatggaaggatccttttcggtcaaatctgacacctacagctttggtgtaatactgctggagattgtaagtggattaaagatcagctcaccgcaccttctcatggatttccctaaccttatagcatatgcatggaacttgtggaaagatgggaaatcagaacaaatggtggactcatttgttgtggagagtaattgccctcttgatgaagtttcgcgatgcgtccaaataggtctcttgtgcgtacaagatgatccaggctccagacctgtcatggcagtggttgtgttcatgctggaaaacagaactacgccactgccaacaccgaagcaaccttcatattttgcacaaaggggttacaagccccggaaggctggagaccacagggaggtctccactgacatgagcttgacagcacttgaggctcgttagatgtttaaccatatcatattgtactctgaattttcagggttttgcaacagtgcaccaacttttttgataactgactgtacatgagacctgtgaatctgtgctatgtgatttttatatctgtgagcttgtttctgtatggacgtatggtgtttgttgaatccgtggataatatagattgtagaataatttggtgaagttagcatttgtgttttttgctacagaaaaggctgacaaacttttacaattttgg

SEQ ID NO: 212640 - DNA, 2871 bp, Zea Mays
ggcgagcagcttcccgtctccccgtctcatcccatgtcatgactcagcaccacctcccccatcctcctctgtcctcgtataaagcgccgcagtccacgacggcgacgccgcccatgggagctggagcaccagcacacgccgctgccccggctctgcgccgcgaaccctagccgaccgcctcatggccgccgagtcctgcggcagccgcggcgcctcgcccccgccgcctccctccgctggcggcgcggccgggaggcgccgcaaggcggaggcctacgccgaggtgctccgccgcatccgcgctggcgccggcggctacggtgctgcccgccccgggttggaggacgagctctgggcccacttccaaggcctacccgccagatatgctttggatgtcaatgtagaacgggttgaagatgtcttactgcacaagaaattgctggagcaagcccataaacccatgaatggtctggtctttgatgttcgtcctgcacagggttttactctggaggaaagcactggatttgagtccacaacttcctttaagcaagaagaacaagatccccagtcctcagtattcacatcaagagatcaaaggcctttgcatgaagttatatttgcatgtgacgataagccaaagcttcttagtcagttaacctctctcctcggggagcttggtcttaatatccaagaagcacatgcatattcgacgagtgatggctattccttggacatctttgttgttgatggctgggagtatgaggctgacattctccaaagtgcattgagggaaggcgttgataaaataaagtacagagcatggccgttggtaccgtcgatgtctgctaggatggatcaccaaccattggaggtttctccttcatctgactttgtccagataccagctgatgcagttgatgtttgggaagtcgatctcaggcttctcaaatttgaacaaaaattagcgtctggatcatttggtgatctataccatgggacgtactgtagtcaagatgtagctatcaaagtactcaagcctgagcgggttagcgttgatatgctacgtgagtttgcacaggaagtttatataatgaaaaaggttcgtcacaaaaatgttgtgcaatttattggtgcatgcacgagacctcctgttttgtgtattattacagaattcatgcatggaggcagtatttttgacttcctttacaatagacgaggaaattttcaactcccggatgtgattagaattgcatctgatgtgtccaagggaatgaattacttgcatcagattaatattgttcatagggatttgaagactgcaaatcttcttatggatgatcaggttgtcaaggttgcagactttggggttgcaagggttaaagaccagtcaggagttatgactgcagaaacaggaacctacagatggatggcccctgaggttgattttgccaaattgcttgttattaaacattgagaaactcttacattaaaagcagcgtatgtgaaattcgttttagtgcttaaaaatgtggtttcatatcaagcggattacatattagttgtgcagtctgcagacagaatgcccaaaatgtgagaatttattccccctagaccaccttgatagttcgcatgaagcagcaaatttgttggggttgggggcctcagtgttatacctaaaagtttacttagttcctaatgtcacttttcaaaaaaccaagattaatttttttgagcagcttgcgatgcctcggctattgcaacatgactattttttttattctgtgtgatctacatcaatgctgcttcaccaagccaacaattctagcatcgaatatgattcgtttacttggtctgcagttggtgttactgttcctgtattgagctataaagtaccgggaaaaatcatttttatctgaaagtactttggaaaaaaataatccaagaaccttttgtgggatcaaatcgctatctcagctttagagtaaattagtgagctgtcaaactgaaggtagtccagcaaatgtttatcatttatttttagtttgccttcagtaatgcataacatataatttattggtatgctgggggtcaatgagctccttagctgtgatatgaatgtgccatcttcacaatgccatcagccttgtaccacatagaagtcaaaactagcttttgtttatgcatcacctcgttctactaaaaaaactgtgcaggtcattgagcatttgccgtatgatcatagagcagatgttttcagttttgggatagttctttgggagctgctgaccggaaagcttccatatgaagacatgacacctcttcaggcagcagttgctgttgttcaaaaggatctgaggcctactattgctgttgatactcatcctatgctcgctgagctactccagagatgctggcagaaagatcctgctctaagaccaacatttgcagagattgtggatatattgaactctataaaggaggcggttcggagttctgtgcatcacaaaaggcattcatgtcgatctcactccgggagaagacgaggctgttgatgtgccagttttatgtggtgccgcacgcccttttcattttatttttgtagtcgagcgataacttcagaatacggccagaagagcttactgtgttcattccgagaggttttggtaactttattttttttaatttggacttatgcttcaaggattttcatcgttaaaaagcttagaggtgcatatccacgtttacatttggcatgtatctgtatctcgtactcgttttcttaagtttggcaggcaaccaagattttaatgaaaatctttaaccattactcactccgtccgaatttataattcgtttgactttttctttgcg

SEQ ID NO: 212641 - DNA, 1295 bp, Zea Mays
ggtagatgctggaaacgagtatgctggtcatctaaagcccacatagtcatcctaatgctgagctcaagttttgtcactgctgacattctccaaagtgcattgagggaaggcgttgataaaataaagtacagagcatggccgttggtaccgtcgatgtctgctaggatggatcaccaaccattggagataccatgggacgtactgtagtcaagatgtagctatcaaagtactcaagcctgagcgggttagcgttgatatgctacgtgagtttgcacaggaagtttatataatgaaaaaggttcgtcacaaaaatgttgtgcaatttattggtgcatgcacgagacctcctgttttgtgtattattacagaattcatgcatggaggcagtatttttgacttcctttacaatagacgaggaaattttcaactcccggatgtgattagaattgcatctgatgtgtccaagggaatgaattacttgcatcagattaatattgttcatagggatttgaagactgcaaatcttcttatggatgatcaggttgtcaaggttgcagactttggggttgcaagggttaaagaccagtcaggagttatgactgcagaaacaggaacctacagatggatggcccctgaggtcattgagcatttgccgtatgatcatagagcagatgttttcagttttgggatagttctttgggagctgctgaccggaaagcttccatatgaagacatgacacctcttcaggcagcagttgctgttgttcaaaaggatctgaggcctactattgctgttgatactcatcctatgctcgctgagctactccagagatgctggcagaaagatcctgctctaagaccaacatttgcagagattgtggatatattgaactctataaaggaggcggttcggagttctgtgcatcacaaaaggcattcatgtcgatctcactccgggagaagacgaggctgttgatgtgccagttttatgtggtgccgcacgcccttttcattttatttttgtagtcgagcgataacttcagaatacggccagaagagcttactgtgttcattccgagaggttttggtaactttattttttttaatttggacttatgcttcaaggattttcatcgttaaaaagcttagaggtgcatatccacgtttacatttggcatgtatctgtatctcgtactcgttttcttaagtttggcaggcaaccaagattttaatgaaaatctttaaccattactcactccgtccgaatttataattcgtttgactttttctttgcg

SEQ ID NO: 212642 - DNA, 907 bp, Zea Mays
gcttctctcaatcttgctggaaggactgctatggttgttggcggtgatccacttctagagctacttgcggtcgattggttcaaagttaatgaacgctttgattcagttgccttacatcccaaaagccttgtgcaagtgccagcgaaaccaaattataacttggttatgtactacgctgcagagagaccagtgaacaaagattctttgttgggtagattcattgatggaactgatgcataccgagatgccagatttaaacttataccaagcattgttgagggttattggatggttaagcgtgctgtaggaacaaaagcttgccttctgggcaaagcagtaacgtgcaattatcttcgccaggataactttctggagatagatgttgacatcggttcatcatccgttgcccggagcattattggtctagtattgggatatgtcacaagcatagttgttgatcttgctattcttattgaggccaaggaagagaaagagctccccgagtacattctgggcactgttcgtctgaaccgtgtgaatcccgacagtgctgtatcaatctaattacgtttctagccgatctatgcaaatttactcttatcctcttttattctgagagaaacagcgtggcattttgaaaatgtgaaatagcattactatttgctgatccccaatcgagggtaacatatgtaaattggcatgaggcatgactacgtgacgcctttcgtaaatagaataaatcaatggttatgtaatattaatatcccatatacgcgtgtcataatctatgtggcttaaaagtggcatcaagtcatctagtttcctgtgttaacttcttattccttaggtagtcagacattaacagtgtgtttggtttgaggaatgaagtgatccatctttttctcac

SEQ ID NO: 212643 - DNA, 1084 bp, Zea Mays
gcctttctctctggttgcacttgagtgggggtgttgaagtgtataagtggaattggctaccttctcccatcagtttaaacttttgggttgaactggctagaaaagtaaagttgaagaatgtgtcatgggctattgcaggcttggctttaaagacaactaaaggttgttggcggtgatccacttctagagctacttgcggtcgattggttcaaagttaatgaacgctttgattcagttgccttacatcccaaaagccttgtgcaatcagaagctgcaaagaaacttcctttcatattggttataaatttgcaggtgccagcgaaaccaaattataacttggttatgtactacgctgcagagagaccagtgaacaaagattctttgttgggtagattcattgatggaactgatgcataccgagatgccagatttaaacttataccaagcattgttgagggttattggatggttaagcgtgctgtaggaacaaaagcttgccttctgggcaaagcagtaacgtgcaattatcttcgccaggataactttctggagatagatgttgacatcggttcatcatccgttgcccggagcattattggtctagtattgggatatgtcacaagcatagttgttgatcttgctattcttattgaggccaaggaagagaaagagctccccgagtacattctgggcactgttcgtctgaaccgtgtgaatcccgacagtgctgtatcaatctaattacgtttctagccgatctatgcaaatttactcttatcctcttttattctgagagaaacagcgtggcattttgaaaatgtgaaatagcattactatttgctgatccccaatcgagggtaacatatgtaaattggcatgaggcatgactacgtgacgcctttcgtaaatagaataaatcaatggttatgtaatattaatatcccatatacgcgtgtcataatctatgtggcttaaaagtggcatcaagtcatctagtttcctgtgttaacttcttattccttaggtagtcagacattaacagtgtgtttggtttgaggaatgaagtgatccatctttttctcac

SEQ ID NO: 212644 - DNA, 999 bp, Zea Mays
ggttgaactggctagaaaagtaaagttgaagaatgtgtcatgggctattgcaggcttggctttaaagacaactaaaggttgttggcggtgatccacttctagagctacttgcggtcgattggttcaaagttaatgaacgctttgattcagttgccttacatcccaaaagccttgtgcaatcagaagctgcaaagaaacttcctttcatattggttataaatttgcaggtgccagcgaaaccaaattataacttggttatgtactacgctgcagagagaccagtgaacaaagattctttgttgggtagattcattgatggaactgatgcataccgagatgccagatttaaacttataccaagcattgttgagggttattggatggttaagcgtgctgtaggaacaaaagcttgccttctgggcaaagcagtaacgtgcaattatcttcgccaggataactttctggagatagatgttgacatcggttcatcatccgttgcccggagcattattggtctagtattgggatatgtcacaagcatagttgttgatcttgctattcttattgaggccaaggaagagaaagagctccccgagtacattctgggcactgttcgtctgaaccgtgtgaatcccgacagtgctgtatcaatctaattacgtttctagccgatctatgcaaatttactcttatcctcttttattctgagagaaacagcgtggcattttgaaaatgtgaaatagcattactatttgctgatccccaatcgagggtaacatatgtaaattggcatgaggcatgactacgtgacgcctttcgtaaatagaataaatcaatggttatgtaatattaatatcccatatacgcgtgtcataatctatgtggcttaaaagtggcatcaagtcatctagtttcctgtgttaacttcttattccttaggtagtcagacattaacagtgtgtttggtttgaggaatgaagtgatccatctttttctcac

SEQ ID NO: 212645 - DNA, 4806 bp, Zea Mays
tgagcctaaccgaccttggtgcagccttcctatccaggttccggataaagcaagggctttcttctcgatggtgttgacttcaaaggttggtaatggggctaatactttgttctggactgataaatggattcatgggcagaaaattgcagatttggttcctagattatttgatatcattccgaaaaaaatcactaacagaaggacggttcaggaagcattgacagatagaagatggattgctgatatcacaggatcactctcggtgggagtattattggattatcttcatctttggaatttaatttcagattttgagctgctgccagatatagaagataaacatacttttagtattgctgcaaatgggacttattctgctaaggctgcatatgatgggttgttcatcggggctgtgcatttcggtcactatgaaagagtttggaaaacttgggccccctctaaatgccacttcttcctctggttatcggtgctaaataaatgctggacaacagataggttggcaaagagaggacttgatcatccggagaagtgtccgctttgtgaccaagagtctgaatctttggatcatattttggtttcttgtgtttttgcgagagaattctggttccggctgaaggttgatgtgcattttcagactacaaaatctggctcctacacctagtacggtgtcttttacgggttggtgggagatgatagacaatggctccggagatatgattatgaagggtgtcaactcccttattgccttgggagcctggattatttggaatcatcggaatcaaattgtctttgatggaatctcccctagtgtttctgcagctctttgtcaggcaagggaggaacaacagttgtgggaaatggcaggagctaagggtctctcctttcttgccgcaaccatcaggggcacctagctgcctggtttatcgctgatgggctggttttgtttttcaggatctgtttgttctttttttgtttttttctcttcttttttctttggtttttttatcccctccggggaggtcttttgtactttggtctattttggaccctcttttccttctacttaatataatgatgtgcagttctcctgcgctttcgagaaaaaaaaacgtcatccgcggcctcaacgaatgctttgccaacattggtcttcacctttgacgtgggcgcctttccccacctttttcgatgcttgctctgagctccttcttgaagtgctcaggccatcagggcacctccattgacccctactgcccttgcggcctctatcattccgcctgctcccgctagtgcgcccttggtcttcggggcctgacctctggcttcctctcgtagtcttgtgtgctttgtggagcgtcggggggctcaggcctagggcctttaggtcccgtaggtcatgagtgggactcaggcctaggactcgactcgtcggtcgtgggtgggaggcggactggctccttcctacaccgcggctcggtgctgggcgcagttaatgtggcgtgcgtagtattgatggtgagagcagccctagggccagatgtggaatccactcgagtggctctctggcggttcgtctgatctccttgccaggcttcgcctcgtccgacctctggcgcggtgcataggggtcatctgggtgcagattcacataggcgagcttctccctatcttatctctcactcgtggtctcgtgggggcccggggatccgatccccgacactcgggatatggatcgccgacgtggggaaaggaggcgctggggtggcagctacacccgcgggaggctagggaggcgtaggccgagcgccgatggccgggtgtagggggatgccgccgaccgcaaccgagaaggggaggtctgtcaccggaggaggaggtgcggcagcggccgtaatcgcaatcgtccgcgcgatggctgcagcggtggttggtgcagtggacgttcgtgccgcttgcgtggggagggaggcgagcacatgaaaaggagaaagggagggaggcagtcgtggacgccgagaaggtgcgggcggacgcggtgacgatcgctctgggagatgcaggggaaggagagggaggggttgccggaggactgctccatgacggtggcgatggccgggggtgcgccgacggctagagtgcctggtggttagggaatgtagaggcttgataccatgttggaatagaaaaccctaaccagagttgatagtgcattaatataatagagttaggtgggtctgaggcccattacaatagaggcattacaatagagcatacagttacgctaacagtatcaaatgcctttgaaatctctagcttcaaaaggatgtatggttctttacttttatgtagggtctgagcaagctgctgcacaagtaagaaattgttgtgaatattcctcctaacaaaggcgctctggttgttagaccagcttaggcagcagggtgccaagcgataagcaaaaatcttggttaccaactttgcaaagcttgagttttaggacttgagctttacaagatgagtttacagcttggacttgatcagatcccatctgaggaaaaggatctccagttttggcacttgaattatcaccattgtcgaatagccaccctaaaatcaaagtatttaatttcttctgtgactgctaaaaggttgaaataacttttctaaaagaaaattgcttgtccatgggagacccctgggcattttttagtttataagttagcaaattacatcctgattggtgattggctaggaaaactagctaaatcagtttccagggaggtaaccacaaattgctgagtcctggatttgagcacaggtggccttcctctcaactgggaagtactttctaatttccttttcagatgtagatgtaatatttccaagaagtacaacccttttccttttttccttgcaccaaaccttttgtaactttgttcccagataccgggttctcggtcttgttagaagtatattactaaacaatctatctgcctacactgcattgttcagcagatgctggattagataaaatgtgattttaacaagtactccctatgttccagtttattaggtggtagtgcatttttgagaaagggcagattgttaggcggcatacatagcaaggcattgcattataaattcctgtggaagaaacacagccgttttatccgacccgatccaacaagtgaatgcaatgcaccagatcagtgtggcacctggcgtgaattaaatcttgctcacactctgcatcaacatgggaaataaggactttgtatacatcaggatcatcgagtccaaaatgtgttgttactcttatgttggagattgctccaagtttttggggcagatggaagagaaggcactcaaattttgacaaaagcatcccttttgctttgctcagccaagtagcaggtataagagagtacttcgcagccaatccagccttgacatctgagctgccttcaacagtagtgaagtcaaaagcatctgaaactttgatcatccagagtgaacatgaagattctgaacttggtgatgaattttatgatgcacttactagaggtgaatccttcgaagatggggatagtgatgatgatgatgatgccacaactccaaaggctagaaaagtaaagttgaagaatgtgtcatgggctattgcaggcttggctttaaagacaactaaagctttggttgagacaagtgaattggttacaaattctagtccagttactgttgaccccagccacttccatggcacccttcatagagcgaaaactcaaaatgatcaaaattcttggagtgcacctggtggggagaagtttatgatcagagggaagacttacttaacagattatcacaaggttgttggcggtgatccacttctagagctacttgcggtcgattggttcaaagttaatgaacgctttgattcagttgccttacatcccaaaagccttgtgcaatcagaagctgcaaagaaacttcctttcatattggttataaatttgcaggtgccagcgaaaccaaattataacttggttatgtactacgctgcagagagaccagtgaacaaagattctttgttgggtagattcattgatggaactgatgcataccgagatgccagatttaaacttataccaagcattgttgagggttattggatggttaagcgtgctgtaggaacaaaagcttgccttctgggcaaagcagtaacgtgcaattatcttcgccaggataactttctggagatagatgttgacatcggttcatcatccgttgcccggagcattattggtctagtattgggatatgtcacaagcatagttgttgatcttgctattcttattgaggccaaggaagagaaagagctccccgagtacattctgggcactgttcgtctgaaccgtgtgaatcccgacagtgctgtatcaatctaattacgtttctagccgatctatgcaaatttactcttatcctcttttattctgagagaaacagcgtggcattttgaaaatgtgaaatagcattactatttgctgatccccaatcgagggtaacatatgtaaattggcatgaggcatgactacgtgacgcctttcgtaaatagaataaatcaatggttatgtaatattaatatcccatatacgcgtgtcataatctatgtggcttaaaagtggcatcaagtcatctagtttcctgtgttaacttcttattccttaggtagtcagacattaacagtgtgtttggtttgaggaatgaagtgatccatctttttctcac

SEQ ID NO: 212646 - DNA, 5060 bp, Zea Mays
tgagcctaaccgaccttggtgcagccttcctatccaggttccggataaagcaagggctttcttctcgatggtgttgacttcaaaggttggtaatggggctaatactttgttctggactgataaatggattcatgggcagaaaattgcagatttggttcctagattatttgatatcattccgaaaaaaatcactaacagaaggacggttcaggaagcattgacagatagaagatggattgctgatatcacaggatcactctcggtgggagtattattggattatcttcatctttggaatttaatttcagattttgagctgctgccagatatagaagataaacatacttttagtattgctgcaaatgggacttattctgctaaggctgcatatgatgggttgttcatcggggctgtgcatttcggtcactatgaaagagtttggaaaacttgggccccctctaaatgccacttcttcctctggttatcggtgctaaataaatgctggacaacagataggttggcaaagagaggacttgatcatccggagaagtgtccgctttgtgaccaagagtctgaatctttggatcatattttggtttcttgtgtttttgcgagagaattctggttccggctgaaggttgatgtgcattttcagactacaaaatctggctcctacacctagtacggtgtcttttacgggttggtgggagatgatagacaatggctccggagatatgattatgaagggtgtcaactcccttattgccttgggagcctggattatttggaatcatcggaatcaaattgtctttgatggaatctcccctagtgtttctgcagctctttgtcaggcaagggaggaacaacagttgtgggaaatggcaggagctaagggtctctcctttcttgccgcaaccatcaggggcacctagctgcctggtttatcgctgatgggctggttttgtttttcaggatctgtttgttctttttttgtttttttctcttcttttttctttggtttttttatcccctccggggaggtcttttgtactttggtctattttggaccctcttttccttctacttaatataatgatgtgcagttctcctgcgctttcgagaaaaaaaaacgtcatccgcggcctcaacgaatgctttgccaacattggtcttcacctttgacgtgggcgcctttccccacctttttcgatgcttgctctgagctccttcttgaagtgctcaggccatcagggcacctccattgacccctactgcccttgcggcctctatcattccgcctgctcccgctagtgcgcccttggtcttcggggcctgacctctggcttcctctcgtagtcttgtgtgctttgtggagcgtcggggggctcaggcctagggcctttaggtcccgtaggtcatgagtgggactcaggcctaggactcgactcgtcggtcgtgggtgggaggcggactggctccttcctacaccgcggctcggtgctgggcgcagttaatgtggcgtgcgtagtattgatggtgagagcagccctagggccagatgtggaatccactcgagtggctctctggcggttcgtctgatctccttgccaggcttcgcctcgtccgacctctggcgcggtgcataggggtcatctgggtgcagattcacataggcgagcttctccctatcttatctctcactcgtggtctcgtgggggcccggggatccgatccccgacactcgggatatggatcgccgacgtggggaaaggaggcgctggggtggcagctacacccgcgggaggctagggaggcgtaggccgagcgccgatggccgggtgtagggggatgccgccgaccgcaaccgagaaggggaggtctgtcaccggaggaggaggtgcggcagcggccgtaatcgcaatcgtccgcgcgatggctgcagcggtggttggtgcagtggacgttcgtgccgcttgcgtggggagggaggcgagcacatgaaaaggagaaagggagggaggcagtcgtggacgccgagaaggtgcgggcggacgcggtgacgatcgctctgggagatgcaggggaaggagagggaggggttgccggaggactgctccatgacggtggcgatggccgggggtgcgccgacggctagagtgcctggtggttagggaatgtagaggcttgataccatgttggaatagaaaaccctaaccagagttgatagtgcattaatataatagagttaggtgggtctgaggcccattacaatagaggcattacaatagagcatacagttacgctaacagtatcaaatgcctttgaaatctctagcttcaaaaggatgtatggttctttacttttatgtagggtctgagcaagctgctgcacaagtaagaaattgttgtgaatattcctcctaacaaaggcgctctggttgttagaccagcttaggcagcagggtgccaagcgataagcaaaaatcttggttaccaactttgcaaagcttgagttttaggacttgagctttacaagatgagtttacagcttggacttgatcagatcccatctgaggaaaaggatctccagttttggcacttgaattatcaccattgtcgaatagccaccctaaaatcaaagtatttaatttcttctgtgactgctaaaaggttgaaataacttttctaaaagaaaattgcttgtccatgggagacccctgggcattttttagtttataagttagcaaattacatcctgattggtgattggctaggaaaactagctaaatcagtttccagggaggtaaccacaaattgctgagtcctggatttgagcacaggtggccttcctctcaactgggaagtactttctaatttccttttcagatgtagatgtaatatttccaagaagtacaacccttttccttttttccttgcaccaaaccttttgtaactttgttcccagataccgggttctcggtcttgttagaagtatattactaaacaatctatctgcctacactgcattgttcagcagatgctggattagataaaatgtgattttaacaagtactccctatgttccagtttattaggtggtagtgcatttttgagaaagggcagattgttaggcggcatacatagcaaggcattgcattataaattcctgtggaagaaacacagccgttttatccgacccgatccaacaagtgaatgcaatgcaccagatcagtgtggcacctggcgtgaattaaatcttgctcacactctggtgtgtgtactcttagcgcctttaaattgggtgtggagggagtgtatatgggtgcaaaaataacatagctttgtacaagtaaacaaacatggttggacatcacttttacctaagatttttattgaggactaactgtctctgcttcttacatcctagactgaaaattttccattagatgtccacattgccttggaatgtattgattgtgctatctctttcagcatcaacatgggaaataaggactttgtatacatcaggatcatcgagtccaaaatgtgttgttactcttatgttggagattgctccaagtttttggggcagatggaagagaaggcactcaaattttgacaaaagcatcccttttgctttgctcagccaagtagcaggtataagagagtacttcgcagccaatccagccttgacatctgagctgccttcaacagtagtgaagtcaaaagcatctgaaactttgatcatccagagtgaacatgaagattctgaacttggtgatgaattttatgatgcacttactagaggtgaatccttcgaagatggggatagtgatgatgatgatgatgccacaactccaaagctttggttgagacaagtgaattggttacaaattctagtccagttactgttgaccccagccacttccatggcacccttcatagagcgaaaactcaaaatgatcaaaattcttggagtgcacctggtggggagaagtttatgatcagagggaagacttacttaacagattatcacaaggaagctgacaagatgtggtcttttgagatgggttaagaaattagtgaacgaattgcctagctggaaggcttctctcaatcttgctggaaggactgctatggttgttggcggtgatccacttctagagctacttgcggtcgattggttcaaagttaatgaacgctttgattcagttgccttacatcccaaaagccttgtgcaatcagaagctgcaaagaaacttcctttcatattggttataaatttgcaggtgccagcgaaaccaaattataacttggttatgtactacgctgcagagagaccagtgaacaaagattctttgttgggtagattcattgatggaactgatgcataccgagatgccagatttaaacttataccaagcattgttgagggttattggatggttaagcgtgctgtaggaacaaaagcttgccttctgggcaaagcagtaacgtgcaattatcttcgccaggataactttctggagatagatgttgacatcggttcatcatccgttgcccggagcattattggtctagtattgggatatgtcacaagcatagttgttgatcttgctattcttattgaggccaaggaagagaaagagctccccgagtacattctgggcactgttcgtctgaaccgtgtgaatcccgacagtgctgtatcaatctaattacgtttctagccgatctatgcaaatttactcttatcctcttttattctgagagaaacagcgtggcattttgaaaatgtgaaatagcattactatttgctgatccccaatcgagggtaacatatgtaaattggcatgaggcatgactacgtgacgcctttcgtaaatagaataaatcaatggttatgtaatattaatatcccatatacgcgtgtcataatctatgtggcttaaaagtggcatcaagtcatctagtttcctgtgttaacttcttattccttaggtagtcagacattaacagtgtgtttggtttgaggaatgaagtgatccatctttttctcac

SEQ ID NO: 212647 - DNA, 5023 bp, Zea Mays
tgagcctaaccgaccttggtgcagccttcctatccaggttccggataaagcaagggctttcttctcgatggtgttgacttcaaaggttggtaatggggctaatactttgttctggactgataaatggattcatgggcagaaaattgcagatttggttcctagattatttgatatcattccgaaaaaaatcactaacagaaggacggttcaggaagcattgacagatagaagatggattgctgatatcacaggatcactctcggtgggagtattattggattatcttcatctttggaatttaatttcagattttgagctgctgccagatatagaagataaacatacttttagtattgctgcaaatgggacttattctgctaaggctgcatatgatgggttgttcatcggggctgtgcatttcggtcactatgaaagagtttggaaaacttgggccccctctaaatgccacttcttcctctggttatcggtgctaaataaatgctggacaacagataggttggcaaagagaggacttgatcatccggagaagtgtccgctttgtgaccaagagtctgaatctttggatcatattttggtttcttgtgtttttgcgagagaattctggttccggctgaaggttgatgtgcattttcagactacaaaatctggctcctacacctagtacggtgtcttttacgggttggtgggagatgatagacaatggctccggagatatgattatgaagggtgtcaactcccttattgccttgggagcctggattatttggaatcatcggaatcaaattgtctttgatggaatctcccctagtgtttctgcagctctttgtcaggcaagggaggaacaacagttgtgggaaatggcaggagctaagggtctctcctttcttgccgcaaccatcaggggcacctagctgcctggtttatcgctgatgggctggttttgtttttcaggatctgtttgttctttttttgtttttttctcttcttttttctttggtttttttatcccctccggggaggtcttttgtactttggtctattttggaccctcttttccttctacttaatataatgatgtgcagttctcctgcgctttcgagaaaaaaaaacgtcatccgcggcctcaacgaatgctttgccaacattggtcttcacctttgacgtgggcgcctttccccacctttttcgatgcttgctctgagctccttcttgaagtgctcaggccatcagggcacctccattgacccctactgcccttgcggcctctatcattccgcctgctcccgctagtgcgcccttggtcttcggggcctgacctctggcttcctctcgtagtcttgtgtgctttgtggagcgtcggggggctcaggcctagggcctttaggtcccgtaggtcatgagtgggactcaggcctaggactcgactcgtcggtcgtgggtgggaggcggactggctccttcctacaccgcggctcggtgctgggcgcagttaatgtggcgtgcgtagtattgatggtgagagcagccctagggccagatgtggaatccactcgagtggctctctggcggttcgtctgatctccttgccaggcttcgcctcgtccgacctctggcgcggtgcataggggtcatctgggtgcagattcacataggcgagcttctccctatcttatctctcactcgtggtctcgtgggggcccggggatccgatccccgacactcgggatatggatcgccgacgtggggaaaggaggcgctggggtggcagctacacccgcgggaggctagggaggcgtaggccgagcgccgatggccgggtgtagggggatgccgccgaccgcaaccgagaaggggaggtctgtcaccggaggaggaggtgcggcagcggccgtaatcgcaatcgtccgcgcgatggctgcagcggtggttggtgcagtggacgttcgtgccgcttgcgtggggagggaggcgagcacatgaaaaggagaaagggagggaggcagtcgtggacgccgagaaggtgcgggcggacgcggtgacgatcgctctgggagatgcaggggaaggagagggaggggttgccggaggactgctccatgacggtggcgatggccgggggtgcgccgacggctagagtgcctggtggttagggaatgtagaggcttgataccatgttggaatagaaaaccctaaccagagttgatagtgcattaatataatagagttaggtgggtctgaggcccattacaatagaggcattacaatagagcatacagttacgctaacagtatcaaatgcctttgaaatctctagcttcaaaaggatgtatggttctttacttttatgtagggtctgagcaagctgctgcacaagtaagaaattgttgtgaatattcctcctaacaaaggcgctctggttgttagaccagcttaggcagcagggtgccaagcgataagcaaaaatcttggttaccaactttgcaaagcttgagttttaggacttgagctttacaagatgagtttacagcttggacttgatcagatcccatctgaggaaaaggatctccagttttggcacttgaattatcaccattgtcgaatagccaccctaaaatcaaagtatttaatttcttctgtgactgctaaaaggttgaaataacttttctaaaagaaaattgcttgtccatgggagacccctgggcattttttagtttataagttagcaaattacatcctgattggtgattggctaggaaaactagctaaatcagtttccagggaggtaaccacaaattgctgagtcctggatttgagcacaggtggccttcctctcaactgggaagtactttctaatttccttttcagatgtagatgtaatatttccaagaagtacaacccttttccttttttccttgcaccaaaccttttgtaactttgttcccagataccgggttctcggtcttgttagaagtatattactaaacaatctatctgcctacactgcattgttcagcagatgctggattagataaaatgtgattttaacaagtactccctatgttccagtttattaggtggtagtgcatttttgagaaagggcagattgttaggcggcatacatagcaaggcattgcattataaattcctgtggaagaaacacagccgttttatccgacccgatccaacaagtgaatgcaatgcaccagatcagtgtggcacctggcgtgaattaaatcttgctcacactctggtgtgtgtactcttagcgcctttaaattgggtgtggagggagtgtatatgggtgcaaaaataacatagctttgtacaagtaaacaaacatggttggacatcacttttacctaagatttttattgaggactaactgtctctgcttcttacatcctagactgaaaattttccattagatgtccacattgccttggaatgtattgattgtgctatctctttcagcatcaacatgggaaataaggactttgtatacatcaggatcatcgagtccaaaatgtgttgttactcttatgttggagattgctccaagtttttggggcagatggaagagaaggcactcaaattttgacaaaagcatcccttttgctttgctcagccaagtagcaggtataagagagtacttcgcagccaatccagccttgacatctgagctgccttcaacagtagtgaagtcaaaagcatctgaaactttgatcatccagagtgaacatgaagattctgaacttggtgatgaattttatgatgcacttactagaggtgaatccttcgaagatggggatagtgatgatgatgatgatgccacaactccaaaggctagaaaagtaaagttgaagaatgtgtcatgggctattgcaggcttggctttaaagacaactaaagctttggttgagacaagtgaattggttacaaattctagtccagttactgttgaccccagccacttccatggcacccttcatagagcgaaaactcaaaatgatcaaaattcttggagtgcacctggtggggagaagtttatgatcagagggaagacttacttaacagattatcacaaggttgttggcggtgatccacttctagagctacttgcggtcgattggttcaaagttaatgaacgctttgattcagttgccttacatcccaaaagccttgtgcaatcagaagctgcaaagaaacttcctttcatattggttataaatttgcaggtgccagcgaaaccaaattataacttggttatgtactacgctgcagagagaccagtgaacaaagattctttgttgggtagattcattgatggaactgatgcataccgagatgccagatttaaacttataccaagcattgttgagggttattggatggttaagcgtgctgtaggaacaaaagcttgccttctgggcaaagcagtaacgtgcaattatcttcgccaggataactttctggagatgttgacatcggttcatcatccgttgcccggagcattattggtctagtattgggatatgtcacaagcatagttgttgatcttgctattcttattgaggccaaggaagagaaagagctccccgagtacattctgggcactgttcgtctgaaccgtgtgaatcccgacagtgctgtatcaatctaattacgtttctagccgatctatgcaaatttactcttatcctcttttattctgagagaaacagcgtggcattttgaaaatgtgaaatagcattactatttgctgatccccaatcgagggtaacatatgtaaattggcatgaggcatgactacgtgacgcctttcgtaaatagaataaatcaatggttatgtaatattaatatcccatatacgcgtgtcataatctatgtggcttaaaagtggcatcaagtcatctagtttcctgtgttaacttcttattccttaggtagtcagacattaacagtgtgtttggtttgaggaatgaagtgatccatctttttctcac

SEQ ID NO: 212648 - DNA, 4906 bp, Zea Mays
tgagcctaaccgaccttggtgcagccttcctatccaggttccggataaagcaagggctttcttctcgatggtgttgacttcaaaggttggtaatggggctaatactttgttctggactgataaatggattcatgggcagaaaattgcagatttggttcctagattatttgatatcattccgaaaaaaatcactaacagaaggacggttcaggaagcattgacagatagaagatggattgctgatatcacaggatcactctcggtgggagtattattggattatcttcatctttggaatttaatttcagattttgagctgctgccagatatagaagataaacatacttttagtattgctgcaaatgggacttattctgctaaggctgcatatgatgggttgttcatcggggctgtgcatttcggtcactatgaaagagtttggaaaacttgggccccctctaaatgccacttcttcctctggttatcggtgctaaataaatgctggacaacagataggttggcaaagagaggacttgatcatccggagaagtgtccgctttgtgaccaagagtctgaatctttggatcatattttggtttcttgtgtttttgcgagagaattctggttccggctgaaggttgatgtgcattttcagactacaaaatctggctcctacacctagtacggtgtcttttacgggttggtgggagatgatagacaatggctccggagatatgattatgaagggtgtcaactcccttattgccttgggagcctggattatttggaatcatcggaatcaaattgtctttgatggaatctcccctagtgtttctgcagctctttgtcaggcaagggaggaacaacagttgtgggaaatggcaggagctaagggtctctcctttcttgccgcaaccatcaggggcacctagctgcctggtttatcgctgatgggctggttttgtttttcaggatctgtttgttctttttttgtttttttctcttcttttttctttggtttttttatcccctccggggaggtcttttgtactttggtctattttggaccctcttttccttctacttaatataatgatgtgcagttctcctgcgctttcgagaaaaaaaaacgtcatccgcggcctcaacgaatgctttgccaacattggtcttcacctttgacgtgggcgcctttccccacctttttcgatgcttgctctgagctccttcttgaagtgctcaggccatcagggcacctccattgacccctactgcccttgcggcctctatcattccgcctgctcccgctagtgcgcccttggtcttcggggcctgacctctggcttcctctcgtagtcttgtgtgctttgtggagcgtcggggggctcaggcctagggcctttaggtcccgtaggtcatgagtgggactcaggcctaggactcgactcgtcggtcgtgggtgggaggcggactggctccttcctacaccgcggctcggtgctgggcgcagttaatgtggcgtgcgtagtattgatggtgagagcagccctagggccagatgtggaatccactcgagtggctctctggcggttcgtctgatctccttgccaggcttcgcctcgtccgacctctggcgcggtgcataggggtcatctgggtgcagattcacataggcgagcttctccctatcttatctctcactcgtggtctcgtgggggcccggggatccgatccccgacactcgggatatggatcgccgacgtggggaaaggaggcgctggggtggcagctacacccgcgggaggctagggaggcgtaggccgagcgccgatggccgggtgtagggggatgccgccgaccgcaaccgagaaggggaggtctgtcaccggaggaggaggtgcggcagcggccgtaatcgcaatcgtccgcgcgatggctgcagcggtggttggtgcagtggacgttcgtgccgcttgcgtggggagggaggcgagcacatgaaaaggagaaagggagggaggcagtcgtggacgccgagaaggtgcgggcggacgcggtgacgatcgctctgggagatgcaggggaaggagagggaggggttgccggaggactgctccatgacggtggcgatggccgggggtgcgccgacggctagagtgcctggtggttagggaatgtagaggcttgataccatgttggaatagaaaaccctaaccagagttgatagtgcattaatataatagagttaggtgggtctgaggcccattacaatagaggcattacaatagagcatacagttacgctaacagtatcaaatgcctttgaaatctctagcttcaaaaggatgtatggttctttacttttatgtagggtctgagcaagctgctgcacaagtaagaaattgttgtgaatattcctcctaacaaaggcgctctggttgttagaccagcttaggcagcagggtgccaagcgataagcaaaaatcttggttaccaactttgcaaagcttgagttttaggacttgagctttacaagatgagtttacagcttggacttgatcagatcccatctgaggaaaaggatctccagttttggcacttgaattatcaccattgtcgaatagccaccctaaaatcaaagtatttaatttcttctgtgactgctaaaaggttgaaataacttttctaaaagaaaattgcttgtccatgggagacccctgggcattttttagtttataagttagcaaattacatcctgattggtgattggctaggaaaactagctaaatcagtttccagggaggtaaccacaaattgctgagtcctggatttgagcacaggtggccttcctctcaactgggaagtactttctaatttccttttcagatgtagatgtaatatttccaagaagtacaacccttttccttttttccttgcaccaaaccttttgtaactttgttcccagataccgggttctcggtcttgttagaagtatattactaaacaatctatctgcctacactgcattgttcagcagatgctggattagataaaatgtgattttaacaagtactccctatgttccagtttattaggtggtagtgcatttttgagaaagggcagattgttaggcggcatacatagcaaggcattgcattataaattcctgtggaagaaacacagccgttttatccgacccgatccaacaagtgaatgcaatgcaccagatcagtgtggcacctggcgtgaattaaatcttgctcacactctgcatcaacatgggaaataaggactttgtatacatcaggatcatcgagtccaaaatgtgttgttactcttatgttggagattgctccaagtttttggggcagatggaagagaaggcactcaaattttgacaaaagcatcccttttgctttgctcagccaagtagcaggtataagagagtacttcgcagccaatccagccttgacatctgagctgccttcaacagtagtgaagtcaaaagcatctgaaactttgatcatccagagtgaacatgaagattctgaacttggtgatgaattttatgatgcacttactagaggtgaatccttcgaagatggggatagtgatgatgatgatgatgccacaactccaaaggctagaaaagtaaagttgaagaatgtgtcatgggctattgcaggcttggctttaaagacaactaaagctttggttgagacaagtgaattggttacaaattctagtccagttactgttgaccccagccacttccatggcacccttcatagagcgaaaactcaaaatgatcaaaattcttggagtgcacctggtggggagaagtttatgatcagagggaagacttacttaacagattatcacaaggaagctgacaagatgtggtcttttgagatgggttaagaaattagtgaacgaattgcctagctggaaggcttctctcaatcttgctggaaggactgctatggttgttggcggtgatccacttctagagctacttgcggtcgattggttcaaagttaatgaacgctttgattcagttgccttacatcccaaaagccttgtgcaatcagaagctgcaaagaaacttcctttcatattggttataaatttgcaggtgccagcgaaaccaaattataacttggttatgtactacgctgcagagagaccagtgaacaaagattctttgttgggtagattcattgatggaactgatgcataccgagatgccagatttaaacttataccaagcattgttgagggttattggatggttaagcgtgctgtaggaacaaaagcttgccttctgggcaaagcagtaacgtgcaattatcttcgccaggataactttctggagatagatgttgacatcggttcatcatccgttgcccggagcattattggtctagtattgggatatgtcacaagcatagttgttgatcttgctattcttattgaggccaaggaagagaaagagctccccgagtacattctgggcactgttcgtctgaaccgtgtgaatcccgacagtgctgtatcaatctaattacgtttctagccgatctatgcaaatttactcttatcctcttttattctgagagaaacagcgtggcattttgaaaatgtgaaatagcattactatttgctgatccccaatcgagggtaacatatgtaaattggcatgaggcatgactacgtgacgcctttcgtaaatagaataaatcaatggttatgtaatattaatatcccatatacgcgtgtcataatctatgtggcttaaaagtggcatcaagtcatctagtttcctgtgttaacttcttattccttaggtagtcagacattaacagtgtgtttggtttgaggaatgaagtgatccatctttttctcac

SEQ ID NO: 212649 - DNA, 4630 bp, Zea Mays
tgagcctaaccgaccttggtgcagccttcctatccaggttccggataaagcaagggctttcttctcgatggtgttgacttcaaaggttggtaatggggctaatactttgttctggactgataaatggattcatgggcagaaaattgcagatttggttcctagattatttgatatcattccgaaaaaaatcactaacagaaggacggttcaggaagcattgacagatagaagatggattgctgatatcacaggatcactctcggtgggagtattattggattatcttcatctttggaatttaatttcagattttgagctgctgccagatatagaagataaacatacttttagtattgctgcaaatgggacttattctgctaaggctgcatatgatgggttgttcatcggggctgtgcatttcggtcactatgaaagagtttggaaaacttgggccccctctaaatgccacttcttcctctggttatcggtgctaaataaatgctggacaacagataggttggcaaagagaggacttgatcatccggagaagtgtccgctttgtgaccaagagtctgaatctttggatcatattttggtttcttgtgtttttgcgagagaattctggttccggctgaaggttgatgtgcattttcagactacaaaatctggctcctacacctagtacggtgtcttttacgggttggtgggagatgatagacaatggctccggagatatgattatgaagggtgtcaactcccttattgccttgggagcctggattatttggaatcatcggaatcaaattgtctttgatggaatctcccctagtgtttctgcagctctttgtcaggcaagggaggaacaacagttgtgggaaatggcaggagctaagggtctctcctttcttgccgcaaccatcaggggcacctagctgcctggtttatcgctgatgggctggttttgtttttcaggatctgtttgttctttttttgtttttttctcttcttttttctttggtttttttatcccctccggggaggtcttttgtactttggtctattttggaccctcttttccttctacttaatataatgatgtgcagttctcctgcgctttcgagaaaaaaaaacgtcatccgcggcctcaacgaatgctttgccaacattggtcttcacctttgacgtgggcgcctttccccacctttttcgatgcttgctctgagctccttcttgaagtgctcaggccatcagggcacctccattgacccctactgcccttgcggcctctatcattccgcctgctcccgctagtgcgcccttggtcttcggggcctgacctctggcttcctctcgtagtcttgtgtgctttgtggagcgtcggggggctcaggcctagggcctttaggtcccgtaggtcatgagtgggactcaggcctaggactcgactcgtcggtcgtgggtgggaggcggactggctccttcctacaccgcggctcggtgctgggcgcagttaatgtggcgtgcgtagtattgatggtgagagcagccctagggccagatgtggaatccactcgagtggctctctggcggttcgtctgatctccttgccaggcttcgcctcgtccgacctctggcgcggtgcataggggtcatctgggtgcagattcacataggcgagcttctccctatcttatctctcactcgtggtctcgtgggggcccggggatccgatccccgacactcgggatatggatcgccgacgtggggaaaggaggcgctggggtggcagctacacccgcgggaggctagggaggcgtaggccgagcgccgatggccgggtgtagggggatgccgccgaccgcaaccgagaaggggaggtctgtcaccggaggaggaggtgcggcagcggccgtaatcgcaatcgtccgcgcgatggctgcagcggtggttggtgcagtggacgttcgtgccgcttgcgtggggagggaggcgagcacatgaaaaggagaaagggagggaggcagtcgtggacgccgagaaggtgcgggcggacgcggtgacgatcgctctgggagatgcaggggaaggagagggaggggttgccggaggactgctccatgacggtggcgatggccgggggtgcgccgacggctagagtgcctggtggttagggaatgtagaggcttgataccatgttggaatagaaaaccctaaccagagttgatagtgcattaatataatagagttaggtgggtctgaggcccattacaatagaggcattacaatagagcatacagttacgctaacagtatcaaatgcctttgaaatctctagcttcaaaaggatgtatggttctttacttttatgtagggtctgagcaagctgctgcacaagtaagaaattgttgtgaatattcctcctaacaaaggcgctctggttgttagaccagcttaggcagcagggtgccaagcgataagcaaaaatcttggttaccaactttgcaaagcttgagttttaggacttgagctttacaagatgagtttacagcttggacttgatcagatcccatctgaggaaaaggatctccagttttggcacttgaattatcaccattgtcgaatagccaccctaaaatcaaagtatttaatttcttctgtgactgctaaaaggttgaaataacttttctaaaagaaaattgcttgtccatgggagacccctgggcattttttagtttataagttagcaaattacatcctgattggtgattggctaggaaaactagctaaatcagtttccagggaggtaaccacaaattgctgagtcctggatttgagcacaggtggccttcctctcaactgggaagtactttctaatttccttttcagatgtagatgtaatatttccaagaagtacaacccttttccttttttccttgcaccaaaccttttgtaactttgttcccagataccgggttctcggtcttgttagaagtatattactaaacaatctatctgcctacactgcattgttcagcagatgctggattagataaaatgtgattttaacaagtactccctatgttccagtttattaggtggtagtgcatttttgagaaagggcagattgttaggcggcatacatagcaaggcattgcattataaattcctgtggaagaaacacagccgttttatccgacccgatccaacaagtgaatgcaatgcaccagatcagtgtggcacctggcgtgaattaaatcttgctcacactctgcatcaacatgggaaataaggactttgtatacatcaggatcatcgagtccaaaatgtgttgttactcttatgttggagattgctccaagtttttggggcagatggaagagaaggcactcaaattttgacaaaagcatcccttttgctttgctcagccaagtagcaggtataagagagtacttcgcagccaatccagccttgacatctgagctgccttcaacagtagtgaagtcaaaagcatctgaaactttgatcatccagagtgaacatgaagattctgaacttggtgatgaattttatgatgcacttactagaggtgaatccttcgaagatggggatagtgatgatgatgatgatgccacaactccaaaggctagaaaagtaaagttgaagaatgtgtcatgggctattgcaggcttggctttaaagacaactaaaggttgttggcggtgatccacttctagagctacttgcggtcgattggttcaaagttaatgaacgctttgattcagttgccttacatcccaaaagccttgtgcaatcagaagctgcaaagaaacttcctttcatattggttataaatttgcaggtgccagcgaaaccaaattataacttggttatgtactacgctgcagagagaccagtgaacaaagattctttgttgggtagattcattgatggaactgatgcataccgagatgccagatttaaacttataccaagcattgttgagggttattggatggttaagcgtgctgtaggaacaaaagcttgccttctgggcaaagcagtaacgtgcaattatcttcgccaggataactttctggagatagatgttgacatcggttcatcatccgttgcccggagcattattggtctagtattgggatatgtcacaagcatagttgttgatcttgctattcttattgaggccaaggaagagaaagagctccccgagtacattctgggcactgttcgtctgaaccgtgtgaatcccgacagtgctgtatcaatctaattacgtttctagccgatctatgcaaatttactcttatcctcttttattctgagagaaacagcgtggcattttgaaaatgtgaaatagcattactatttgctgatccccaatcgagggtaacatatgtaaattggcatgaggcatgactacgtgacgcctttcgtaaatagaataaatcaatggttatgtaatattaatatcccatatacgcgtgtcataatctatgtggcttaaaagtggcatcaagtcatctagtttcctgtgttaacttcttattccttaggtagtcagacattaacagtgtgtttggtttgaggaatgaagtgatccatctttttctcac

SEQ ID NO: 212650 - DNA, 4626 bp, Zea Mays
tgagcctaaccgaccttggtgcagccttcctatccaggttccggataaagcaagggctttcttctcgatggtgttgacttcaaaggttggtaatggggctaatactttgttctggactgataaatggattcatgggcagaaaattgcagatttggttcctagattatttgatatcattccgaaaaaaatcactaacagaaggacggttcaggaagcattgacagatagaagatggattgctgatatcacaggatcactctcggtgggagtattattggattatcttcatctttggaatttaatttcagattttgagctgctgccagatatagaagataaacatacttttagtattgctgcaaatgggacttattctgctaaggctgcatatgatgggttgttcatcggggctgtgcatttcggtcactatgaaagagtttggaaaacttgggccccctctaaatgccacttcttcctctggttatcggtgctaaataaatgctggacaacagataggttggcaaagagaggacttgatcatccggagaagtgtccgctttgtgaccaagagtctgaatctttggatcatattttggtttcttgtgtttttgcgagagaattctggttccggctgaaggttgatgtgcattttcagactacaaaatctggctcctacacctagtacggtgtcttttacgggttggtgggagatgatagacaatggctccggagatatgattatgaagggtgtcaactcccttattgccttgggagcctggattatttggaatcatcggaatcaaattgtctttgatggaatctcccctagtgtttctgcagctctttgtcaggcaagggaggaacaacagttgtgggaaatggcaggagctaagggtctctcctttcttgccgcaaccatcaggggcacctagctgcctggtttatcgctgatgggctggttttgtttttcaggatctgtttgttctttttttgtttttttctcttcttttttctttggtttttttatcccctccggggaggtcttttgtactttggtctattttggaccctcttttccttctacttaatataatgatgtgcagttctcctgcgctttcgagaaaaaaaaacgtcatccgcggcctcaacgaatgctttgccaacattggtcttcacctttgacgtgggcgcctttccccacctttttcgatgcttgctctgagctccttcttgaagtgctcaggccatcagggcacctccattgacccctactgcccttgcggcctctatcattccgcctgctcccgctagtgcgcccttggtcttcggggcctgacctctggcttcctctcgtagtcttgtgtgctttgtggagcgtcggggggctcaggcctagggcctttaggtcccgtaggtcatgagtgggactcaggcctaggactcgactcgtcggtcgtgggtgggaggcggactggctccttcctacaccgcggctcggtgctgggcgcagttaatgtggcgtgcgtagtattgatggtgagagcagccctagggccagatgtggaatccactcgagtggctctctggcggttcgtctgatctccttgccaggcttcgcctcgtccgacctctggcgcggtgcataggggtcatctgggtgcagattcacataggcgagcttctccctatcttatctctcactcgtggtctcgtgggggcccggggatccgatccccgacactcgggatatggatcgccgacgtggggaaaggaggcgctggggtggcagctacacccgcgggaggctagggaggcgtaggccgagcgccgatggccgggtgtagggggatgccgccgaccgcaaccgagaaggggaggtctgtcaccggaggaggaggtgcggcagcggccgtaatcgcaatcgtccgcgcgatggctgcagcggtggttggtgcagtggacgttcgtgccgcttgcgtggggagggaggcgagcacatgaaaaggagaaagggagggaggcagtcgtggacgccgagaaggtgcgggcggacgcggtgacgatcgctctgggagatgcaggggaaggagagggaggggttgccggaggactgctccatgacggtggcgatggccgggggtgcgccgacggctagagtgcctggtggttagggaatgtagaggcttgataccatgttggaatagaaaaccctaaccagagttgatagtgcattaatataatagagttaggtgggtctgaggcccattacaatagaggcattacaatagagcatacagttacgctaacagtatcaaatgcctttgaaatctctagcttcaaaaggatgtatggttctttacttttatgtagggtctgagcaagctgctgcacaagtaagaaattgttgtgaatattcctcctaacaaaggcgctctggttgttagaccagcttaggcagcagggtgccaagcgataagcaaaaatcttggttaccaactttgcaaagcttgagttttaggacttgagctttacaagatgagtttacagcttggacttgatcagatcccatctgaggaaaaggatctccagttttggcacttgaattatcaccattgtcgaatagccaccctaaaatcaaagtatttaatttcttctgtgactgctaaaaggttgaaataacttttctaaaagaaaattgcttgtccatgggagacccctgggcattttttagtttataagttagcaaattacatcctgattggtgattggctaggaaaactagctaaatcagtttccagggaggtaaccacaaattgctgagtcctggatttgagcacaggtggccttcctctcaactgggaagtactttctaatttccttttcagatgtagatgtaatatttccaagaagtacaacccttttccttttttccttgcaccaaaccttttgtaactttgttcccagataccgggttctcggtcttgttagaagtatattactaaacaatctatctgcctacactgcattgttcagcagatgctggattagataaaatgtgattttaacaagtactccctatgttccagtttattaggtggtagtgcatttttgagaaagggcagattgttaggcggcatacatagcaaggcattgcattataaattcctgtggaagaaacacagccgttttatccgacccgatccaacaagtgaatgcaatgcaccagatcagtgtggcacctggcgtgaattaaatcttgctcacactctgcatcaacatgggaaataaggactttgtatacatcaggatcatcgagtccaaaatgtgttgttactcttatgttggagattgctccaagtttttggggcagatggaagagaaggcactcaaattttgacaaaagcatcccttttgctttgctcagccaagtagcaggtataagagagtacttcgcagccaatccagccttgacatctgagctgccttcaacagtagtgaagtcaaaagcatctgaaactttgatcatccagagtgaacatgaagattctgaacttggtgatgaattttatgatgcacttactagaggtgaatccttcgaagatggggatagtgatgatgatgatgatgccacaactccaaaggctagaaaagtaaagttgaagaatgtgtcatgggctattgcaggcttggctttaaagacaactaaaggttgttggcggtgatccacttctagagctacttgcggtcgattggttcaaagttaatgaacgctttgattcagttgccttacatcccaaaagccttgtgcaatcagaagctgcaaagaaacttcctttcatattggttataaatttgcaggtgccagcgaaaccaaattataacttggttatgtactacgctgcagagagaccagtgaacaaagattctttgttgggtagattcattgatggaactgatgcataccgagatgccagatttaaacttataccaagcattgttgagggttattggatggttaagcgtgctgtaggaacaaaagcttgccttctgggcaaagcagtaacgtgcaattatcttcgccaggataactttctggagatgttgacatcggttcatcatccgttgcccggagcattattggtctagtattgggatatgtcacaagcatagttgttgatcttgctattcttattgaggccaaggaagagaaagagctccccgagtacattctgggcactgttcgtctgaaccgtgtgaatcccgacagtgctgtatcaatctaattacgtttctagccgatctatgcaaatttactcttatcctcttttattctgagagaaacagcgtggcattttgaaaatgtgaaatagcattactatttgctgatccccaatcgagggtaacatatgtaaattggcatgaggcatgactacgtgacgcctttcgtaaatagaataaatcaatggttatgtaatattaatatcccatatacgcgtgtcataatctatgtggcttaaaagtggcatcaagtcatctagtttcctgtgttaacttcttattccttaggtagtcagacattaacagtgtgtttggtttgaggaatgaagtgatccatctttttctcac

SEQ ID NO: 212651 - DNA, 5123 bp, Zea Mays
tgagcctaaccgaccttggtgcagccttcctatccaggttccggataaagcaagggctttcttctcgatggtgttgacttcaaaggttggtaatggggctaatactttgttctggactgataaatggattcatgggcagaaaattgcagatttggttcctagattatttgatatcattccgaaaaaaatcactaacagaaggacggttcaggaagcattgacagatagaagatggattgctgatatcacaggatcactctcggtgggagtattattggattatcttcatctttggaatttaatttcagattttgagctgctgccagatatagaagataaacatacttttagtattgctgcaaatgggacttattctgctaaggctgcatatgatgggttgttcatcggggctgtgcatttcggtcactatgaaagagtttggaaaacttgggccccctctaaatgccacttcttcctctggttatcggtgctaaataaatgctggacaacagataggttggcaaagagaggacttgatcatccggagaagtgtccgctttgtgaccaagagtctgaatctttggatcatattttggtttcttgtgtttttgcgagagaattctggttccggctgaaggttgatgtgcattttcagactacaaaatctggctcctacacctagtacggtgtcttttacgggttggtgggagatgatagacaatggctccggagatatgattatgaagggtgtcaactcccttattgccttgggagcctggattatttggaatcatcggaatcaaattgtctttgatggaatctcccctagtgtttctgcagctctttgtcaggcaagggaggaacaacagttgtgggaaatggcaggagctaagggtctctcctttcttgccgcaaccatcaggggcacctagctgcctggtttatcgctgatgggctggttttgtttttcaggatctgtttgttctttttttgtttttttctcttcttttttctttggtttttttatcccctccggggaggtcttttgtactttggtctattttggaccctcttttccttctacttaatataatgatgtgcagttctcctgcgctttcgagaaaaaaaaacgtcatccgcggcctcaacgaatgctttgccaacattggtcttcacctttgacgtgggcgcctttccccacctttttcgatgcttgctctgagctccttcttgaagtgctcaggccatcagggcacctccattgacccctactgcccttgcggcctctatcattccgcctgctcccgctagtgcgcccttggtcttcggggcctgacctctggcttcctctcgtagtcttgtgtgctttgtggagcgtcggggggctcaggcctagggcctttaggtcccgtaggtcatgagtgggactcaggcctaggactcgactcgtcggtcgtgggtgggaggcggactggctccttcctacaccgcggctcggtgctgggcgcagttaatgtggcgtgcgtagtattgatggtgagagcagccctagggccagatgtggaatccactcgagtggctctctggcggttcgtctgatctccttgccaggcttcgcctcgtccgacctctggcgcggtgcataggggtcatctgggtgcagattcacataggcgagcttctccctatcttatctctcactcgtggtctcgtgggggcccggggatccgatccccgacactcgggatatggatcgccgacgtggggaaaggaggcgctggggtggcagctacacccgcgggaggctagggaggcgtaggccgagcgccgatggccgggtgtagggggatgccgccgaccgcaaccgagaaggggaggtctgtcaccggaggaggaggtgcggcagcggccgtaatcgcaatcgtccgcgcgatggctgcagcggtggttggtgcagtggacgttcgtgccgcttgcgtggggagggaggcgagcacatgaaaaggagaaagggagggaggcagtcgtggacgccgagaaggtgcgggcggacgcggtgacgatcgctctgggagatgcaggggaaggagagggaggggttgccggaggactgctccatgacggtggcgatggccgggggtgcgccgacggctagagtgcctggtggttagggaatgtagaggcttgataccatgttggaatagaaaaccctaaccagagttgatagtgcattaatataatagagttaggtgggtctgaggcccattacaatagaggcattacaatagagcatacagttacgctaacagtatcaaatgcctttgaaatctctagcttcaaaaggatgtatggttctttacttttatgtagggtctgagcaagctgctgcacaagtaagaaattgttgtgaatattcctcctaacaaaggcgctctggttgttagaccagcttaggcagcagggtgccaagcgataagcaaaaatcttggttaccaactttgcaaagcttgagttttaggacttgagctttacaagatgagtttacagcttggacttgatcagatcccatctgaggaaaaggatctccagttttggcacttgaattatcaccattgtcgaatagccaccctaaaatcaaagtatttaatttcttctgtgactgctaaaaggttgaaataacttttctaaaagaaaattgcttgtccatgggagacccctgggcattttttagtttataagttagcaaattacatcctgattggtgattggctaggaaaactagctaaatcagtttccagggaggtaaccacaaattgctgagtcctggatttgagcacaggtggccttcctctcaactgggaagtactttctaatttccttttcagatgtagatgtaatatttccaagaagtacaacccttttccttttttccttgcaccaaaccttttgtaactttgttcccagataccgggttctcggtcttgttagaagtatattactaaacaatctatctgcctacactgcattgttcagcagatgctggattagataaaatgtgattttaacaagtactccctatgttccagtttattaggtggtagtgcatttttgagaaagggcagattgttaggcggcatacatagcaaggcattgcattataaattcctgtggaagaaacacagccgttttatccgacccgatccaacaagtgaatgcaatgcaccagatcagtgtggcacctggcgtgaattaaatcttgctcacactctggtgtgtgtactcttagcgcctttaaattgggtgtggagggagtgtatatgggtgcaaaaataacatagctttgtacaagtaaacaaacatggttggacatcacttttacctaagatttttattgaggactaactgtctctgcttcttacatcctagactgaaaattttccattagatgtccacattgccttggaatgtattgattgtgctatctctttcagcatcaacatgggaaataaggactttgtatacatcaggatcatcgagtccaaaatgtgttgttactcttatgttggagattgctccaagtttttggggcagatggaagagaaggcactcaaattttgacaaaagcatcccttttgctttgctcagccaagtagcaggtataagagagtacttcgcagccaatccagccttgacatctgagctgccttcaacagtagtgaagtcaaaagcatctgaaactttgatcatccagagtgaacatgaagattctgaacttggtgatgaattttatgatgcacttactagaggtgaatccttcgaagatggggatagtgatgatgatgatgatgccacaactccaaaggctagaaaagtaaagttgaagaatgtgtcatgggctattgcaggcttggctttaaagacaactaaagctttggttgagacaagtgaattggttacaaattctagtccagttactgttgaccccagccacttccatggcacccttcatagagcgaaaactcaaaatgatcaaaattcttggagtgcacctggtggggagaagtttatgatcagagggaagacttacttaacagattatcacaaggaagctgacaagatgtggtcttttgagatgggttaagaaattagtgaacgaattgcctagctggaaggcttctctcaatcttgctggaaggactgctatggttgttggcggtgatccacttctagagctacttgcggtcgattggttcaaagttaatgaacgctttgattcagttgccttacatcccaaaagccttgtgcaatcagaagctgcaaagaaacttcctttcatattggttataaatttgcaggtgccagcgaaaccaaattataacttggttatgtactacgctgcagagagaccagtgaacaaagattctttgttgggtagattcattgatggaactgatgcataccgagatgccagatttaaacttataccaagcattgttgagggttattggatggttaagcgtgctgtaggaacaaaagcttgccttctgggcaaagcagtaacgtgcaattatcttcgccaggataactttctggagatgttgacatcggttcatcatccgttgcccggagcattattggtctagtattgggatatgtcacaagcatagttgttgatcttgctattcttattgaggccaaggaagagaaagagctccccgagtacattctgggcactgttcgtctgaaccgtgtgaatcccgacagtgctgtatcaatctaattacgtttctagccgatctatgcaaatttactcttatcctcttttattctgagagaaacagcgtggcattttgaaaatgtgaaatagcattactatttgctgatccccaatcgagggtaacatatgtaaattggcatgaggcatgactacgtgacgcctttcgtaaatagaataaatcaatggttatgtaatattaatatcccatatacgcgtgtcataatctatgtggcttaaaagtggcatcaagtcatctagtttcctgtgttaacttcttattccttaggtagtcagacattaacagtgtgtttggtttgaggaatgaagtgatccatctttttctcac

SEQ ID NO: 212652 - DNA, 960 bp, Zea Mays
aacagtctaaaccctaaatcctgtacaccgcttctttttaatcaactgtttaccttgtttaaatggctgtttagtctgaaactctgaataatggctaaacattaggtgcctgactgtttagggtggtaaaatttgattcaacaaaaattgttcctgcaaagtacatcatgaaaacggatgacgatgcttttgttaggatcgatgaagtgatctcgagcctaaagaagagcaattccaatggccttctttatggtctcatttctttccaatcttccccccacagagacaagggtagcaaatggttcatcagtcggaaggaatggcccttcgacatgtacccgccatgggctcatggccctggatacgtaatctcacgtgacatcgctaagtttgtagtccaaggccaccaggaactgactcttcagcttttcaaacttgaagacgtggcaatgggtatttggatccaacagtacaagaacagtgggcagcaagtaaacattgtgactgatgaccggttctacaatgaaggatgcgaagctgactacgtccttgcccactaccagaccccgaggcttatgatgtgtctgtgggagaagctgaagacggaatatcatgctatatgctgtgaatagcatccgaattgcaagtaggaggcgatagaggaatggatagatagaggaatggataggttagccttggttttgaagaagacatttgctccgattttgacgctgtgtggaaaattgttgggactatgcgcaaaaagcctgtaacattgggttctcacttctgttctgtggcctgtgggttcatgttctttgtttttgggtagaaaatgttaatccgtgcaacttgatggatgttgtaaaaagagtgttgtaggacatttgagagagtttatctggcacaacctctcaagttattggatccatatacacctgcactcgtcctatagatctc

SEQ ID NO: 212653 - DNA, 1004 bp, Zea Mays
atgaaatagattggaaatctgtttcttcccttgctgcctcttacatcttaaagtgcacaagaatgagcaagtcaatatggagttatggagagaggctcaattatatggtgatatccaattgatgcccttcgttgactactatactttgatcactttgaagaccatatcaatttgcattttcggaacaaaaattgttcctgcaaagtacatcatgaaaacggatgacgatgcttttgttaggatcgatgaagtgatctcgagcctaaagaagagcaattccaatggccttctttatggtctcatttctttccaatcttccccccacagagacaagggtagcaaatggttcatcagtcggaaggaatggcccttcgacatgtacccgccatgggctcatggccctggatacgtaatctcacgtgacatcgctaagtttgtagtccaaggccaccaggaactgactcttcagcttttcaaacttgaagacgtggcaatgggtatttggatccaacagtacaagaacagtgggcagcaagtaaacattgtgactgatgaccggttctacaatgaaggatgcgaagctgactacgtccttgcccactaccagaccccgaggcttatgatgtgtctgtgggagaagctgaagacggaatatcatgctatatgctgtgaatagcatccgaattgcaagtaggaggcgatagaggaatggatagatagaggaatggataggttagccttggttttgaagaagacatttgctccgattttgacgctgtgtggaaaattgttgggactatgcgcaaaaagcctgtaacattgggttctcacttctgttctgtggcctgtgggttcatgttctttgtttttgggtagaaaatgttaatccgtgcaacttgatggatgttgtaaaaagagtgttgtaggacatttgagagagtttatctggcacaacctctcaagttattggatccatatacacctgcactcgtcctatagatctc

SEQ ID NO: 212654 - DNA, 2180 bp, Zea Mays
cttgaccgacgctcgagaagtcgagatagagacaaccggcacccgccgatcgctcgctggtgggatgaagaaatgctccggcgtgctcttcatcctcacactcgccgtcgtgctcttcctcctctcgccgtcgccctcccccactccaccccccaacaccgcacccaatggcccgatcaccgacctcctccccaccctccccggcctttcggacctctaccctcccgctcccaactccactgcacatctctcctggggcctcctccgcccgctcctctgccgctccgacgcgctcccgggaacctctgcaggcgtcctcgaggcagccgaagcctggcggaatctcaccctggctgtcaccgccgcggcaagcgaggaggaggcgcgtctccaaggactccgctgctcatcgtccgtgggaggggatctacgcacgggacgtgccacactcccctgcgggctctcggagggcgcggcattgacggtggtcgggattctcagggagggggcggccaagttctgggtggaaatgctgggtgcgaacggtgaggttgtgctgcacgtcaatgtgagcctgggagccgcgggggtgttggtggagcagaattcctggacgccagaggaggggtggggggagtgggagcggtgcccgcctgttggtgatgtgggcagcagcaatagcagcttgcagctaagtttgaccagtccagtggacggccttgttcattgcaatgagaaagtgggtgcaaggatcgtccaggagagtaataatactgtggtaaatattactgggaaccaacctgaagattggcagagtcaaacaggacatggtcagttaagtggacgtttctcaattgttgaaggagagccttttacagtaacactgtgggctggtgtagaggggttccatatgacagtaaatgggcggcatgagacatcatttgcctatagagagaggtcagagccatggttggtagcagaagtcatgttttctggtgatttggagctcttgtcattcttggctaatgagttaccagtatcagaagatatagacatggaaaatgttgcagttttgaaggccccacctctgccaaagaagcaaacttttctgctggttggtgttttctctactggaaacaacttcaagcggcggatggctttgaggcgaacatggatgcaatatgaggctgttcgctcaggcgatgtagtagtccgttttttcactggtcttcacaagaatgagcaagtcaatatggagttatggagagaggctcaattatatggtgatatccaattgatgcccttcgttgactactatactttgatcactttgaagaccatatcaatttgcattttcggaacaaaaattgttcctgcaaagtacatcatgaaaacggatgacgatgcttttgttaggatcgatgaagtgatctcgagcctaaagaagagcaattccaatggccttctttatggtctcatttctttccaatcttccccccacagagacaagggtagcaaatggttcatcagtcggaaggaatggcccttcgacatgtacccgccatgggctcatggccctggatacgtaatctcacgtgacatcgctaagtttgtagtccaaggccaccaggaactgactcttcagcttttcaaacttgaagacgtggcaatgggtatttggatccaacagtacaagaacagtgggcagcaagtaaacattgtgactgatgaccggttctacaatgaaggatgcgaagctgactacgtccttgcccactaccagaccccgaggcttatgatgtgtctgtgggagaagctgaagacggaatatcatgctatatgctgtgaatagcatccgaattgcaagtaggaggcgatagaggaatggatagatagaggaatggataggttagccttggttttgaagaagacatttgctccgattttgacgctgtgtggaaaattgttgggactatgcgcaaaaagcctgtaacattgggttctcacttctgttctgtggcctgtgggttcatgttctttgtttttgggtagaaaatgttaatccgtgcaacttgatggatgttgtaaaaagagtgttgtaggacatttgagagagtttatctggcacaacctctcaagttattggatccatatacacctgcactcgtcctatagatctc

SEQ ID NO: 212655 - DNA, 2311 bp, Zea Mays
aaaaaaactgccatgacagcccagtccatccaacgcaacgcagctgtggcctgtgtctgtctgcgccgtctgtctgcgccgcgcctcgccttcctctcccgccgccgtcgtggtcgtggacgccatgggccgaggccgcaaccgcaagccccgcaacttcgccacgttccgcctctgcccgcgccccggggctgccgatgcctccgaacgcgtcttcgtacgcgtcgacgacaacccctactccgtccccgggttcgcagacgatgatggtctctcgtcctccaccgccgtcaggggagacggcggcgagcccgacccgtcctcctccacctcgaccgacgagggcgggtcccccctgcccgagcacgtccgccgagagatcatggagctcggcctccccgacgacggctacgactacctcgcccacctccgcgagctccgcccctccctctcctccaccggcggcgggggttcttcggccgtattcctccccagccgccgcctcgcacgctccggccttcccgtggacgtgaaggctgcttgacgggagcgattcgacggccgttgagtcgggggatgaggatttggaggaggactttgttatccttgcgaatgagccagatgagaagcaggagagcgaggaagagaatgttgctggaagcaaggagaaagctctgcagctgcctggcgatcagtttgtttcgcttgctttcgaagaatatgcggacagtggagttggttgttgtgttcaagatgcaaagcatgaactgtcccaggaggttacagataaactgaaaccgcctcacagcgaaaccttcgatgctgataaaagatgcagggcacccacaccacaatatgttgctcaccggatactagagtcaaacgagcaaattgatgcgtcttctaatgccatctccgaacatgttcagtacgctgaaacatatgaagtcagcgaagaagaacaagcgattcttgctccagaaagtagcaaggggtctgcggttatgtactctactgccacggtttctggatcatatctcgatgttaaattgaagtttccaaaacattcccctggagaaacaagtatgaaaaaatccatcatcagaaaaggaatagagaagcttcctgcagggtattcacctcagaggaacactccgactggtgaaactaaacagggaccctacaaaggaacgagacaggaagggacagaaagctagatccaggaccagacctactgcgttttaaaaaaaatgttttaaagaagcagatcatcgagggtgtgttgttcggcttcgttatcaactgaccatgggcttccaccggatgcttaatacaatgatatttactggcgtggcttcccttttttttctaaaggaacttcttttcttgggatctcccttttatgctttccatgccatcattggtaccgataattttgtctcctaggctacaatggaagatcatgccatcattgttactcataattttgtctcctaggctacattgaaagatcaaagtatgcactcatactcactggaccatgttttgtacatcttatgtatgtatttgttatgtaaatctgaaacttgaaccgtgtactttcaagcttgaagagaactgtagaagcgaaaagatggacgccatattgtacagagctgttaatagtttgacgtgaggttttatctcaaggattgtaggctgacattagattgcacgttttaggggtggctatatttgtagggctgctggtcatctgattggaatcggaatcaggcactagactatcacttgtcatcccaatgcagaccagatgtattgtcacccaaatgtctgctgaggaggaaacagtgaaaagaaacaaagatgtactgggtagctgaagggactacagtggcgagcttggttgaaaccaaaagatggttctgctaactggagatttgacggcagtgtaccatggaaggtactatcaactgctggaaaccatccagatcactgtcagacgtgccagtagtacaaggttcagatccgctacgttttgtttcatgagatgagatgggactggaactggtgtgcgtgctgtgcatcagtgcatgagatatatagaacgtagaggtggtgcagtgatgcatctgcacgactgcaccgtacctatagggatgatcggtgctttgtaactttaaaatacgggaattcttctctttttttttgaaaataaactgattccgttaaaatttctgcattccaaaagggccctagagcctattctagtcgcctttcatggtttctgttaggctccaatcattcggtgcag

SEQ ID NO: 212656 - DNA, 2785 bp, Zea Mays
cacgcccccaccagatttcgccggatctcagcccacatgcggacggactccgccgagagctcaagcaaataccttggcatatccgtctcgcactccgaggtccaccacgctcgctctccgcttcccgccttccccagccccacacccgtttttattcctccccgctccgcacctcgagctcgctctcggcgctataggcagctcacggacttggcggttttacattggggggctgcctgcaactgcaagtgcatagccgccctccactcctccctctctttccccgccgcttcctcctcccgcctcggattcccacccccagctccggctcctcacctcacggcaccaacccaaaactctagcccgcgcatggcgtcccccgcgcgccccgctgccgcctccgtctccggcgccttcggcctgcccccggacgcgcgctgctcctacgatcagcccctgccccgccgccgcgagggcttgcaggacgggaggctggtgcggacgttcgtggccgcctacggccagccgccgccgccgcagcagcagcagcagcagcaggacggtttcttgtaccccaaggacgccgtggtggcggccgtggaggagtgcacgcggaagcaggccgacgcactgctgcactcgctcggcgccatcgggggcaggctctcccagctcgagctctactgctacaagctcgagaggtccatcggggagctgcgcagcgacgtcatggactaccacagcgacagcaacgccaacttcaaatgcatcgacaggaacctcagacaggtagataaagactggatcccggtgcaccggcttctcgcgccgacgagtgcaatggcagtgcgatttggacttctcacttatgtttggtttggtgtagtaaaatgatagtctgtttccctgaaacctagtacattcagtggagtcaacttatggttcccggagatgagattctgcatcactttggatgtgagactaacatcatcttttgataactactagatctacattttgggttgccaggtccacaaatcgctccagcttcttcaggatagacaagacttagccgaaactgcaaaagaactcagcaagcttcagatagcacacgaggcgccttctcagacgaagggtgaggccgccggtttccccatgctcgcggcaagggaaaacggccacagcacgcgagccccaaaacacgaggtcgcccttttgccgcttcaccaggtcaatgggacgatgcactcccctgccgtgcccgtgcaggtccagaccagcaacggcttcgttctgcagcacctggtgcccgtcgctttgagcacgcagcagcatgagcagcagcagctgaaccaggctcccgtgttctacgtgcaaagccgggaccgtgctaaatgcaccgagggcaaggcggcgttggagcctctggttcaggttgtgcagccgcttgcgcacagccctgatgccgtggtgcaagtcgagctgcctcagaaagctagtcaagcagcagcagctgaactgtaccctcagcctcagactcagagtcacaggctgcagacgcctacccagcaggttgatctgcatacatggcatccccagcagcccatggtgcaagtgcaacagcagcagtacagtatccaacaagtttcacgacatatggtggtggctcagcagccgtcctcgtctcctcagtctcagctgagcgctccacaagccacacccttgtttcctccattcagttccgtgaaaccttcgagttgtaacacggagacaattacaagaagaatggctgggcagcctccatactcttcatcacagcagcaataccagcagcagcagcatgaagttgcccattcattctatggccaaggcaacacagtattgcttcctgtagcagatcataacgctcagcatcagcaaccgcaaccagtgcagctacacagccagggcccctcctgtccacctcagccaggcaagcccagtcactgcagcgccgcaccctatgctgttcaaggaaacggccagacctacagctccgcatacaagaacccttctaactgccctgcaactgcagccgttgtagctcttctgcctcagcctcctgccatcgcctgtatggcgtaccatcccttgggaccacaggtcgtgcacaaccatccatttggaaatactatggttgaaacgtccaggtccagcgtggtagggtacccacgggatcagtttgagatgctcccggcgattactgccgcccaacctgtactaccggttgataagctcaatgctggcagcaatgtaacatcgtcccctagggaatggtcagcatagcggtggacggtgcgcggtcttgcatttcactgcttccacacagcattctactatacgtattgcagctgggagctcgtcgggtctattttatctggctcttttttcccccatcagccagcagattagaacggatccttctacctttttcagctgaaggtcggtatggaataagataagtaggttggctgagtgatcactggtcgctgttggcatatgccctcacttttaatgggcatatgtgcttgtaaccaggtgcgagcttatattatatgcctttcttatatgagtacatgacgggtttacatcagcttgtcagatgtttttttgtaactgtgaattgcattactcatcctctgcaacagagatgtcaatagaaaatttcccaccaggtacggacacctgttacccattcctatgaagttacactcatctacatcttcgtatccgtcatgggtataag

SEQ ID NO: 212657 - DNA, 1706 bp, Zea Mays
tgcagtctactccagcctcaccgcctcaggtcggtcctacacggtcccgttctgcctggtgcctgcaacctgccttttcttcttccgtcgccacccagcgtgctctctctccctctttctctctctctcgtggcggcgcctgggcagccgtcgctgccgcctgcgctaggtgccaggtcttcttcgggcccttcgccggcgacgagtaccaccagaggcaatgtcatcacaaactggaggtggcaaagagagtgacgccggccctgggcaacacaggcagatgcaaagtttggcaagacaagggtctttatacaaccttaccctcgatgaggtgcagaaccatttgggggagccattgcttagcatgaattttgatgagctcctgaagagcgtgtttcctgatggtgtagattcagatggtgctgtcacaggcaagcctgatcggacctcgagcctgcagcgacaggggagcatcctgatgcctccgcagttgagcaagaagactgttgacgaggtgtggaagggcatccagggtggaccagagaccagtactgtggtggatggtctgcagaggcgagagaggcatccaacacttggggagatgacacttgaggacttcttggtcaaagctggggttgttactgaaggacttgtgaaggattcagctgattttccaagcaatatggatacagctggcagcagtgttgttgtggctgctgcttctagtttgaaccctggagcacagtggttgcaacagtaccagcagcaagttttggggtcccagcaattgagtttggcaggttcatacatggctagtcagttgcgccctcagccattgtctattgctacaggtgctactttggattcaatttactctgatgaccagattacttcgccatcatttggtgcactttcggaccctcagacacctgggcgcaagcgtggtgccttaggggaggtagtggataaggtggttgaaagaaggcagaagaggatgataaagaatagggaatcagctgcgcgatcaagagcgagaaagcaggcttatactaatgaacttgaaaacaaggtattccgtctagaagaggagaataagaggctaaagaaacagcaggagttggatgagatactgagctctgctcctcccccagaacccaaatatcaactcaggagaacgggttcggctgccttttgagtttcggcgctgacaatgctcatagtgatttttgtacattatacaaggattctactttatatggtttccttccttttgtattagaaacatttgatagattgagggtatagctttttcccggcccggtaggtcagtgtatgtaggtcgctagcaagctgtagcatgtcctggcggatcatttccttggtgtctgtcagtgtgtacatcttctagacacatgtctaagtctgagagcttccttatacgagaaggtattcaggtatgtgttgcgcaggtgtctcctgctgttctgtttcaacggtgcaggctattttttgtgaggtcatcattttgatcacacatttgtgaggtcagaatattgcaagcgctcctcttaacgtctgtgtcaaatcgttcacaggatctatgtatcttaacttcttaacacaagattataatcttgtgactaacgtatattttgtagagctaatttaagttaggtcataataatgattattgtttgggagatcaa

SEQ ID NO: 212658 - DNA, 1408 bp, Zea Mays
gtccctgtccccgtcgtcacgtcttctagaaaacgccgttaccctattccctccccgtcgctatccaccccatcgcgttgccggatcgagcttggctctctcgaaccttgcttcgccgcacggcaccaaaagcacggccgcgctctcatccccctccacacgtttccgcctcccgatccatagccgccgtgagccgccgccgacatagctcctccctctcgcagctctccagctctcggaggcccgcggctcatcaacccgcgcttcttcattctcgacatctcacccggcggcgcggacgcgcagtgcacatcacgagccgcacggcacagccgctcttgttttccttcgtgggttgcggttcgacgcggccacgggatggcggcgagcgctcgggacagcgctgatgcggcggagcgagtcgtggatgaccacgacggctgggcgtcggacggcgagatgggcatggagatggatgtggaaggcgagttccacgaccgcgatgccgaccggagggatggcggcatggatggtgatgatgagtacttgctgctcactaggataagggacacatcagcagctgaagcaagggcaggaaaggatatacaaggtataccatgggagaggatacacatagccaggcaagactaccgaaaagctaggttggaacagtataagaactatgaaaatttccctcaatcaggagagctcatggataagttgtgcaagcaagtggagaagagcagcaagtattatgagtttcagcataacactagatcagtgaagccatcaattctccattttcagcttaggaatttgttatgggcaacctcgaggcatgatgtatattttatgtcaaattccacagtaacccattggtcatcattgtctcacaaattatcagaggttcttgacttctctgggcacattgctccggtggagaagcatcctggcagtttgctagaaggtttctctggggttcaagttagcacacttgctgtgaatgagggtttgttggtagctggtggttttcaaggagaactgattggcaaggatttggaaggatgtaatataaaattctgtgcaaggacaactttgagtgacaatgctataacaaatgccatagatatacacagatcgacaagtggaagcttgcgcattacggtatctaataacgattgcggtgttcgtgaatacgatatggagagatttcagctcttgaaccactaccgatataactggccagttaatgcctgatggagcctccacgtgagggggagtattggagtataaatgagttgcccacctttccataatcagcttaagaatttgggttgaaatgatcagtgcatgcaacttaataatatatttaatgctttgacattcattatttgcttctataacaaca

SEQ ID NO: 212659 - DNA, 1313 bp, Zea Mays
gccgttaccctattccctccccgtcgctatccaccccatcgcgttgccggatcgagcttggctctctcgaaccttgcttcgccgcacggcaccaaaagcacggccgcgctctcatccccctccacacgtttccgcctcccgatccatagccgccgtgagccgccgccgacatagctcctccctctcgcagctctccagctctcggaggcccgcggctcatcaacccgcgcttcttcattctcgacatctcacccggcggcgcggacgcgcagtgcacatcacgagccgcacggcacagccgctcttgttttccttcgtgggttgcggttcgacgcggccacgggatggcggcgagcgctcgggacagcgctgatgcggcggagcgagtcgtggatgaccacgacggctgggcgtcggacggcgagatgggcatggagatggatgtggaaggcgagttccacgaccgcgatgccgaccggagggatggcggcatggatggtgatgatgagtacttgctgctcactaggataagggacacatcagcagctgaagcaagggcaggaaaggatatacaaggtataccatgggagaggatacacatagccaggcaagactaccgaaaagctaggttggaacagtataagaactatgaaaatttccctcaatcaggagagctcatggataagttgtgcaagcaagtggagaagagcagcaagtattatgagtttcagcataacactagatcagtgaagccatcaattctccattttcagtaacccattggtcatcattgtctcacaaattatcagaggttcttgacttctctgggcacattgctccggtggagaagcatcctggcagtttgctagaaggtttctctggggttcaagttagcacacttgctgtgaatgagggtttgttggtagctggtggttttcaaggagaactgattggcaaggatttggaaggatgtaatataaaattctgtgcaaggacaactttgagtgacaatgctataacaaatgccatagatatacacagatcgacaagtggaagcttgcgcattacggtatctaataacgattgcggtgttcgtgaatacgatatggagagatttcagctcttgaaccactaccgatataactggccagttaatgcctgatggagcctccacgtgagggggagtattggagtataaatgagttgcccacctttccataatcagcttaagaatttgggttgaaatgatcagtgcatgcaacttaataatatatttaatgctttgacattcattatttgcttctataacaaca

SEQ ID NO: 212660 - DNA, 1281 bp, Zea Mays
gccgttaccctattccctccccgtcgctatccaccccatcgcgttgccggatcgagcttggctctctcgaaccttgcttcgccgcacggcaccaaaagcacggccgcgctctcatccccctccacacgtttccgcctcccgatccatagccgccgtgagccgccgccgacatagctcctccctctcgcagctctccagctctcggaggcccgcggctcatcaacccgcgcttcttcattctcgacatctcacccggcggcgcggacgcgcagtgcacatcacgagccgcacggcacagccgctcttgttttccttcgtgggttgcggttcgacgcggccacgggatggcggcgagcgctcgggacagcgctgatgcggcggagcgagtcgtggatgaccacgacggctgggcgtcggacggcgagatgggcatggagatggatgtggaaggcgagttccacgaccgcgatgccgaccggagggatggcggcatggatggtgatgatgagtacttgctgctcactaggataagggacacatcagcagctgaagcaagggcaggaaaggatatacaaggtataccatgggagaggatacacatagccaggcaagactaccgaaaagctaggttggaacagtataagaactatgaaaatttccctcaatcaggagagctcatggataagttgtgcaagcaagtggagaagagcagcaagtattatgagtttcagcataacactagatcagtgaagccatcaattctccattttcagaggttcttgacttctctgggcacattgctccggtggagaagcatcctggcagtttgctagaaggtttctctggggttcaagttagcacacttgctgtgaatgagggtttgttggtagctggtggttttcaaggagaactgattggcaaggatttggaaggatgtaatataaaattctgtgcaaggacaactttgagtgacaatgctataacaaatgccatagatatacacagatcgacaagtggaagcttgcgcattacggtatctaataacgattgcggtgttcgtgaatacgatatggagagatttcagctcttgaaccactaccgatataactggccagttaatcacacatctgtgagcccggataagaaacttttggctgtggttggagatgatcgggatgctcttcttgtggattcacggaatggaaaggtggaacgattccgggtgcaatccgatgaaaacgaacaaggccttagctggaacggttccgggtgcaatccgac

SEQ ID NO: 212661 - DNA, 6132 bp, Zea Mays
gtgtcccttcgtggggtgcgcccgccacctgccgatgcgacgtgagaggagccaagcgcgcagtgggccctggacacgagagcggtgcggtgtcgtgctggcggcggcggcggcggcggcgaaggataaatagggccgtagggccatcgttttgcattgccgtcgcgtggccgtgggttttcatcgacgaacgacgacgactctgccgcgcgcgtttaggcgcgtcgccgccggccacccggccggccacttcgacgcggctgtggtggtttaaaattctccggctcgccgcccacggcctcgctgcacgtagttgcagcttttactgcttcattcagttatggtcgtgtacatcttcagaaaaccagacatgttcaggcaagaccagtgggtatgcaaaaacaacagcaaagtggctcggcatgtcgacagccagctgctacttctacttctacatataaaccacgcgctggcatgaactccactccagcatggatagacgacatcatcgcacaaatcacataccaggtcaaggcaccacgtttcacaaacctagtgaacacccaagaactattatgcaataccatcattttgctcgatagattttcctagcccagttgtttcatctgagcaagtgtctgtaggaactaaaacacagtagtatgctgtatatactgtcaagcatgaaacgcaaccagatcagctgcaggatttgcagcaccaagctctggccattaggtaggctgcatatcacaacacacaaagggaacatcaaactacatacactagctccgtcccctccagggacactgcaggttggcaggcccaaagctagcacagggtctcgcaacccacaaggtcataatcagtacaagcatccatcggcaaggggaagcaagagcaatcccaggtaggtggacgctggacagatccgtgctcacgccgttccttgctccggacttttctggccgcttgtactagctccgctgttttgtttcgccaacatctgaatctgatcgccataccatagtaggaattagcatagcactcaactgcatttggcgccccgtttcaatctcacgggataaactttagcttcctgctaaactttaactatatgaattaaagtgctaaagtttagtttcaattaccaccattagctctcctgtttagattacaaatggctaaaagtagctaaaaaaagctgctaaagtttatctcgcgagattgaaacagggcctaaatagcaatctagccgactggtcagtgatcactgaaagcttattcagaaaataaacaggcctgacatttctgcgctgaggttacattgctcacagttgttcagtagcagcttgtccaacagtacttgcccgttccagcagtacttccaggcaaagtagcaaatttacgcagagcgcaaaggtagaagctagcaacatccaaaggaaataacaaaacactagcagcatccaaagaaatttggtattctgcactccctattgtatttggttgtcattaaccaaacaacacagtttggagtttggactgaactgaacttgaataaggcgcaaccaatcaaggtcctgcttgtgggctttaccgttcagatttcaagaaaaaaaaatataccgtaccttcctggatctcgtatccttcaaagcatttctcagaagattttccagcttctccagctcatctacatctgattcgtcagcattgctctggggagacctgccggtttgaagaaattgtgattatttatcaaaaatgggaaaccagagtgggtggaaatcctgagttctgggtgtgtaccaggtcgcaatcttgctcagcatcaactgcaaatctgaagaagcttcatccttgttctgtaccaaaaacaccctaaaaattgctgatagcggttatatgtatcctctatgctgaaaaaggagaaaaaaaatgaatatgatattagctccttgcataatgtactcttggacaatcaacatctatatattcacctcacgtggaacaaaaatgcaggcagttttattggaggacttttgagcatcaatgtgatgctaatggagtttgcattagtggtgtattgatgcaagaggcacatggaggtggattgatggaacattttaatgtcaagaagataaagtgttggtcacatacttcttctatccaaggatgaggcaagatgtagagaggttcgtagcttgatacacgacatgtcaaatagctaaatcgcggttgaacccatatggtttgtatatgttggttcatttcttctatttcttgggtggatatatatatatgaactttgttttggaattgcaaagaactaataggggggatagtatttttgtggtggttgatcatttatctgaagtgataacttttattccctatcataaaagcgacgatgacattcacattgctaacaaagtctttcaagaaatcattcacttgtagaggtagggacttttaaatatatgctcctagcttagcgtcatagatcagttttgcacctctctagtattaaaaacgcctcatccattactactagaggggtagaactgagcagtggtgctaaagtaggggaataggattaaaagtacctctaaagaagaatctatgtctagggttagtccatctttaacgttgcagatttaaagccatatttagatgaagaattgagtcaagaatgactccatttcaattgaggaaggatgataaggacatcacaccttcagatgcgcctactaatcatccgatcgttatataaggtccaatgacttgagcacaaatgtgatgattaaattttcaaaggtaagtgatcctttcgataattttgggaatagattatctaattatgttatcgtgcttgataacattagagagggtcatgaagtaattgaaggtgtggaggtgaagatcaaaaagaacgcccaagaccaattaaaggcattagtccaactcgagtttgagtctgagtggacctttaggaccatcctgtagtaaaacagatgtgcgagacatacacgacatacataatccattttttatgatcaatatatgaatagaaatatattttcataagctaactaataattttgatctaaggtctaatttccaccggaattaatgaaattatcgaaataagtcagcattcaaaatatgttagtgttgtgtcacaattttttggttggctaggcatgtgttgtcttagagcccattaggggacacgttcaaggggtgtgatagccttaggatatataattagtagccactactcatgttaggactcaagttttgcttttaaaaattatctttgaataattgtcattatagggttataaaaccccacttttgtgatcttagtcatacatatattgttagcatttttgttgagctgtgtactttcaagttctttcttgtgttttcgattcactgacatggattagccttcttaacgagatcaaccggattagtgacacggttgatcaccataagagtcgtagtaccacgttccaccaaaacagaagttatcatgaacccgatggaacattaaggactccattatcataacaaatagcgtattaggtaaccttgtgaataattctgattccttgtttggggactaggtagaaaattagtaaaaacatgatgatttggtgatgtttggatgtggggttgtactggttgtactttgggccacttggaaaactaggaatgatatgtgctttagtagtaaaatgattatcgatccttctaatgtgatatttttgtgctatttctagatggattcaagtttattgtgtgctaaaatacccgctgttgggggtcttcttctctgccgaacattttttattacttcttttggatgctgaacaatatagaattatgttttgagttgaataaattagaattttgatctaaaattttgtgataattggtctaattttcttagttgaaagatgaagccgaatatttattcctttatctaaaaaatctaataataacttaaaatgtttaataataggtagacatggatatcggaattctaataactctcgtcgtccaagtatatgagatgcaaccacttttttattctagtctcataatataaggtgttgccttggagcctgaaagcatctaggcccctggttggttttagtgattaatgacaacgtaatattatatgtgactagcgtgtgttttgcagagcaaatggtaagttaggtcgcattacagaaagttgtactacaatggtgaaaacaatccctgagatgagaacttgaagcgacaactgaaacgacgaatcaaaagatgaaagtcttcatattccgagtgttgaaggagttgtagacactcggtatagaattaggtcttctattttgttttagccgtactataaagagaggttgtggatgagtagtttgaccaagagaattctagtgtagtgttggtgcatattcacacttacatctagtgttaggtgtcactctataacacactcacgagttagaacaaaaacggttttgaaaaacaaaaggaaaaacgaagttagggtttctgtcttaggggcaccagactgtccgatgtgcaccagactgtccggtgcaccccctgacagtggtgccagtcagccccgggggcagtgattctgtccccgagaaaatccgagagcaacgagtggagaaaaagaattttagccgccacaccggactgtccggtgtgcaccggacaggtactgttcactgtccgttgtgccatcagcccaactgctagctgtcagaactagccgttggagacgaccgttggcgcaccggtggcacacggactgtccggtgcgcccatacgcagaacagccaggtaacgactagtttggtgagtggggctatttataccccgtccacctaccttattgagtgtcttgctgcccacattgatgaccacatattgctacaacattgcaagcacaacaaagactagtgaggtgactagaaaatcttaattccacgtcaggacctcattagtgcaagtgagagccacctagagcacacaccacatgcattaagcttctcttggtaaagtgaaagtctattgcttgttactcttggtgatcggtatcacctagatggcttggtagcgtttggagcacggtgatcacctcggatgatttgttggtgacccgactcaaagattgtaagcggtcgtgagggatccaccgcgccggagtggcaaaggatcacctcatagtgagtacttagttcttgaccaagggggagcgatacccttgcgcgggtgctccaacgatgactaggaaagagtgccgactcttcgatacctcgacaaaatattggaggagtcttctcaaccttgttttactttccgcatttaattcaagcattttactttattcaattgtttagcaagtagttgaagtgatgtcttaggattgttatctttctagtagtattctcttattgctagtagttaggtgaagttgggctctagcttagggtttaaatatttgctcagggtttaattgttgttgaatttttagaaaaaagcccaattcaccccctcttgggcatcatgattctttcagagccatactaagagcatctctaaccgctctccaacaaataactattaaaaacagattttaagggccatactaagagcatctctaaccgctctccaacaaataactattaaaaactagtttttaggagtatctcaaaaattattagggtagattttaaccatttctccaaccattctcataactaggccaagccactcttggacccacattgatatgtttcacttgtgtattttcttcttccacgactttgacatctgtccaacgaccaaacatataccaccatcaaaggttgttggttgtacgtgggcggacgtggccggtgagagactaccaacggcgagaccgagcgatagcagagatctgatcgacaacggaggttcaatagcgggttgtgagatggtagaagcaggatagtgtgggcgcgttgccagcaacggacgacgaggttgcgcagatggggaggatgcgctcacggaggtagacgacgaggttgcgtgggtggtagcggattgtgaggttgtgtgggc

SEQ ID NO: 212662 - DNA, 5188 bp, Zea Mays
gtgtcccttcgtggggtgcgcccgccacctgccgatgcgacgtgagaggagccaagcgcgcagtgggccctggacacgagagcggtgcggtgtcgtgctggcggcggcggcggcggcggcgaaggataaatagggccgtagggccatcgttttgcattgccgtcgcgtggccgtgggttttcatcgacgaacgacgacgactctgccgcgcgcgtttaggcgcgtcgccgccggccacccggccggccacttcgacgcggctgtggtggtttaaaattctccggctcgccgcccacggcctcgctgcacgtagttgcagatcaagctctctcacgagggtttaattttcatgcaaggcctgacatttctgcgctgaggttacattgctcacagttgttcagtagcagcttgtccaacagtacttgcccgttccagcagtacttccaggcaaagtagcaaatttacgcagagcgcaaaggtagaagctagcaacatccaaaggaaataacaaaacactagcagcatccaaagaaatttggtattctgcactccctattgtatttggttgtcattaaccaaacaacacagtttggagtttggactgaactgaacttgaataaggcgcaaccaatcaaggtcctgcttgtgggctttaccgttcagatttcaagaaaaaaaaatataccgtaccttcctggatctcgtatccttcaaagcatttctcagaagattttccagcttctccagctcatctacatctgattcgtcagcattgctctggggagacctgccggtttgaagaaattgtgattatttatcaaaaatgggaaaccagagtgggtggaaatcctgagttctgggtgtgtaccaggtcgcaatcttgctcagcatcaactgcaaatctgaagaagcttcatccttgttctgtaccaaaaacaccctaaaaattgctgatagcggttatatgtatcctctatgctgaaaaaggagaaaaaaaatgaatatgatattagctccttgcataatgtactcttggacaatcaacatctatatattcacctcacgtggaacaaaaatgcaggcagttttattggaggacttttgagcatcaatgtgatgctaatggagtttgcattagtggtgtattgatgcaagaggcacatggaggtggattgatggaacattttaatgtcaagaagataaagtgttggtcacatacttcttctatccaaggatgaggcaagatgtagagaggttcgtagcttgatacacgacatgtcaaatagctaaatcgcggttgaacccatatggtttgtatatgttggttcatttcttctatttcttgggtggatatatatatatgaactttgttttggaattgcaaagaactaataggggggatagtatttttgtggtggttgatcatttatctgaagtgataacttttattccctatcataaaagcgacgatgacattcacattgctaacaaagtctttcaagaaatcattcacttgtagaggtagggacttttaaatatatgctcctagcttagcgtcatagatcagttttgcacctctctagtattaaaaacgcctcatccattactactagaggggtagaactgagcagtggtgctaaagtaggggaataggattaaaagtacctctaaagaagaatctatgtctagggttagtccatctttaacgttgcagatttaaagccatatttagatgaagaattgagtcaagaatgactccatttcaattgaggaaggatgataaggacatcacaccttcagatgcgcctactaatcatccgatcgttatataaggtccaatgacttgagcacaaatgtgatgattaaattttcaaaggtaagtgatcctttcgataattttgggaatagattatctaattatgttatcgtgcttgataacattagagagggtcatgaagtaattgaaggtgtggaggtgaagatcaaaaagaacgcccaagaccaattaaaggcattagtccaactcgagtttgagtctgagtggacctttaggaccatcctgtagtaaaacagatgtgcgagacatacacgacatacataatccattttttatgatcaatatatgaatagaaatatattttcataagctaactaataattttgatctaaggtctaatttccaccggaattaatgaaattatcgaaataagtcagcattcaaaatatgttagtgttgtgtcacaattttttggttggctaggcatgtgttgtcttagagcccattaggggacacgttcaaggggtgtgatagccttaggatatataattagtagccactactcatgttaggactcaagttttgcttttaaaaattatctttgaataattgtcattatagggttataaaaccccacttttgtgatcttagtcatacatatattgttagcatttttgttgagctgtgtactttcaagttctttcttgtgttttcgattcactgacatggattagccttcttaacgagatcaaccggattagtgacacggttgatcaccataagagtcgtagtaccacgttccaccaaaacagaagttatcatgaacccgatggaacattaaggactccattatcataacaaatagcgtattaggtaaccttgtgaataattctgattccttgtttggggactaggtagaaaattagtaaaaacatgatgatttggtgatgtttggatgtggggttgtactggttgtactttgggccacttggaaaactaggaatgatatgtgctttagtagtaaaatgattatcgatccttctaatgtgatatttttgtgctatttctagatggattcaagtttattgtgtgctaaaatacccgctgttgggggtcttcttctctgccgaacattttttattacttcttttggatgctgaacaatatagaattatgttttgagttgaataaattagaattttgatctaaaattttgtgataattggtctaattttcttagttgaaagatgaagccgaatatttattcctttatctaaaaaatctaataataacttaaaatgtttaataataggtagacatggatatcggaattctaataactctcgtcgtccaagtatatgagatgcaaccacttttttattctagtctcataatataaggtgttgccttggagcctgaaagcatctaggcccctggttggttttagtgattaatgacaacgtaatattatatgtgactagcgtgtgttttgcagagcaaatggtaagttaggtcgcattacagaaagttgtactacaatggtgaaaacaatccctgagatgagaacttgaagcgacaactgaaacgacgaatcaaaagatgaaagtcttcatattccgagtgttgaaggagttgtagacactcggtatagaattaggtcttctattttgttttagccgtactataaagagaggttgtggatgagtagtttgaccaagagaattctagtgtagtgttggtgcatattcacacttacatctagtgttaggtgtcactctataacacactcacgagttagaacaaaaacggttttgaaaaacaaaaggaaaaacgaagttagggtttctgtcttaggggcaccagactgtccgatgtgcaccagactgtccggtgcaccccctgacagtggtgccagtcagccccgggggcagtgattctgtccccgagaaaatccgagagcaacgagtggagaaaaagaattttagccgccacaccggactgtccggtgtgcaccggacaggtactgttcactgtccgttgtgccatcagcccaactgctagctgtcagaactagccgttggagacgaccgttggcgcaccggtggcacacggactgtccggtgcgcccatacgcagaacagccaggtaacgactagtttggtgagtggggctatttataccccgtccacctaccttattgagtgtcttgctgcccacattgatgaccacatattgctacaacattgcaagcacaacaaagactagtgaggtgactagaaaatcttaattccacgtcaggacctcattagtgcaagtgagagccacctagagcacacaccacatgcattaagcttctcttggtaaagtgaaagtctattgcttgttactcttggtgatcggtatcacctagatggcttggtagcgtttggagcacggtgatcacctcggatgatttgttggtgacccgactcaaagattgtaagcggtcgtgagggatccaccgcgccggagtggcaaaggatcacctcatagtgagtacttagttcttgaccaagggggagcgatacccttgcgcgggtgctccaacgatgactaggaaagagtgccgactcttcgatacctcgacaaaatattggaggagtcttctcaaccttgttttactttccgcatttaattcaagcattttactttattcaattgtttagcaagtagttgaagtgatgtcttaggattgttatctttctagtagtattctcttattgctagtagttaggtgaagttgggctctagcttagggtttaaatatttgctcagggtttaattgttgttgaatttttagaaaaaagcccaattcaccccctcttgggcatcatgattctttcagagccatactaagagcatctctaaccgctctccaacaaataactattaaaaacagattttaagggccatactaagagcatctctaaccgctctccaacaaataactattaaaaactagtttttaggagtatctcaaaaattattagggtagattttaaccatttctccaaccattctcataactaggccaagccactcttggacccacattgatatgtttcacttgtgtattttcttcttccacgactttgacatctgtccaacgaccaaacatataccaccatcaaaggttgttggttgtacgtgggcggacgtggccggtgagagactaccaacggcgagaccgagcgatagcagagatctgatcgacaacggaggttcaatagcgggttgtgagatggtagaagcaggatagtgtgggcgcgttgccagcaacggacgacgaggttgcgcagatggggaggatgcgctcacggaggtagacgacgaggttgcgtgggtggtagcggattgtgaggttgtgtgggc

SEQ ID NO: 212663 - DNA, 6443 bp, Zea Mays
gtgtcccttcgtggggtgcgcccgccacctgccgatgcgacgtgagaggagccaagcgcgcagtgggccctggacacgagagcggtgcggtgtcgtgctggcggcggcggcggcggcggcgaaggataaatagggccgtagggccatcgttttgcattgccgtcgcgtggccgtgggttttcatcgacgaacgacgacgactctgccgcgcgcgtttaggcgcgtcgccgccggccacccggccggccacttcgacgcggctgtggtggtttaaaattctccggctcgccgcccacggcctcgctgcacgtagttgcagaaaaccagacatgttcaggcaagaccagtgggtatgcaaaaacaacagcaaagtggctcggcatgtcgacagccagctgctacttctacttctacatataaaccacgcgctggcatgaactccactccagcatggatagacgacatcatcgcacaaatcacataccaggtcaaggcaccacgtttcacaaacctagtgaacacccaagaactattatgcaataccatcattttgctcgatagattttcctagcccagttgtttcatctgagcaagtgtctgtaggaactaaaacacagtagtatgctgtatatactgtcaagcatgaaacgcaaccagatcagctgcaggatttgcagcaccaagctctggccattaggtaggctgcatatcacaacacacaaagggaacatcaaactacatacactagctccgtcccctccagggacactgcaggttggcaggcccaaagctagcacagggtctcgcaacccacaaggtcataatcagtacaagcatccatcggcaaggggaagcaagagcaatcccaggtaggtggacgctggacagatccgtgctcacgccgttccttgctccggacttttctggccgcttgtactagctccgctgttttgtttcgccaacatctgaatctgatcgccataccatagtaggaattagcatagcactcaactgcatttggcgccccgtttcaatctcacgggataaactttagcttcctgctaaactttaactatatgaattaaagtgctaaagtttagtttcaattaccaccattagctctcctgtttagattacaaatggctaaaagtagctaaaaaaagctgctaaagtttatctcgcgagattgaaacagggcctaaatagcaatctagccgactggtcagtgatcactgaaagcttattcagaaaataaacaggcctgacatttctgcgctgaggttacattgctcacagttgttcagtagcagcttgtccaacagtacttgcccgttccagcagtacttccaggcaaagtagcaaatttacgcagagcgcaaaggtagaagctagcaacatccaaaggaaataacaaaacactagcagcatccaaagaaatttggtattctgcactccctattgtatttggttgtcattaaccaaacaacacagtttggagtttggactgaactgaacttgaataaggcgcaaccaatcaaggtcctgcttgtgggctttaccgttcagatttcaagaaaaaaaaatataccgtaccttcctggatctcgtatccttcaaagcatttctcagaagattttccagcttctccagctcatctacatctgattcgtcagcattgctctggggagaccaggtcgcaatcttgctcagcatcaactgcaaatctgaagaagcttcatccttgttctgtaccaaaaacaccctaaaaattgctgatagcggttatatgtatcctctatgctgaaaaaggagaaaaaaaatgaatatgatattagctccttgcataatgtactcttggacaatcaacatctatatattcacctcacgtggaacaaaaatgcaggcagttttattggaggacttttgagcatcaatgtgatgctaatggagtttgcattagtggtgtattgatgcaaggtaagctcgttgcttactttagtgagaaattaaatagacattcttaattattctatgtatggcgaagaactgtatgcagaatttcctaattactctaataactaagtcaaaataaactgaaacgtacacatgcctatgtgggttgaatttattgaatcattttcttatgtgatcaaacataagaaagaaaaagataatattattgttgatgctttgtccagataatatactatgttgttccaatttgattgttctataattaggcttaaaatattaaagtacaatatgttaataataatgaacttaaggatgtgacaaaaaatatatataaagagatgtatatagaacaaatttgtgatgcatggtgagtttttgtttagagctaaccgataatgcattctacttgtttatgttcgtcttttgttgttgcaagaggcacatggaggtggattgatggaacattttaatgtcaagaagataaagtgttggtcacatacttcttctatccaaggatgaggcaagatgtagagaggttcgtagcttgatacacgacatgtcaaatagctaaatcgcggttgaacccatatggtttgtatatgttggttcatttcttctatttcttgggtggatatatatatatgaactttgttttggaattgcaaagaactaataggggggatagtatttttgtggtggttgatcatttatctgaagtgataacttttattccctatcataaaagcgacgatgacattcacattgctaacaaagtctttcaagaaatcattcacttgtagaggtagggacttttaaatatatgctcctagcttagcgtcatagatcagttttgcacctctctagtattaaaaacgcctcatccattactactagaggggtagaactgagcagtggtgctaaagtaggggaataggattaaaagtacctctaaagaagaatctatgtctagggttagtccatctttaacgttgcagatttaaagccatatttagatgaagaattgagtcaagaatgactccatttcaattgaggaaggatgataaggacatcacaccttcagatgcgcctactaatcatccgatcgttatataaggtccaatgacttgagcacaaatgtgatgattaaattttcaaaggtaagtgatcctttcgataattttgggaatagattatctaattatgttatcgtgcttgataacattagagagggtcatgaagtaattgaaggtgtggaggtgaagatcaaaaagaacgcccaagaccaattaaaggcattagtccaactcgagtttgagtctgagtggacctttaggaccatcctgtagtaaaacagatgtgcgagacatacacgacatacataatccattttttatgatcaatatatgaatagaaatatattttcataagctaactaataattttgatctaaggtctaatttccaccggaattaatgaaattatcgaaataagtcagcattcaaaatatgttagtgttgtgtcacaattttttggttggctaggcatgtgttgtcttagagcccattaggggacacgttcaaggggtgtgatagccttaggatatataattagtagccactactcatgttaggactcaagttttgcttttaaaaattatctttgaataattgtcattatagggttataaaaccccacttttgtgatcttagtcatacatatattgttagcatttttgttgagctgtgtactttcaagttctttcttgtgttttcgattcactgacatggattagccttcttaacgagatcaaccggattagtgacacggttgatcaccataagagtcgtagtaccacgttccaccaaaacagaagttatcatgaacccgatggaacattaaggactccattatcataacaaatagcgtattaggtaaccttgtgaataattctgattccttgtttggggactaggtagaaaattagtaaaaacatgatgatttggtgatgtttggatgtggggttgtactggttgtactttgggccacttggaaaactaggaatgatatgtgctttagtagtaaaatgattatcgatccttctaatgtgatatttttgtgctatttctagatggattcaagtttattgtgtgctaaaatacccgctgttgggggtcttcttctctgccgaacattttttattacttcttttggatgctgaacaatatagaattatgttttgagttgaataaattagaattttgatctaaaattttgtgataattggtctaattttcttagttgaaagatgaagccgaatatttattcctttatctaaaaaatctaataataacttaaaatgtttaataataggtagacatggatatcggaattctaataactctcgtcgtccaagtatatgagatgcaaccacttttttattctagtctcataatataaggtgttgccttggagcctgaaagcatctaggcccctggttggttttagtgattaatgacaacgtaatattatatgtgactagcgtgtgttttgcagagcaaatggtaagttaggtcgcattacagaaagttgtactacaatggtgaaaacaatccctgagatgagaacttgaagcgacaactgaaacgacgaatcaaaagatgaaagtcttcatattccgagtgttgaaggagttgtagacactcggtatagaattaggtcttctattttgttttagccgtactataaagagaggttgtggatgagtagtttgaccaagagaattctagtgtagtgttggtgcatattcacacttacatctagtgttaggtgtcactctataacacactcacgagttagaacaaaaacggttttgaaaaacaaaaggaaaaacgaagttagggtttctgtcttaggggcaccagactgtccgatgtgcaccagactgtccggtgcaccccctgacagtggtgccagtcagccccgggggcagtgattctgtccccgagaaaatccgagagcaacgagtggagaaaaagaattttagccgccacaccggactgtccggtgtgcaccggacaggtactgttcactgtccgttgtgccatcagcccaactgctagctgtcagaactagccgttggagacgaccgttggcgcaccggtggcacacggactgtccggtgcgcccatacgcagaacagccaggtaacgactagtttggtgagtggggctatttataccccgtccacctaccttattgagtgtcttgctgcccacattgatgaccacatattgctacaacattgcaagcacaacaaagactagtgaggtgactagaaaatcttaattccacgtcaggacctcattagtgcaagtgagagccacctagagcacacaccacatgcattaagcttctcttggtaaagtgaaagtctattgcttgttactcttggtgatcggtatcacctagatggcttggtagcgtttggagcacggtgatcacctcggatgatttgttggtgacccgactcaaagattgtaagcggtcgtgagggatccaccgcgccggagtggcaaaggatcacctcatagtgagtacttagttcttgaccaagggggagcgatacccttgcgcgggtgctccaacgatgactaggaaagagtgccgactcttcgatacctcgacaaaatattggaggagtcttctcaaccttgttttactttccgcatttaattcaagcattttactttattcaattgtttagcaagtagttgaagtgatgtcttaggattgttatctttctagtagtattctcttattgctagtagttaggtgaagttgggctctagcttagggtttaaatatttgctcagggtttaattgttgttgaatttttagaaaaaagcccaattcaccccctcttgggcatcatgattctttcagagccatactaagagcatctctaaccgctctccaacaaataactattaaaaacagattttaagggccatactaagagcatctctaaccgctctccaacaaataactattaaaaactagtttttaggagtatctcaaaaattattagggtagattttaaccatttctccaaccattctcataactaggccaagccactcttggacccacattgatatgtttcacttgtgtattttcttcttccacgactttgacatctgtccaacgaccaaacatataccaccatcaaaggttgttggttgtacgtgggcggacgtggccggtgagagactaccaacggcgagaccgagcgatagcagagatctgatcgacaacggaggttcaatagcgggttgtgagatggtagaagcaggatagtgtgggcgcgttgccagcaacggacgacgaggttgcgcagatggggaggatgcgctcacggaggtagacgacgaggttgcgtgggtggtagcggattgtgaggttgtgtgggc

SEQ ID NO: 212664 - DNA, 2169 bp, Zea Mays
gtgtcccttcgtggggtgcgcccgccacctgccgatgcgacgtgagaggagccaagcgcgcagtgggccctggacacgagagcggtgcggtgtcgtgctggcggcggcggcggcggcggcgaaggataaatagggccgtagggccatcgttttgcattgccgtcgcgtggccgtgggttttcatcgacgaacgacgacgactctgccgcgcgcgtttaggcgcgtcgccgccggccacccggccggccacttcgacgcggctgtggtggtttaaaattctccggctcgccgcccacggcctcgctgcacgtagttgcagaaaaccagacatgttcaggcaagaccagtgggtatgcaaaaacaacagcaaagtggctcggcatgtcgacagccagctgctacttctacttctacatataaaccacgcgctggcatgaactccactccagcatggatagacgacatcatcgcacaaatcacataccaggtcaaggcaccacgtttcacaaacctagtgaacacccaagaactattatgcaataccatcattttgctcgatagattttcctagcccagttgtttcatctgagcaagtgtctgtaggaactaaaacacagtagtatgctgtatatactgtcaagcatgaaacgcaaccagatcagctgcaggatttgcagcaccaagctctggccattaggtaggctgcatatcacaacacacaaagggaacatcaaactacatacactagctccgtcccctccagggacactgcaggttggcaggcccaaagctagcacagggtctcgcaacccacaaggtcataatcagtacaagcatccatcggcaaggggaagcaagagcaatcccaggtaggtggacgctggacagatccgtgctcacgccgttccttgctccggacttttctggccgcttgtactagctccgctgttttgtttcgccaacatctgaatctgatcgccataccatagtaggaattagcatagcactcaactgcatttggcgccccgtttcaatctcacgggataaactttagcttcctgctaaactttaactatatgaattaaagtgctaaagtttagtttcaattaccaccattagctctcctgtttagattacaaatggctaaaagtagctaaaaaaagctgctaaagtttatctcgcgagattgaaacagggcctaaatagcaatctagccgactggtcagtgatcactgaaagcttattcagaaaataaacaggtaagatatatatggcatcctgctatggttcctaactttttacaccacttgtgcctaacagatcaagctctctcacgagggtttaattttcatgcaaggcctgacatttctgcgctgaggttacattgctcacagttgttcagtagcagcttgtccaacagtacttgcccgttccagcagtacttccaggcaaagtagcaaatttacgcagagcgcaaaggtagaagctagcaacatccaaaggaaataacaaaacactagcagcatccaaagaaatttggtattctgcactccctattgtatttggttgtcattaaccaaacaacacagtttggagtttggactgaactgaacttgaataaggcgcaaccaatcaaggtcctgcttgtgggctttaccgttcagatttcaagaaaaaaaaatataccgtaccttcctggatctcgtatccttcaaagcatttctcagaagattttccagcttctccagctcatctacatctgattcgtcagcattgctctggggagacctgccggtttgaagaaattgtgattatttatcaaaaatgggaaaccagagtgggtggaaatcctgagttctgggtgtgtaccaggtcgcaatcttgctcagcatcaactgcaaatctgaagaagcttcatccttgttctgtaccaaaaacaccctaaaaattgctgatagcggttatatgtatcctctatgctgaaaaaggagaaaaaaaatgaatatgatattagctccttgcataatgtactcttggacaatcaacatctatatattcacctcacgtggaacaaaaatgcaggcagttttattggaggtcatagaatgtggaggttatagaggatggcggggcgccatgcaaatagaatgtctatgactgttttcaaac

SEQ ID NO: 212665 - DNA, 5761 bp, Zea Mays
gtgtcccttcgtggggtgcgcccgccacctgccgatgcgacgtgagaggagccaagcgcgcagtgggccctggacacgagagcggtgcggtgtcgtgctggcggcggcggcggcggcggcgaaggataaatagggccgtagggccatcgttttgcattgccgtcgcgtggccgtgggttttcatcgacgaacgacgacgactctgccgcgcgcgtttaggcgcgtcgccgccggccacccggccggccacttcgacgcggctgtggtggtttaaaattctccggctcgccgcccacggcctcgctgcacgtagttgcagatcaagctctctcacgagggtttaattttcatgcaaggcctgacatttctgcgctgaggttacattgctcacagttgttcagtagcagcttgtccaacagtacttgcccgttccagcagtacttccaggcaaagtagcaaatttacgcagagcgcaaaggtagaagctagcaacatccaaaggaaataacaaaacactagcagcatccaaagaaatttggtattctgcactccctattgtatttggttgtcattaaccaaacaacacagtttggagtttggactgaactgaacttgaataaggcgcaaccaatcaaggtcctgcttgtgggctttaccgttcagatttcaagaaaaaaaaatataccgtaccttcctggatctcgtatccttcaaagcatttctcagaagattttccagcttctccagctcatctacatctgattcgtcagcattgctctggggagacctgccggtttgaagaaattgtgattatttatcaaaaatgggaaaccagagtgggtggaaatcctgagttctgggtgtgtaccaggtcgcaatcttgctcagcatcaactgcaaatctgaagaagcttcatccttgttctgtaccaaaaacaccctagtaagctatatttatcgtaaatttcaatattatatatttgctctggtattctacatactgtacaaacaggacattctgttctgcatagtgtgaaaaacatagcattttggttggtgccggcaactggcacagtatgtaaaaacattctttctaaaactatgataaaaaaagcagcgaagctgtaggctgcatcatatgcgttgtaaaagctacatcaagatctttacatcgtttctatttcgatcgtcatttatattccttccttctccagaaaattgctgatagcggttatatgtatcctctatgctgaaaaaggagaaaaaaaatgaatatgatattagctccttgcataatgtactcttggacaatcaacatctatatattcacctcacgtggaacaaaaatgcaggcagttttattggaggtgagtatattattatgaattacatcctgaatcttacagtcaaatacagtttattagtatgatgtcctttttcctcatgatattgagttcatgccctggtccatcacattccatactactattctactctacttagttctcataaaggtttcggaccactgtttctctagatgttttaagagttttcgttgctatattcttgatcatataaaaacatcagaactgagccatgatacaacctatctgtcacatctaactttacatggtctttgatgcatatcttggaccaccaatatcatctagaatatattttcaagattttataactattttattatacaaatatgcaaatatatcatgtatccaaacctaaagatttaaaagttattgatcttcgtagttttcaaggtttgaccaaattttgtcctaaaatgacatgttgtatcaaagaggagctactagtcatatacgcaagtggataaccaatgaaatgcttgtatcaagcaattacacaagtaaatgtaaatacctaggacattttttgtttacgaactccttatttatattcttttaccttttcttcccttgaatcataatgcggataaatctggtatgtgggtttgttatcataatttcaaaaataaagggtgtgtatttagaagtagatcactgggaaaaaaggttcggatatttatatgaaggtctaggatcaaaccaaaaaggcaataaaaatagactttctatggacaaggattttaaaggaaaaacatggacttccgatgggtgatacagattagaaaaaatatgcattcatgggcttcaaatctattcagttgaagaatgaatgaaagataatgtatacctttgagagttctcgatatgatgtcatctagattccagatgtccaagttaactgtttgaataatagacttttctctaccatatatgccctatcatatttattaatgtaatgtgatgttccttgtatctgactgtagagtttggaccactacataccgagacaaccatctaggctgtctaggttctgaagttatgattaggtactagagaagtcaaagtgactagctctatatgctccatgtggaaaagccaagaagtttcagggcgtgtagggtgggttctaagaaggcgcagtcgttagctaaatgtttggttgggctttttgcactctttctaaatatttgtaattaatttccccatgtttcccgagttggatttagctttctaagttttcttccacacactcccaacaagaagtttccatcttcaaatgttctgaatctactagacacagtatgggcacgcctttttttcatgacaggttttgtgttgggggtgctagagtctagttgatgcacatggccctgcccaatagaagttggttttcttccattgatatataagtgaagttgatagccaagtttttcttgtctcctctttttctttcccttccttgaaggctaaatatgctcagttgagaatgaaagctgagaggacatcgaacaaatgaaataagtggagtatacattcaaaacttgagagcgacccccaagtgataggtttttaccttttagggcaacaaaagatatgctctaggaaaaaatgataagagaagagagtctagtaagcttttaggcatcatgcccatgcactatagaaattgaattgtttaaaccataatattttggacaatagaaacttgtaataaattgtgacaaagaatgtgaatttatgatttatctccaaccaagttatgagcacggttgatcaactaacataatattatcgaaagcactttcgatattatatatatcattgtataaatactcaactacatgtcaatttcataattagttgttatttttgtttgtgacttattagcgtgtcataattttcccattgttatatgtttatgttatttttcttatattagttgcacagttataggttctctctcatatgttaacttctcaacaaatattttagatattttatatttagttgttagaagttgttaaaagtatatttggtagtctagatattgtgtctcgtctactgtcatatatatccatgatttgccttgtctcttactcatgtgctctatataaactgcctaagggcttaatgcaatacatcaatccttgatggcaaacccccctaacatggtataacgagtttaggctatgacttaggcttccccttctgctgtcgtcgtcgcgctgcctcgaggaaattgatctccatcaagagttgcgctctcgtagttaggatgcatgactaatccttctgatttgtcgcgttcatcgtcgttattgtattgtcaagcttcaacaaatcagaggctcgctggtttctctacatgtcatggtggttgttgggctctcctaccggttggatcatgcctttgtcctttgtgcatgcaatcatggtgatggttgtggggcagacgacatccacgtgttgtcgtggtgacgattctggagaggccgtgtgagcccatgggctttgtcacccttgacccctagggtgctaagagacgaattcaagagcatattgcctaccatgtatttcctatgaaagttggctaggagatacctaagccaaaagatgaggacaacacgaaggagattgaagctcgagagatgattcagttaccttataaattcaatcccttcagcatcttcataaagccgagcaatgagtggctcattatggtggagacagttgctaacaaagttttatgcaactatattgtgaaagagatcatctacttagtgcgatagtgagtggcaataaagagaatacataatcgtgtgatcaaagcatatgacttagaatatctagactaccccaacctcattgtcgatcatgatgctagattgcagaggaaatgcaaagtaagaattatagataggggttgagtgattagtgaaaaggaggctagagggggccctccgacaaagtccttgaagccaaaggcaaaatacaagggtagtgagattgtggcaaaggaaaagttgctagcacccaagcgctttgaaaggaaacaccatgaaggtgagaagtagaaggtctaggtcgaggcctctaaggttgcctcagagaagcctgctggcattgcaaagacccctaccactgaagaacatgtacgagctgttgttgaagagtcttgttctgaacgctcagaaaattgaggtcgagaaaaagcccgcctaggaggatacatcaggcgacaagctcaaagaggcattgcctagcctcccctgcatagtgaatccaatggatgcgatctttggagatttatttgaggagaaaagcaacaaagccattaagacccctgccaaagaaaaagaggatgttggttgtgctaggctatgtgcctctccctgttagccaagtcgagcctttgtgatcgtggtttatctctttctccctctttcagtcttctgatcgaggataaggagggtgagttgagttaggagaatggactatttgtgggtacttggtgatgtaacaaaatttgttgttgttgtgggtccctttttcttcctaattggtcgggttttgcgccatcgtcgcctattttcatccttgtattgcccctacatcaccgtcgactacgtcgttgtgcgcctctctcacatggtatacctggaccgttcatgctcttcgtcatcttctttaagcaccactgttgcaacactctagcaccaccatgactccttgcgcaatgcagatctcaccactgccactctgggtccctagatgtgtcaaccatctacttctttgacttcgtccatcacaatctcgttgccagtgtcgtcctctgtcctcgtctacttcatccacaccgacaaccattggtgcattgacacatgcttcctcgttgttcttctacacattgcaactatcgcggaggccttctctgctagtcactttagacactgacgtatggttggggtcctctacctagtatgtcttttgctagcaacactggtgcgtaccttcatccccggtgtgtttttgggcttagctagtaaacctcacacatgcctcagccacgttgattcgacaatgtcgacttcgccatcgaccttctccattgactgccttgactgcatcaccatctttgtctatggtgcttccttctattcgccaccatcaccacaacacatcaagcacacgacttgtgtggctcctacttcttagtgacctcgatagctttcatcgaccacaactatcctttgcaagattatcgaccacaactgttcatccttgtactaggctacctcaacatcgacacagagaactatcgtctacatcagcttctcgtcggtttcttctccaagtcgttgcatctgcactccgacaac

SEQ ID NO: 212666 - DNA, 4455 bp, Zea Mays
gtgtcccttcgtggggtgcgcccgccacctgccgatgcgacgtgagaggagccaagcgcgcagtgggccctggacacgagagcggtgcggtgtcgtgctggcggcggcggcggcggcggcgaaggataaatagggccgtagggccatcgttttgcattgccgtcgcgtggccgtgggttttcatcgacgaacgacgacgactctgccgcgcgcgtttaggcgcgtcgccgccggccacccggccggccacttcgacgcggctgtggtggtttaaaattctccggctcgccgcccacggcctcgctgcacgtagttgcaggcctgacatttctgcgctgaggttacattgctcacagttgttcagtagcagcttgtccaacagtacttgcccgttccagcagtacttccaggcaaagtagcaaatttacgcagagcgcaaaggtagaagctagcaacatccaaaggaaataacaaaacactagcagcatccaaagaaatttggtattctgcactccctattgtatttggttgtcattaaccaaacaacacagtttggagtttggactgaactgaacttgaataaggcgcaaccaatcaaggtcctgcttgtgggctttaccgttcagatttcaagaaaaaaaaatataccgtaccttcctggatctcgtatccttcaaagcatttctcagaagattttccagcttctccagctcatctacatctgattcgtcagcattgctctggggagacctgccggtttgaagaaattgtgattatttatcaaaaatgggaaaccagagtgggtggaaatcctgagttctgggtgtgtaccaggtcgcaatcttgctcagcatcaactgcaaatctgaagaagcttcatccttgttctgtaccaaaaacaccctaaaaattgctgatagcggttatatgtatcctctatgctgaaaaaggagaaaaaaaatgaatatgatattagctccttgcataatgtactcttggacaatcaacatctatatattcacctcacgtggaacaaaaatgcaggcagttttattggagagtttggaccactacataccgagacaaccatctaggctgtctaggttctgaagttatgattaggtactagagaagtcaaagtgactagctctatatgctccatgtggaaaagccaagaagtttcagggcgtgtagggtgggttctaagaaggcgcagtcgttagctaaatgtttggttgggctttttgcactctttctaaatatttgtaattaatttccccatgtttcccgagttggatttagctttctaagttttcttccacacactcccaacaagaagtttccatcttcaaatgttctgaatctactagacacagtatgggcacgcctttttttcatgacaggttttgtgttgggggtgctagagtctagttgatgcacatggccctgcccaatagaagttggttttcttccattgatatataagtgaagttgatagccaagtttttcttgtctcctctttttctttcccttccttgaaggctaaatatgctcagttgagaatgaaagctgagaggacatcgaacaaatgaaataagtggagtatacattcaaaacttgagagcgacccccaagtgataggtttttaccttttagggcaacaaaagatatgctctaggaaaaaatgataagagaagagagtctagtaagcttttaggcatcatgcccatgcactatagaaattgaattgtttaaaccataatattttggacaatagaaacttgtaataaattgtgacaaagaatgtgaatttatgatttatctccaaccaagttatgagcacggttgatcaactaacataatattatcgaaagcactttcgatattatatatatcattgtataaatactcaactacatgtcaatttcataattagttgttatttttgtttgtgacttattagcgtgtcataattttcccattgttatatgtttatgttatttttcttatattagttgcacagttataggttctctctcatatgttaacttctcaacaaatattttagatattttatatttagttgttagaagttgttaaaagtatatttggtagtctagatattgtgtctcgtctactgtcatatatatccatgatttgccttgtctcttactcatgtgctctatataaactgcctaagggcttaatgcaatacatcaatccttgatggcaaacccccctaacatggtataacgagtttaggctatgacttaggcttccccttctgctgtcgtcgtcgcgctgcctcgaggaaattgatctccatcaagagttgcgctctcgtagttaggatgcatgactaatccttctgatttgtcgcgttcatcgtcgttattgtattgtcaagcttcaacaaatcagaggctcgctggtttctctacatgtcatggtggttgttgggctctcctaccggttggatcatgcctttgtcctttgtgcatgcaatcatggtgatggttgtggggcagacgacatccacgtgttgtcgtggtgacgattctggagaggccgtgtgagcccatgggctttgtcacccttgacccctagggtgctaagagacgaattcaagagcatattgcctaccatgtatttcctatgaaagttggctaggagatacctaagccaaaagatgaggacaacacgaaggagattgaagctcgagagatgattcagttaccttataaattcaatcccttcagcatcttcataaagccgagcaatgagtggctcattatggtggagacagttgctaacaaagttttatgcaactatattgtgaaagagatcatctacttagtgcgatagtgagtggcaataaagagaatacataatcgtgtgatcaaagcatatgacttagaatatctagactaccccaacctcattgtcgatcatgatgctagattgcagaggaaatgcaaagtaagaattatagataggggttgagtgattagtgaaaaggaggctagagggggccctccgacaaagtccttgaagccaaaggcaaaatacaagggtagtgagattgtggcaaaggaaaagttgctagcacccaagcgctttgaaaggaaacaccatgaaggtgagaagtagaaggtctaggtcgaggcctctaaggttgcctcagagaagcctgctggcattgcaaagacccctaccactgaagaacatgtacgagctgttgttgaagagtcttgttctgaacgctcagaaaattgaggtcgagaaaaagcccgcctaggaggatacatcaggcgacaagctcaaagaggcattgcctagcctcccctgcatagtgaatccaatggatgcgatctttggagatttatttgaggagaaaagcaacaaagccattaagacccctgccaaagaaaaagaggatgttggttgtgctaggctatgtgcctctccctgttagccaagtcgagcctttgtgatcgtggtttatctctttctccctctttcagtcttctgatcgaggataaggagggtgagttgagttaggagaatggactatttgtgggtacttggtgatgtaacaaaatttgttgttgttgtgggtccctttttcttcctaattggtcgggttttgcgccatcgtcgcctattttcatccttgtattgcccctacatcaccgtcgactacgtcgttgtgcgcctctctcacatggtatacctggaccgttcatgctcttcgtcatcttctttaagcaccactgttgcaacactctagcaccaccatgactccttgcgcaatgcagatctcaccactgccactctgggtccctagatgtgtcaaccatctacttctttgacttcgtccatcacaatctcgttgccagtgtcgtcctctgtcctcgtctacttcatccacaccgacaaccattggtgcattgacacatgcttcctcgttgttcttctacacattgcaactatcgcggaggccttctctgctagtcactttagacactgacgtatggttggggtcctctacctagtatgtcttttgctagcaacactggtgcgtaccttcatccccggtgtgtttttgggcttagctagtaaacctcacacatgcctcagccacgttgattcgacaatgtcgacttcgccatcgaccttctccattgactgccttgactgcatcaccatctttgtctatggtgcttccttctattcgccaccatcaccacaacacatcaagcacacgacttgtgtggctcctacttcttagtgacctcgatagctttcatcgaccacaactatcctttgcaagattatcgaccacaactgttcatccttgtactaggctacctcaacatcgacacagagaactatcgtctacatcagcttctcgtcggtttcttctccaagtcgttgcatctgcactccgacaac

SEQ ID NO: 212667 - DNA, 6393 bp, Zea Mays
gtgtcccttcgtggggtgcgcccgccacctgccgatgcgacgtgagaggagccaagcgcgcagtgggccctggacacgagagcggtgcggtgtcgtgctggcggcggcggcggcggcggcgaaggataaatagggccgtagggccatcgttttgcattgccgtcgcgtggccgtgggttttcatcgacgaacgacgacgactctgccgcgcgcgtttaggcgcgtcgccgccggccacccggccggccacttcgacgcggctgtggtggtttaaaattctccggctcgccgcccacggcctcgctgcacgtagttgcagaaaaccagacatgttcaggcaagaccagtgggtatgcaaaaacaacagcaaagtggctcggcatgtcgacagccagctgctacttctacttctacatataaaccacgcgctggcatgaactccactccagcatggatagacgacatcatcgcacaaatcacataccaggtcaaggcaccacgtttcacaaacctagtgaacacccaagaactattatgcaataccatcattttgctcgatagattttcctagcccagttgtttcatctgagcaagtgtctgtaggaactaaaacacagtagtatgctgtatatactgtcaagcatgaaacgcaaccagatcagctgcaggatttgcagcaccaagctctggccattaggtaggctgcatatcacaacacacaaagggaacatcaaactacatacactagctccgtcccctccagggacactgcaggttggcaggcccaaagctagcacagggtctcgcaacccacaaggtcataatcagtacaagcatccatcggcaaggggaagcaagagcaatcccaggtaggtggacgctggacagatccgtgctcacgccgttccttgctccggacttttctggccgcttgtactagctccgctgttttgtttcgccaacatctgaatctgatcgccataccatagtaggaattagcatagcactcaactgcatttggcgccccgtttcaatctcacgggataaactttagcttcctgctaaactttaactatatgaattaaagtgctaaagtttagtttcaattaccaccattagctctcctgtttagattacaaatggctaaaagtagctaaaaaaagctgctaaagtttatctcgcgagattgaaacagggcctaaatagcaatctagccgactggtcagtgatcactgaaagcttattcagaaaataaacaggcctgacatttctgcgctgaggttacattgctcacagttgttcagtagcagcttgtccaacagtacttgcccgttccagcagtacttccaggcaaagtagcaaatttacgcagagcgcaaaggtagaagctagcaacatccaaaggaaataacaaaacactagcagcatccaaagaaatttggtattctgcactccctattgtatttggttgtcattaaccaaacaacacagtttggagtttggactgaactgaacttgaataaggcgcaaccaatcaaggtcctgcttgtgggctttaccgttcagatttcaagaaaaaaaaatataccgtaccttcctggatctcgtatccttcaaagcatttctcagaagattttccagcttctccagctcatctacatctgattcgtcagcattgctctggggagacctgccggtttgaagaaattgtgattatttatcaaaaatgggaaaccagagtgggtggaaatcctgagttctgggtgtgtaccaggtcgcaatcttgctcagcatcaactgcaaatctgaagaagcttcatccttgttctgtaccaaaaacaccctaaaaattgctgatagcggttatatgtatcctctatgctgaaaaaggagaaaaaaaatgaatatgatattagctccttgcataatgtactcttggacaatcaacatctatatattcacctcacgtggaacaaaaatgcaggcagttttattggaggtgagtatattattatgaattacatcctgaatcttacagtcaaatacagtttattagtatgatgtcctttttcctcatgatattgagttcatgccctggtccatcacattccatactactattctactctacttagttctcataaaggtttcggaccactgtttctctagatgttttaagagttttcgttgctatattcttgatcatataaaaacatcagaactgagccatgatacaacctatctgtcacatctaactttacatggtctttgatgcatatcttggaccaccaatatcatctagaatatattttcaagattttataactattttattatacaaatatgcaaatatatcatgtatccaaacctaaagatttaaaagttattgatcttcgtagttttcaaggtttgaccaaattttgtcctaaaatgacatgttgtatcaaagaggagctactagtcatatacgcaagtggataaccaatgaaatgcttgtatcaagcaattacacaagtaaatgtaaatacctaggacattttttgtttacgaactccttatttatattcttttaccttttcttcccttgaatcataatgcggataaatctggtatgtgggtttgttatcataatttcaaaaataaagggtgtgtatttagaagtagatcactgggaaaaaaggttcggatatttatatgaaggtctaggatcaaaccaaaaaggcaataaaaatagactttctatggacaaggattttaaaggaaaaacatggacttccgatgggtgatacagattagaaaaaatatgcattcatgggcttcaaatctattcagttgaagaatgaatgaaagataatgtatacctttgagagttctcgatatgatgtcatctagattccagatgtccaagttaactgtttgaataatagacttttctctaccatatatgccctatcatatttattaatgtaatgtgatgttccttgtatctgactgtagagtttggaccactacataccgagacaaccatctaggctgtctaggttctgaagttatgattaggtactagagaagtcaaagtgactagctctatatgctccatgtggaaaagccaagaagtttcagggcgtgtagggtgggttctaagaaggcgcagtcgttagctaaatgtttggttgggctttttgcactctttctaaatatttgtaattaatttccccatgtttcccgagttggatttagctttctaagttttcttccacacactcccaacaagaagtttccatcttcaaatgttctgaatctactagacacagtatgggcacgcctttttttcatgacaggttttgtgttgggggtgctagagtctagttgatgcacatggccctgcccaatagaagttggttttcttccattgatatataagtgaagttgatagccaagtttttcttgtctcctctttttctttcccttccttgaaggctaaatatgctcagttgagaatgaaagctgagaggacatcgaacaaatgaaataagtggagtatacattcaaaacttgagagcgacccccaagtgataggtttttaccttttagggcaacaaaagatatgctctaggaaaaaatgataagagaagagagtctagtaagcttttaggcatcatgcccatgcactatagaaattgaattgtttaaaccataatattttggacaatagaaacttgtaataaattgtgacaaagaatgtgaatttatgatttatctccaaccaagttatgagcacggttgatcaactaacataatattatcgaaagcactttcgatattatatatatcattgtataaatactcaactacatgtcaatttcataattagttgttatttttgtttgtgacttattagcgtgtcataattttcccattgttatatgtttatgttatttttcttatattagttgcacagttataggttctctctcatatgttaacttctcaacaaatattttagatattttatatttagttgttagaagttgttaaaagtatatttggtagtctagatattgtgtctcgtctactgtcatatatatccatgatttgccttgtctcttactcatgtgctctatataaactgcctaagggcttaatgcaatacatcaatccttgatggcaaacccccctaacatggtataacgagtttaggctatgacttaggcttccccttctgctgtcgtcgtcgcgctgcctcgaggaaattgatctccatcaagagttgcgctctcgtagttaggatgcatgactaatccttctgatttgtcgcgttcatcgtcgttattgtattgtcaagcttcaacaaatcagaggctcgctggtttctctacatgtcatggtggttgttgggctctcctaccggttggatcatgcctttgtcctttgtgcatgcaatcatggtgatggttgtggggcagacgacatccacgtgttgtcgtggtgacgattctggagaggccgtgtgagcccatgggctttgtcacccttgacccctagggtgctaagagacgaattcaagagcatattgcctaccatgtatttcctatgaaagttggctaggagatacctaagccaaaagatgaggacaacacgaaggagattgaagctcgagagatgattcagttaccttataaattcaatcccttcagcatcttcataaagccgagcaatgagtggctcattatggtggagacagttgctaacaaagttttatgcaactatattgtgaaagagatcatctacttagtgcgatagtgagtggcaataaagagaatacataatcgtgtgatcaaagcatatgacttagaatatctagactaccccaacctcattgtcgatcatgatgctagattgcagaggaaatgcaaagtaagaattatagataggggttgagtgattagtgaaaaggaggctagagggggccctccgacaaagtccttgaagccaaaggcaaaatacaagggtagtgagattgtggcaaaggaaaagttgctagcacccaagcgctttgaaaggaaacaccatgaaggtgagaagtagaaggtctaggtcgaggcctctaaggttgcctcagagaagcctgctggcattgcaaagacccctaccactgaagaacatgtacgagctgttgttgaagagtcttgttctgaacgctcagaaaattgaggtcgagaaaaagcccgcctaggaggatacatcaggcgacaagctcaaagaggcattgcctagcctcccctgcatagtgaatccaatggatgcgatctttggagatttatttgaggagaaaagcaacaaagccattaagacccctgccaaagaaaaagaggatgttggttgtgctaggctatgtgcctctccctgttagccaagtcgagcctttgtgatcgtggtttatctctttctccctctttcagtcttctgatcgaggataaggagggtgagttgagttaggagaatggactatttgtgggtacttggtgatgtaacaaaatttgttgttgttgtgggtccctttttcttcctaattggtcgggttttgcgccatcgtcgcctattttcatccttgtattgcccctacatcaccgtcgactacgtcgttgtgcgcctctctcacatggtatacctggaccgttcatgctcttcgtcatcttctttaagcaccactgttgcaacactctagcaccaccatgactccttgcgcaatgcagatctcaccactgccactctgggtccctagatgtgtcaaccatctacttctttgacttcgtccatcacaatctcgttgccagtgtcgtcctctgtcctcgtctacttcatccacaccgacaaccattggtgcattgacacatgcttcctcgttgttcttctacacattgcaactatcgcggaggccttctctgctagtcactttagacactgacgtatggttggggtcctctacctagtatgtcttttgctagcaacactggtgcgtaccttcatccccggtgtgtttttgggcttagctagtaaacctcacacatgcctcagccacgttgattcgacaatgtcgacttcgccatcgaccttctccattgactgccttgactgcatcaccatctttgtctatggtgcttccttctattcgccaccatcaccacaacacatcaagcacacgacttgtgtggctcctacttcttagtgacctcgatagctttcatcgaccacaactatcctttgcaagattatcgaccacaactgttcatccttgtactaggctacctcaacatcgacacagagaactatcgtctacatcagcttctcgtcggtttcttctccaagtcgttgcatctgcactccgacaac

SEQ ID NO: 212668 - DNA, 5812 bp, Zea Mays
gtgtcccttcgtggggtgcgcccgccacctgccgatgcgacgtgagaggagccaagcgcgcagtgggccctggacacgagagcggtgcggtgtcgtgctggcggcggcggcggcggcggcgaaggataaatagggccgtagggccatcgttttgcattgccgtcgcgtggccgtgggttttcatcgacgaacgacgacgactctgccgcgcgcgtttaggcgcgtcgccgccggccacccggccggccacttcgacgcggctgtggtggtttaaaattctccggctcgccgcccacggcctcgctgcacgtagttgcaggtgagtgaggttcttcgattccccccaaacccggcccatctccgacgatccattatttgttcgtccatatgaaaatgcatctctttttgtacccagttgttacctacatgcagcttttactgcttcattcagttatggtcgtgtacatcttcagaaaaccagacatgttcaggcaagaccagtgggtatgcaaaaacaacagcaaagtggctcggcatgtcgacagccagctgctacttctacttctacatataaaccacgcgctggcatgaactccactccagcatggatagacgacatcatcgcacaaatcacataccagatcaagctctctcacgagggtttaattttcatgcaaggcctgacatttctgcgctgaggttacattgctcacagttgttcagtagcagcttgtccaacagtacttgcccgttccagcagtacttccaggcaaagtagcaaatttacgcagagcgcaaaggtagaagctagcaacatccaaaggaaataacaaaacactagcagcatccaaagaaatttggtattctgcactccctattgtatttggttgtcattaaccaaacaacacagtttggagtttggactgaactgaacttgaataaggcgcaaccaatcaaggtcctgcttgtgggctttaccgttcagatttcaagaaaaaaaaatataccgtaccttcctggatctcgtatccttcaaagcatttctcagaagattttccagcttctccagctcatctacatctgattcgtcagcattgctctggggagacctgccggtttgaagaaattgtgattatttatcaaaaatgggaaaccagagtgggtggaaatcctgagttctgggtgtgtaccaggtcgcaatcttgctcagcatcaactgcaaatctgaagaagcttcatccttgttctgtaccaaaaacaccctaaaaattgctgatagcggttatatgtatcctctatgctgaaaaaggagaaaaaaaatgaatatgatattagctccttgcataatgtactcttggacaatcaacatctatatattcacctcacgtggaacaaaaatgcaggcagttttattggaggtgagtatattattatgaattacatcctgaatcttacagtcaaatacagtttattagtatgatgtcctttttcctcatgatattgagttcatgccctggtccatcacattccatactactattctactctacttagttctcataaaggtttcggaccactgtttctctagatgttttaagagttttcgttgctatattcttgatcatataaaaacatcagaactgagccatgatacaacctatctgtcacatctaactttacatggtctttgatgcatatcttggaccaccaatatcatctagaatatattttcaagattttataactattttattatacaaatatgcaaatatatcatgtatccaaacctaaagatttaaaagttattgatcttcgtagttttcaaggtttgaccaaattttgtcctaaaatgacatgttgtatcaaagaggagctactagtcatatacgcaagtggataaccaatgaaatgcttgtatcaagcaattacacaagtaaatgtaaatacctaggacattttttgtttacgaactccttatttatattcttttaccttttcttcccttgaatcataatgcggataaatctggtatgtgggtttgttatcataatttcaaaaataaagggtgtgtatttagaagtagatcactgggaaaaaaggttcggatatttatatgaaggtctaggatcaaaccaaaaaggcaataaaaatagactttctatggacaaggattttaaaggaaaaacatggacttccgatgggtgatacagattagaaaaaatatgcattcatgggcttcaaatctattcagttgaagaatgaatgaaagataatgtatacctttgagagttctcgatatgatgtcatctagattccagatgtccaagttaactgtttgaataatagacttttctctaccatatatgccctatcatatttattaatgtaatgtgatgttccttgtatctgactgtagagtttggaccactacataccgagacaaccatctaggctgtctaggttctgaagttatgattaggtactagagaagtcaaagtgactagctctatatgctccatgtggaaaagccaagaagtttcagggcgtgtagggtgggttctaagaaggcgcagtcgttagctaaatgtttggttgggctttttgcactctttctaaatatttgtaattaatttccccatgtttcccgagttggatttagctttctaagttttcttccacacactcccaacaagaagtttccatcttcaaatgttctgaatctactagacacagtatgggcacgcctttttttcatgacaggttttgtgttgggggtgctagagtctagttgatgcacatggccctgcccaatagaagttggttttcttccattgatatataagtgaagttgatagccaagtttttcttgtctcctctttttctttcccttccttgaaggctaaatatgctcagttgagaatgaaagctgagaggacatcgaacaaatgaaataagtggagtatacattcaaaacttgagagcgacccccaagtgataggtttttaccttttagggcaacaaaagatatgctctaggaaaaaatgataagagaagagagtctagtaagcttttaggcatcatgcccatgcactatagaaattgaattgtttaaaccataatattttggacaatagaaacttgtaataaattgtgacaaagaatgtgaatttatgatttatctccaaccaagttatgagcacggttgatcaactaacataatattatcgaaagcactttcgatattatatatatcattgtataaatactcaactacatgtcaatttcataattagttgttatttttgtttgtgacttattagcgtgtcataattttcccattgttatatgtttatgttatttttcttatattagttgcacagttataggttctctctcatatgttaacttctcaacaaatattttagatattttatatttagttgttagaagttgttaaaagtatatttggtagtctagatattgtgtctcgtctactgtcatatatatccatgatttgccttgtctcttactcatgtgctctatataaactgcctaagggcttaatgcaatacatcaatccttgatggcaaacccccctaacatggtataacgagtttaggctatgacttaggcttccccttctgctgtcgtcgtcgcgctgcctcgaggaaattgatctccatcaagagttgcgctctcgtagttaggatgcatgactaatccttctgatttgtcgcgttcatcgtcgttattgtattgtcaagcttcaacaaatcagaggctcgctggtttctctacatgtcatggtggttgttgggctctcctaccggttggatcatgcctttgtcctttgtgcatgcaatcatggtgatggttgtggggcagacgacatccacgtgttgtcgtggtgacgattctggagaggccgtgtgagcccatgggctttgtcacccttgacccctagggtgctaagagacgaattcaagagcatattgcctaccatgtatttcctatgaaagttggctaggagatacctaagccaaaagatgaggacaacacgaaggagattgaagctcgagagatgattcagttaccttataaattcaatcccttcagcatcttcataaagccgagcaatgagtggctcattatggtggagacagttgctaacaaagttttatgcaactatattgtgaaagagatcatctacttagtgcgatagtgagtggcaataaagagaatacataatcgtgtgatcaaagcatatgacttagaatatctagactaccccaacctcattgtcgatcatgatgctagattgcagaggaaatgcaaagtaagaattatagataggggttgagtgattagtgaaaaggaggctagagggggccctccgacaaagtccttgaagccaaaggcaaaatacaagggtagtgagattgtggcaaaggaaaagttgctagcacccaagcgctttgaaaggaaacaccatgaaggtgagaagtagaaggtctaggtcgaggcctctaaggttgcctcagagaagcctgctggcattgcaaagacccctaccactgaagaacatgtacgagctgttgttgaagagtcttgttctgaacgctcagaaaattgaggtcgagaaaaagcccgcctaggaggatacatcaggcgacaagctcaaagaggcattgcctagcctcccctgcatagtgaatccaatggatgcgatctttggagatttatttgaggagaaaagcaacaaagccattaagacccctgccaaagaaaaagaggatgttggttgtgctaggctatgtgcctctccctgttagccaagtcgagcctttgtgatcgtggtttatctctttctccctctttcagtcttctgatcgaggataaggagggtgagttgagttaggagaatggactatttgtgggtacttggtgatgtaacaaaatttgttgttgttgtgggtccctttttcttcctaattggtcgggttttgcgccatcgtcgcctattttcatccttgtattgcccctacatcaccgtcgactacgtcgttgtgcgcctctctcacatggtatacctggaccgttcatgctcttcgtcatcttctttaagcaccactgttgcaacactctagcaccaccatgactccttgcgcaatgcagatctcaccactgccactctgggtccctagatgtgtcaaccatctacttctttgacttcgtccatcacaatctcgttgccagtgtcgtcctctgtcctcgtctacttcatccacaccgacaaccattggtgcattgacacatgcttcctcgttgttcttctacacattgcaactatcgcggaggccttctctgctagtcactttagacactgacgtatggttggggtcctctacctagtatgtcttttgctagcaacactggtgcgtaccttcatccccggtgtgtttttgggcttagctagtaaacctcacacatgcctcagccacgttgattcgacaatgtcgacttcgccatcgaccttctccattgactgccttgactgcatcaccatctttgtctatggtgcttccttctattcgccaccatcaccacaacacatcaagcacacgacttgtgtggctcctacttcttagtgacctcgatagctttcatcgaccacaactatcctttgcaagattatcgaccacaactgttcatccttgtactaggctacctcaacatcgacacagagaactatcgtctacatcagcttctcgtcggtttcttctccaagtcgttgcatctgcactccgacaac

SEQ ID NO: 212669 - DNA, 6762 bp, Zea Mays
gtgtcccttcgtggggtgcgcccgccacctgccgatgcgacgtgagaggagccaagcgcgcagtgggccctggacacgagagcggtgcggtgtcgtgctggcggcggcggcggcggcggcgaaggataaatagggccgtagggccatcgttttgcattgccgtcgcgtggccgtgggttttcatcgacgaacgacgacgactctgccgcgcgcgtttaggcgcgtcgccgccggccacccggccggccacttcgacgcggctgtggtggtttaaaattctccggctcgccgcccacggcctcgctgcacgtagttgcagaaaaccagacatgttcaggcaagaccagtgggtatgcaaaaacaacagcaaagtggctcggcatgtcgacagccagctgctacttctacttctacatataaaccacgcgctggcatgaactccactccagcatggatagacgacatcatcgcacaaatcacataccaggtcaaggcaccacgtttcacaaacctagtgaacacccaagaactattatgcaataccatcattttgctcgatagattttcctagcccagttgtttcatctgagcaagtgtctgtaggaactaaaacacagtagtatgctgtatatactgtcaagcatgaaacgcaaccagatcagctgcaggatttgcagcaccaagctctggccattaggtaggctgcatatcacaacacacaaagggaacatcaaactacatacactagctccgtcccctccagggacactgcaggttggcaggcccaaagctagcacagggtctcgcaacccacaaggtcataatcagtacaagcatccatcggcaaggggaagcaagagcaatcccaggtaggtggacgctggacagatccgtgctcacgccgttccttgctccggacttttctggccgcttgtactagctccgctgttttgtttcgccaacatctgaatctgatcgccataccatagtaggaattagcatagcactcaactgcatttggcgccccgtttcaatctcacgggataaactttagcttcctgctaaactttaactatatgaattaaagtgctaaagtttagtttcaattaccaccattagctctcctgtttagattacaaatggctaaaagtagctaaaaaaagctgctaaagtttatctcgcgagattgaaacagggcctaaatagcaatctagccgactggtcagtgatcactgaaagcttattcagaaaataaacaggtaagatatatatggcatcctgctatggttcctaactttttacaccacttgtgcctaacagatcaagctctctcacgagggtttaattttcatgcaaggcctgacatttctgcgctgaggttacattgctcacagttgttcagtagcagcttgtccaacagtacttgcccgttccagcagtacttccaggcaaagtagcaaatttacgcagagcgcaaaggtagaagctagcaacatccaaaggaaataacaaaacactagcagcatccaaagaaatttggtattctgcactccctattgtatttggttgtcattaaccaaacaacacagtttggagtttggactgaactgaacttgaataaggcgcaaccaatcaaggtcctgcttgtgggctttaccgttcagatttcaagaaaaaaaaatataccgtaccttcctggatctcgtatccttcaaagcatttctcagaagattttccagcttctccagctcatctacatctgattcgtcagcattgctctggggagacctgccggtttgaagaaattgtgattatttatcaaaaatgggaaaccagagtgggtggaaatcctgagttctgggtgtgtaccaggtcgcaatcttgctcagcatcaactgcaaatctgaagaagcttcatccttgttctgtaccaaaaacaccctagtaagctatatttatcgtaaatttcaatattatatatttgctctggtattctacatactgtacaaacaggacattctgttctgcatagtgtgaaaaacatagcattttggttggtgccggcaactggcacagtatgtaaaaacattctttctaaaactatgataaaaaaagcagcgaagctgtaggctgcatcatatgcgttgtaaaagctacatcaagatctttacatcgtttctatttcgatcgtcatttatattccttccttctccagaaaattgctgatagcggttatatgtatcctctatgctgaaaaaggagaaaaaaaatgaatatgatattagctccttgcataatgtactcttggacaatcaacatctatatattcacctcacgtggaacaaaaatgcaggcagttttattggaggtgagtatattattatgaattacatcctgaatcttacagtcaaatacagtttattagtatgatgtcctttttcctcatgatattgagttcatgccctggtccatcacattccatactactattctactctacttagttctcataaaggtttcggaccactgtttctctagatgttttaagagttttcgttgctatattcttgatcatataaaaacatcagaactgagccatgatacaacctatctgtcacatctaactttacatggtctttgatgcatatcttggaccaccaatatcatctagaatatattttcaagattttataactattttattatacaaatatgcaaatatatcatgtatccaaacctaaagatttaaaagttattgatcttcgtagttttcaaggtttgaccaaattttgtcctaaaatgacatgttgtatcaaagaggagctactagtcatatacgcaagtggataaccaatgaaatgcttgtatcaagcaattacacaagtaaatgtaaatacctaggacattttttgtttacgaactccttatttatattcttttaccttttcttcccttgaatcataatgcggataaatctggtatgtgggtttgttatcataatttcaaaaataaagggtgtgtatttagaagtagatcactgggaaaaaaggttcggatatttatatgaaggtctaggatcaaaccaaaaaggcaataaaaatagactttctatggacaaggattttaaaggaaaaacatggacttccgatgggtgatacagattagaaaaaatatgcattcatgggcttcaaatctattcagttgaagaatgaatgaaagataatgtatacctttgagagttctcgatatgatgtcatctagattccagatgtccaagttaactgtttgaataatagacttttctctaccatatatgccctatcatatttattaatgtaatgtgatgttccttgtatctgactgtagagtttggaccactacataccgagacaaccatctaggctgtctaggttctgaagttatgattaggtactagagaagtcaaagtgactagctctatatgctccatgtggaaaagccaagaagtttcagggcgtgtagggtgggttctaagaaggcgcagtcgttagctaaatgtttggttgggctttttgcactctttctaaatatttgtaattaatttccccatgtttcccgagttggatttagctttctaagttttcttccacacactcccaacaagaagtttccatcttcaaatgttctgaatctactagacacagtatgggcacgcctttttttcatgacaggttttgtgttgggggtgctagagtctagttgatgcacatggccctgcccaatagaagttggttttcttccattgatatataagtgaagttgatagccaagtttttcttgtctcctctttttctttcccttccttgaaggctaaatatgctcagttgagaatgaaagctgagaggacatcgaacaaatgaaataagtggagtatacattcaaaacttgagagcgacccccaagtgataggtttttaccttttagggcaacaaaagatatgctctaggaaaaaatgataagagaagagagtctagtaagcttttaggcatcatgcccatgcactatagaaattgaattgtttaaaccataatattttggacaatagaaacttgtaataaattgtgacaaagaatgtgaatttatgatttatctccaaccaagttatgagcacggttgatcaactaacataatattatcgaaagcactttcgatattatatatatcattgtataaatactcaactacatgtcaatttcataattagttgttatttttgtttgtgacttattagcgtgtcataattttcccattgttatatgtttatgttatttttcttatattagttgcacagttataggttctctctcatatgttaacttctcaacaaatattttagatattttatatttagttgttagaagttgttaaaagtatatttggtagtctagatattgtgtctcgtctactgtcatatatatccatgatttgccttgtctcttactcatgtgctctatataaactgcctaagggcttaatgcaatacatcaatccttgatggcaaacccccctaacatggtataacgagtttaggctatgacttaggcttccccttctgctgtcgtcgtcgcgctgcctcgaggaaattgatctccatcaagagttgcgctctcgtagttaggatgcatgactaatccttctgatttgtcgcgttcatcgtcgttattgtattgtcaagcttcaacaaatcagaggctcgctggtttctctacatgtcatggtggttgttgggctctcctaccggttggatcatgcctttgtcctttgtgcatgcaatcatggtgatggttgtggggcagacgacatccacgtgttgtcgtggtgacgattctggagaggccgtgtgagcccatgggctttgtcacccttgacccctagggtgctaagagacgaattcaagagcatattgcctaccatgtatttcctatgaaagttggctaggagatacctaagccaaaagatgaggacaacacgaaggagattgaagctcgagagatgattcagttaccttataaattcaatcccttcagcatcttcataaagccgagcaatgagtggctcattatggtggagacagttgctaacaaagttttatgcaactatattgtgaaagagatcatctacttagtgcgatagtgagtggcaataaagagaatacataatcgtgtgatcaaagcatatgacttagaatatctagactaccccaacctcattgtcgatcatgatgctagattgcagaggaaatgcaaagtaagaattatagataggggttgagtgattagtgaaaaggaggctagagggggccctccgacaaagtccttgaagccaaaggcaaaatacaagggtagtgagattgtggcaaaggaaaagttgctagcacccaagcgctttgaaaggaaacaccatgaaggtgagaagtagaaggtctaggtcgaggcctctaaggttgcctcagagaagcctgctggcattgcaaagacccctaccactgaagaacatgtacgagctgttgttgaagagtcttgttctgaacgctcagaaaattgaggtcgagaaaaagcccgcctaggaggatacatcaggcgacaagctcaaagaggcattgcctagcctcccctgcatagtgaatccaatggatgcgatctttggagatttatttgaggagaaaagcaacaaagccattaagacccctgccaaagaaaaagaggatgttggttgtgctaggctatgtgcctctccctgttagccaagtcgagcctttgtgatcgtggtttatctctttctccctctttcagtcttctgatcgaggataaggagggtgagttgagttaggagaatggactatttgtgggtacttggtgatgtaacaaaatttgttgttgttgtgggtccctttttcttcctaattggtcgggttttgcgccatcgtcgcctattttcatccttgtattgcccctacatcaccgtcgactacgtcgttgtgcgcctctctcacatggtatacctggaccgttcatgctcttcgtcatcttctttaagcaccactgttgcaacactctagcaccaccatgactccttgcgcaatgcagatctcaccactgccactctgggtccctagatgtgtcaaccatctacttctttgacttcgtccatcacaatctcgttgccagtgtcgtcctctgtcctcgtctacttcatccacaccgacaaccattggtgcattgacacatgcttcctcgttgttcttctacacattgcaactatcgcggaggccttctctgctagtcactttagacactgacgtatggttggggtcctctacctagtatgtcttttgctagcaacactggtgcgtaccttcatccccggtgtgtttttgggcttagctagtaaacctcacacatgcctcagccacgttgattcgacaatgtcgacttcgccatcgaccttctccattgactgccttgactgcatcaccatctttgtctatggtgcttccttctattcgccaccatcaccacaacacatcaagcacacgacttgtgtggctcctacttcttagtgacctcgatagctttcatcgaccacaactatcctttgcaagattatcgaccacaactgttcatccttgtactaggctacctcaacatcgacacagagaactatcgtctacatcagcttctcgtcggtttcttctccaagtcgttgcatctgcactccgacaac

SEQ ID NO: 212670 - DNA, 1667 bp, Zea Mays
atggtcgtgtacatcttcagaaaaccagacatgttcaggcaagaccagtgggtatgcaaaaacaacagcaaagtggctcggcatgtcgacagccagctgctacttctacttctacatataaaccacgcgctggcatgaactccactccagcatggatagacgacatcatcgcacaaatcacataccagatcaagctctctcacgagggtttaattttcatgcaaggcctgacatttctgcgctgaggttacattgctcacagttgttcagtagcagcttgtccaacagtacttgcccgttccagcagtacttccaggcaaagtagcaaatttacgcagagcgcaaaggtagaagctagcaacatccaaaggaaataacaaaacactagcagcatccaaagaaatttggtattctgcactccctattgtatttggttgtcattaaccaaacaacacagtttggagtttggactgaactgaacttgaataaggcgcaaccaatcaaggtcctgcttgtgggctttaccgttcagatttcaagaaaaaaaaatataccgtaccttcctggatctcgtatccttcaaagcatttctcagaagattttccagcttctccagctcatctacatctgattcgtcagcattgctctggggagacctgccggtttgaagaaattgtgattatttatcaaaaatgggaaaccagagtgggtggaaatcctgagttctgggtgtgtaccaggtcgcaatcttgctcagcatcaactgcaaatctgaagaagcttcatccttgttctgtaccaaaaacaccctagtaagctatatttatcgtaaatttcaatattatatatttgctctggtattctacatactgtacaaacaggacattctgttctgcatagtgtgaaaaacatagcattttggttggtgccggcaactggcacagtatgtaaaaacattctttctaaaactatgataaaaaaagcagcgaagctgtaggctgcatcatatgcgttgtaaaagctacatcaagatctttacatcgtttctatttcgatcgtcatttatattccttccttctccagaaaattgctgatagcggttatatgtatcctctatgctgaaaaaggagaaaaaaaatgaatatgatattagctccttgcataatgtactcttggacaatcaacatctatatattcacctcacgtggaacaaaaatgcaggcagttttattggagagtttggaccactacataccgagacaaccatctaggctgtctaggttctgaagttatgattaggtactagagaagtcaaagtgactagctctatatgctccatgtggaaaagccaagaagtttcagggcgtgtagggtgggttctaagaaggcgcagtcgttagctaaatgtttggttgggctttttgcactctttctaaatatttgtaattaatttccccatgtttcccgagttggatttagctttctaagttttcttccacacactcccaacaagaagtttccatcttcaaatgttctgaatctactagacacagtatgggcacgcctttttttcatgacaggttttgtgttgggggtgctagagtctagttgatgcacatggccctgcccaatagaagttggttttcttccattgatatataagtgaa

SEQ ID NO: 212671 - DNA, 1581 bp, Zea Mays
cccgaggcggccagcaggcccagcaccgctcgctcgccgcatgagtagaaggacgtgtcccttcgtggggtgcgcccgccacctgccgatgcgacgtgagaggagccaagcgcgcagtgggccctggacacgagagcggtgcggtgtcgtgctggcggcggcggcggcggcggcgaaggataaatagggccgtagggccatcgttttgcattgccgtcgcgtggccgtgggttttcatcgacgaacgacgacgactctgccgcgcgcgtttaggcgcgtcgccgccggccacccggccggccacttcgacgcggctgtggtggtttaaaattctccggctcgccgcccacggcctcgctgcacgtagttgcagatcaagctctctcacgagggtttaattttcatgcaaggcctgacatttctgcgctgaggttacattgctcacagttgttcagtagcagcttgtccaacagtacttgcccgttccagcagtacttccaggcaaagtagcaaatttacgcagagcgcaaaggtagaagctagcaacatccaaaggaaataacaaaacactagcagcatccaaagaaatttggtattctgcactccctattgtatttggttgtcattaaccaaacaacacagtttggagtttggactgaactgaacttgaataaggcgcaaccaatcaaggtcctgcttgtgggctttaccgttcagatttcaagaaaaaaaaatataccgtaccttcctggatctcgtatccttcaaagcatttctcagaagattttccagcttctccagctcatctacatctgattcgtcagcattgctctggggagacctgccggtttgaagaaattgtgattatttatcaaaaatgggaaaccagagtgggtggaaatcctgagttctgggtgtgtaccaggtcgcaatcttgctcagcatcaactgcaaatctgaagaagcttcatccttgttctgtaccaaaaacaccctaaaaattgctgatagcggttatatgtatcctctatgctgaaaaaggagaaaaaaaatgaatatgatattagctccttgcataatgtactcttggacaatcaacatctatatattcacctcacgtggaacaaaaatgcaggcagttttattggagagtttggaccactacataccgagacaaccatctaggctgtctaggttctgaagttatgattaggtactagagaagtcaaagtgactagctctatatgctccatgtggaaaagccaagaagtttcagggcgtgtagggtgggttctaagaaggcgcagtcgttagctaaatgtttggttgggctttttgcactctttctaaatatttgtaattaatttccccatgtttcccgagttggatttagctttctaagttttcttccacacactcccaacaagaagtttccatcttcaaatgttctgaatctactagacacagtatgggcacgcctttttttcatgacaggttttgtgttgggggtgctagagtctagttgatgcacatggccctgcccaatagaagttggttttcttccattgatatataagtgaa

SEQ ID NO: 212672 - DNA, 1453 bp, Zea Mays
gtgtcccttcgtggggtgcgcccgccacctgccgatgcgacgtgagaggagccaagcgcgcagtgggccctggacacgagagcggtgcggtgtcgtgctggcggcggcggcggcggcggcgaaggataaatagggccgtagggccatcgttttgcattgccgtcgcgtggccgtgggttttcatcgacgaacgacgacgactctgccgcgcgcgtttaggcgcgtcgccgccggccacccggccggccacttcgacgcggctgtggtggtttaaaattctccggctcgccgcccacggcctcgctgcacgtagttgcagatcaagctctctcacgagggtttaattttcatgcaaggcctgacatttctgcgctgaggttacattgctcacagttgttcagtagcagcttgtccaacagtacttgcccgttccagcagtacttccaggcaaagtagcaaatttacgcagagcgcaaaggtagaagctagcaacatccaaaggaaataacaaaacactagcagcatccaaagaaatttggtattctgcactccctattgtatttggttgtcattaaccaaacaacacagtttggagtttggactgaactgaacttgaataaggcgcaaccaatcaaggtcctgcttgtgggctttaccgttcagatttcaagaaaaaaaaatataccgtaccttcctggatctcgtatccttcaaagcatttctcagaagattttccagcttctccagctcatctacatctgattcgtcagcattgctctggggagacctgccggtttgaagaaattgtgattatttatcaaaaatgggaaaccagagtgggtggaaatcctgagttctgggtgtgtaccaggtcgcaatcttgctcagcatcaactgcaaatctgaagaagcttcatccttgttctgtaccaaaaacaccctaaaaattgctgatagcggttatatgtatcctctatgctgaaaaaggagaaaaaaaatgaatatgatattagctccttgcataatgtactcttggacaatcaacatctatatattcacctcacgtggaacaaaaatgcaggcagttttattggaggtgagtatattattatgaattacatcctgaatcttacagtcaaatacagtttattagtatgatgtcctttttcctcatgatattgagttcatgccctggtccatcacattccatactactattctactctacttagttctcataaaggtttcggaccactgtttctctagatgttttaagagttttcgttgctatattcttgatcatataaaaacatcagaactgagccatgatacaacctatctgtcacatctaactttacatggtctttgatgcatatcttggaccaccaatatcatctagaatatattttcaagattttataactattttattatacaaatatgcaaatatatc

SEQ ID NO: 212673 - DNA, 4036 bp, Zea Mays
gccatccctactccaccccaacctaagcagtaggcagtaggcatcaagcgtcttgcgtggctgcgtccaagtccaagcgccatccggccaccagcgcaggtaccgagccaccgaggtaggagccggccaccgggcagatcccaggctgccagccaccggcgtccagcactccggctgctagctaccggccacccgcagcgcaggccacaccaacgggcagcaaccgcatggtgccatagctgtcgacgaacaccagcaaccagacggccagatcccagtaattcgatttattatatcttcgtcgaggatagtgacacgtcacgtcagtgtccggccatcgcttgagagagtccaacccaaggatggttcaggctacggaagggcaatgcactgcttcttagactattgaagaatttataggatgatgtgcaggagcagagcgtgggcagtaaatgcaaagaaaaaaacacagttgcagaaattgctagcaatagactatacaagatagagccaaattgagcaaaaaaaaagaccattcccatttggatcaccattccctaaccacagcaaaatgaagttggaaaattgagtagttgagtgccgtgtatgcacatgagcagggctaatactttataagaaatgtgctggttcttgatactcctccaaccagttgtagaagaattctggtttggctgaagtagttttacatccgaaagatggactttgtacagatatattctctgtcaacaatatgtatatccaggcggagatgaacttggagggaagcagatttacagtttggtgatattatatattatcaattgcagtttattaatgttgcgcttcttctctattatcaaactattcacacaagacttcatgtgtgcgtgtgtgaaagattttattagtgtaaggtctttagggacagttcacattgaagttctggtgcctacataaattgtaaaccatacatgttgacatgggtacacatctcatggctatatacaactttgacatgaggtttatcttaagattgtgtgttccaataaaagctattactatttcttgcatgtgcatgtctttaggatatccatttttctttatagatttatttatttacatcgcttactgcttactagcctattttttctagcaatttctgcaagtcggcccatcgcgttgaactaaaccatctctaatttcctacaacttcaactccaacaacagaggtaccacaatggacttcttaagaagaataggaaccgtgtacataagcttttttgctctaacaaaataagagtggttgttgcaacaatggcattcagaatgggtcttgataagagtgacgttgaacgggtggttgattgtatcttgccagaaagcgtagaagaatacatacatgaaactggccgtgctgattcaacaacattctataaaagtcgaagtcttttgcacaaatgaatcttatcttcttgtcctttttttcttgtaatttacatttccaacctgctctaagtttcctacataatgacttcaataaaccctttttacagtgaagttcacgaatatgctatgagaaaattctttgccagatattttcttgtgaaaattcagttggatgcatttgctccttggttaaagagtcgacttcagacaagttagatataaaagaggaggcggagctgcgatgccaccaggtggagccgtgcctgctcgctcaggcgtcatgacggagccgaacgcgaggagccgagtgttttatccccgccgaagcccatccccatttgataccagcgagcgcagacatcgccggggacgccatcatcctcggctgcctccaagaccggcccaccgttctgcctgcactcccactcccaaaccccatgatgaacctccctttccggctccgccatctccgacgccttctcgctgccccgcccttaccaaccctcgccgccacacactcccatagcccaccctccttccgaccgctgcaccccacccgaatccagccgctgcggttccatctacccaaccccccagtgcggcggctctcctccgagcacgcaatcctccccacccacctccaggacgagcgcttcgccacgctctcggataggatctatgatgccgtgattaagacggggacggaatccaacgagggcaccgaggccgcgctcgacgcgttgggcgctgagctgactacccctctcgtcgccgacgtgctgcaccgcctccgctacgaggagaagctggcgttccggttcttcgcctgggcgtcccaacaggacggatacagccacgaaccgacgacttacaacgacatcatcgacattctctccggcacgcggtacaagagccgccagttcggtgtcctctgcaacgtgctcgatcacatgaagcgccatggctcgaggtcggtgccggttgagggccttctggagatcctgcgcgcctacacggagaagcatctcacgcacatgagaaagctggccaagaagcggcgggttcggatgcgtacgccgccagagactgacgcgctcaacgttctgctggacgcgttctgcaagtgtgggatggtcaaggaagcagaggcagtgtttggccgcgtgaagaggaagttgctgggtaatgcagagacgtacagtaccctgttcttcgggtggtgccgggcgagggaccccaagaaggccatgaaggtgctcgaggaaatgattcagatgaagcacaccccagagagtttcacctacgttgcagccatcgaatcattttgcagcgctggattggtgtcagaggcaagggaactgtttgagttcatgaggactgaggggttgacggtgtcatcgcccacagccaaaacatattcgattatgattgttgcattagcaaaggctgaccggatggaggagtgttttgaactgctttcagacatgagaacttgtggttgtatgcctgacgtgacgacttataaagatttgattgaagggatgtgcttggtgggtagactggatgctgcttatcgtgtgttggacgagatggggagggctggatttcctcctgacattgtcacgtataattgctttcttaatgtgctttgtagtcttcgaaatgctgatgatgcacttgaactctgtgagaggatgatagaggcacactgtgagcccagtgttcatacctataatatgctgatgatgatgttcttcgagatgggagaggcacatagagcattagatatatggcttgagatggacaaaagaggatgtcaacgtgctatcgatacctacgagataatgatctatggtctctttgattgtggagaaacagaatatgcaactgctcttctagatgaggttataaaccgtgacatgaaactttcatacaagaagtttgatgctataatgctgaggttatcagctgtaggcaaccttggtgcgatacatcggttgtcagagcatatgaggaaattttacaatgttgcgatgtcgagacgatttgcaatcactcagaagaagaagagcataggcctgagaaggaaatgagtgccgtggctattgctgctgttgtttcttgttagttgttactgaggatattcaggagcttattcaaaggtagttaatgtatgccagcacgtattgttggaacagattacagtggaagaagcactgcattttttttaatgtaaaaaataggagtgttgcataaccccattcatttgttgaattgaaccggtgctgtgaatatcattgcatttgcattgtagaagaaacatgtacaaggtaacccctcaaccgcacccattcattgttgcaacgtgcacgaaacaccaatccgctggcgccacaaatattagctgcagccctattttgtttgaatcctatgaagagggcctcttttgtccttgttcatgtggggcgcctttcttccttatgctcagatgaaacatgtagctgtgtaagcctgtataactggatttcttgccattaaacctgtgacccccaccactttcctcatgctgcaagtggaattagtattattg

SEQ ID NO: 212674 - DNA, 4115 bp, Zea Mays
gccatccctactccaccccaacctaagcagtaggcagtaggcatcaagcgtcttgcgtggctgcgtccaagtccaagcgccatccggccaccagcgcaggtaccgagccaccgaggtaggagccggccaccgggcagatcccaggctgccagccaccggcgtccagcactccggctgctagctaccggccacccgcagcgcaggccacaccaacgggcagcaaccgcatggtgccatagctgtcgacgaacaccagcaaccagacggccagatcccagagtccaacccaaggatggttcaggctacggaagggcaatgcactgcttcttagactattgaagaatttataggatgatgtgcaggagcaggcagctactatgcaattttctatttattgtactcttgccacgaactgctcgtaattctctttcagtttgttgcagagcgtgggcagtaaatgcaaagaaaaaaacacagttgcagaaattgctagcaatagactatacaagatagagccaaattgagcaaaaaaaaagaccattcccatttggatcaccattccctaaccacagcaaaatgaagttggaaaattgagtagttgagtgccgtgtatgcacatgagcagggctaatactttataagaaatgtgctggttcttgatactcctccaaccagttgtagaagaattctggtttggctgaagtagttttacatccgaaagatggactttgtacagatatattctctgtcaacaatatgtatatccaggcggagatgaacttggagggaagcagatttacagtttggtgatattatatattatcaattgcagtttattaatgttgcgcttcttctctattatcaaactattcacacaagacttcatgtgtgcgtgtgtgaaagattttattagtgtaaggtctttagggacagttcacattgaagttctggtgcctacataaattgtaaaccatacatgttgacatgggtacacatctcatggctatatacaactttgacatgaggtttatcttaagattgtgtgttccaataaaagctattactatttcttgcatgtgcatgtctttaggatatccatttttctttatagatttatttatttacatcgcttactgcttactagcctattttttctagcaatttctgcaagtcggcccatcgcgttgaactaaaccatctctaatttcctacaacttcaactccaacaacagaggtaccacaatggacttcttaagaagaataggaaccgtgtacataagcttttttgctctaacaaaataagagtggttgttgcaacaatggcattcagaatgggtcttgataagagtgacgttgaacgggtggttgattgtatcttgccagaaagcgtagaagaatacatacatgtatattccatgcagattccccccaccctcccattttcttctcttttctagacatcttactatgctctttctaggaaactggccgtgctgattcaacaacattctataaaagtcgaagtcttttgcacaaatgaatcttatcttcttgtcctttttttcttgtaatttacatttccaacctgctctaagtttcctacataatgacttcaataaaccctttttacagtgaagttcacgaatatgctatgagaaaattctttgccagatattttcttgtgaaaattcagttggatgcatttgctccttggttaaagagtcgacttcagacaagttagatataaaagaggaggcggagctgcgatgccaccaggtggagccgtgcctgctcgctcaggcgtcatgacggagccgaacgcgaggagccgagtgttttatccccgccgaagcccatccccatttgataccagcgagcgcagacatcgccggggacgccatcatcctcggctgcctccaagaccggcccaccgttctgcctgcactcccactcccaaaccccatgatgaacctccctttccggctccgccatctccgacgccttctcgctgccccgcccttaccaaccctcgccgccacacactcccatagcccaccctccttccgaccgctgcaccccacccgaatccagccgctgcggttccatctacccaaccccccagtgcggcggctctcctccgagcacgcaatcctccccacccacctccaggacgagcgcttcgccacgctctcggataggatctatgatgccgtgattaagacggggacggaatccaacgagggcaccgaggccgcgctcgacgcgttgggcgctgagctgactacccctctcgtcgccgacgtgctgcaccgcctccgctacgaggagaagctggcgttccggttcttcgcctgggcgtcccaacaggacggatacagccacgaaccgacgacttacaacgacatcatcgacattctctccggcacgcggtacaagagccgccagttcggtgtcctctgcaacgtgctcgatcacatgaagcgccatggctcgaggtcggtgccggttgagggccttctggagatcctgcgcgcctacacggagaagcatctcacgcacatgagaaagctggccaagaagcggcgggttcggatgcgtacgccgccagagactgacgcgctcaacgttctgctggacgcgttctgcaagtgtgggatggtcaaggaagcagaggcagtgtttggccgcgtgaagaggaagttgctgggtaatgcagagacgtacagtaccctgttcttcgggtggtgccgggcgagggaccccaagaaggccatgaaggtgctcgaggaaatgattcagatgaagcacaccccagagagtttcacctacgttgcagccatcgaatcattttgcagcgctggattggtgtcagaggcaagggaactgtttgagttcatgaggactgaggggttgacggtgtcatcgcccacagccaaaacatattcgattatgattgttgcattagcaaaggctgaccggatggaggagtgttttgaactgctttcagacatgagaacttgtggttgtatgcctgacgtgacgacttataaagatttgattgaagggatgtgcttggtgggtagactggatgctgcttatcgtgtgttggacgagatggggagggctggatttcctcctgacattgtcacgtataattgctttcttaatgtgctttgtagtcttcgaaatgctgatgatgcacttgaactctgtgagaggatgatagaggcacactgtgagcccagtgttcatacctataatatgctgatgatgatgttcttcgagatgggagaggcacatagagcattagatatatggcttgagatggacaaaagaggatgtcaacgtgctatcgatacctacgagataatgatctatggtctctttgattgtggagaaacagaatatgcaactgctcttctagatgaggttataaaccgtgacatgaaactttcatacaagaagtttgatgctataatgctgaggttatcagctgtaggcaaccttggtgcgatacatcggttgtcagagcatatgaggaaattttacaatgttgcgatgtcgagacgatttgcaatcactcagaagaagaagagcataggcctgagaaggaaatgagtgccgtggctattgctgctgttgtttcttgttagttgttactgaggatattcaggagcttattcaaaggtagttaatgtatgccagcacgtattgttggaacagattacagtggaagaagcactgcattttttttaatgtaaaaaataggagtgttgcataaccccattcatttgttgaattgaaccggtgctgtgaatatcattgcatttgcattgtagaagaaacatgtacaaggtaacccctcaaccgcacccattcattgttgcaacgtgcacgaaacaccaatccgctggcgccacaaatattagctgcagccctattttgtttgaatcctatgaagagggcctcttttgtccttgttcatgtggggcgcctttcttccttatgctcagatgaaacatgtagctgtgtaagcctgtataactggatttcttgccattaaacctgtgacccccaccactttcctcatgctgcaagtggaattagtattattg

SEQ ID NO: 212675 - DNA, 3884 bp, Zea Mays
gccatccctactccaccccaacctaagcagtaggcagtaggcatcaagcgtcttgcgtggctgcgtccaagtccaagcgccatccggccaccagcgcaggtaccgagccaccgaggtaggagccggccaccgggcagatcccaggctgccagccaccggcgtccagcactccggctgctagctaccggccacccgcagcgcaggccacaccaacgggcagcaaccgcatggtgccatagctgtcgacgaacaccagcaaccagacggccagatcccagtaattcgatttattatatcttcgtcgaggatagtgacacgtcacgtcagtgtccggccatcgcttgagagagtccaacccaaggatggttcaggctacggaagggcaatgcactgcttcttagactattgaagaatttataggatgatgtgcaggagcagagcgtgggcagtaaatgcaaagaaaaaaacacagttgcagaaattgctagcaatagactatacaagatagagccaaattgagcaaaaaaaaagaccattcccatttggatcaccattccctaaccacagcaaaatgaagttggaaaattgagtagttgagtgccgtgtatgcacatgagcagggctaatactttataagaaatgtgctggttcttgatactcctccaaccagttgtagaagaattctggtttggctgaagtagttttacatccgaaagatggactttgtacagatatattctctgtcaacaatatgtatatccaggcggagatgaacttggagggaagcagatttacagtttggtgatattatatattatcaattgcagtttattaatgttgcgcttcttctctattatcaaactattcacacaagacttcatgtgtgcgtgtgtgaaagattttattagtgtaaggtctttagggacagttcacattgaagttctggtgcctacataaattgtaaaccatacatgttgacatgggtacacatctcatggctatatacaactttgacatgaggtttatcttaagattgtgtgttccaataaaagctattactatttcttgcatgtgcatgtctttaggatatccatttttctttatagatttatttatttacatcgcttactgcttactagcctattttttctagcaatttctgcaagtcggcccatcgcgttgaactaaaccatctctaatttcctacaacttcaactccaacaacagaggtaccacaatggacttcttaagaagaataggaaccgtgtacataagcttttttgctctaacaaaataagagtggttgttgcaacaatggcattcagaatgggtcttgataagagtgacgttgaacgggtggttgattgtatcttgccagaaagcgtagaagaatacatacattgaagttcacgaatatgctatgagaaaattctttgccagatattttcttgtgaaaattcagttggatgcatttgctccttggttaaagagtcgacttcagacaagttagatataaaagaggaggcggagctgcgatgccaccaggtggagccgtgcctgctcgctcaggcgtcatgacggagccgaacgcgaggagccgagtgttttatccccgccgaagcccatccccatttgataccagcgagcgcagacatcgccggggacgccatcatcctcggctgcctccaagaccggcccaccgttctgcctgcactcccactcccaaaccccatgatgaacctccctttccggctccgccatctccgacgccttctcgctgccccgcccttaccaaccctcgccgccacacactcccatagcccaccctccttccgaccgctgcaccccacccgaatccagccgctgcggttccatctacccaaccccccagtgcggcggctctcctccgagcacgcaatcctccccacccacctccaggacgagcgcttcgccacgctctcggataggatctatgatgccgtgattaagacggggacggaatccaacgagggcaccgaggccgcgctcgacgcgttgggcgctgagctgactacccctctcgtcgccgacgtgctgcaccgcctccgctacgaggagaagctggcgttccggttcttcgcctgggcgtcccaacaggacggatacagccacgaaccgacgacttacaacgacatcatcgacattctctccggcacgcggtacaagagccgccagttcggtgtcctctgcaacgtgctcgatcacatgaagcgccatggctcgaggtcggtgccggttgagggccttctggagatcctgcgcgcctacacggagaagcatctcacgcacatgagaaagctggccaagaagcggcgggttcggatgcgtacgccgccagagactgacgcgctcaacgttctgctggacgcgttctgcaagtgtgggatggtcaaggaagcagaggcagtgtttggccgcgtgaagaggaagttgctgggtaatgcagagacgtacagtaccctgttcttcgggtggtgccgggcgagggaccccaagaaggccatgaaggtgctcgaggaaatgattcagatgaagcacaccccagagagtttcacctacgttgcagccatcgaatcattttgcagcgctggattggtgtcagaggcaagggaactgtttgagttcatgaggactgaggggttgacggtgtcatcgcccacagccaaaacatattcgattatgattgttgcattagcaaaggctgaccggatggaggagtgttttgaactgctttcagacatgagaacttgtggttgtatgcctgacgtgacgacttataaagatttgattgaagggatgtgcttggtgggtagactggatgctgcttatcgtgtgttggacgagatggggagggctggatttcctcctgacattgtcacgtataattgctttcttaatgtgctttgtagtcttcgaaatgctgatgatgcacttgaactctgtgagaggatgatagaggcacactgtgagcccagtgttcatacctataatatgctgatgatgatgttcttcgagatgggagaggcacatagagcattagatatatggcttgagatggacaaaagaggatgtcaacgtgctatcgatacctacgagataatgatctatggtctctttgattgtggagaaacagaatatgcaactgctcttctagatgaggttataaaccgtgacatgaaactttcatacaagaagtttgatgctataatgctgaggttatcagctgtaggcaaccttggtgcgatacatcggttgtcagagcatatgaggaaattttacaatgttgcgatgtcgagacgatttgcaatcactcagaagaagaagagcataggcctgagaaggaaatgagtgccgtggctattgctgctgttgtttcttgttagttgttactgaggatattcaggagcttattcaaaggtagttaatgtatgccagcacgtattgttggaacagattacagtggaagaagcactgcattttttttaatgtaaaaaataggagtgttgcataaccccattcatttgttgaattgaaccggtgctgtgaatatcattgcatttgcattgtagaagaaacatgtacaaggtaacccctcaaccgcacccattcattgttgcaacgtgcacgaaacaccaatccgctggcgccacaaatattagctgcagccctattttgtttgaatcctatgaagagggcctcttttgtccttgttcatgtggggcgcctttcttccttatgctcagatgaaacatgtagctgtgtaagcctgtataactggatttcttgccattaaacctgtgacccccaccactttcctcatgctgcaagtggaattagtattattg

SEQ ID NO: 212676 - DNA, 3769 bp, Zea Mays
gccatccctactccaccccaacctaagcagtaggcagtaggcatcaagcgtcttgcgtggctgcgtccaagtccaagcgccatccggccaccagcgcaggtaccgagccaccgaggtaggagccggccaccgggcagatcccaggctgccagccaccggcgtccagcactccggctgctagctaccggccacccgcagcgcaggccacaccaacgggcagcaaccgcatggtgccatagctgtcgacgaacaccagcaaccagacggccagatcccagtaattcgatttattatatcttcgtcgaggatagtgacacgtcacgtcagtgtccggccatcgcttgagagagtccaacccaaggatggttcaggctacggaagggcaatgcactgcttcttagactattgaagaatttataggatgatgtgcaggagcagagcgtgggcagtaaatgcaaagaaaaaaacacagttgcagaaattgctagcaatagactatacaagatagagccaaattgagcaaaaaaaaagaccattcccatttggatcaccattccctaaccacagcaaaatgaagttggaaaattgagtagttgagtgccgtgtatgcacatgagcagggctaatactttataagaaatgtgctggttcttgatactcctccaaccagttgtagaagaattctggtttggctgaagtagttttacatccgaaagatggactttgtacagatatattctctgtcaacaatatgtatatccaggcggagatgaacttggagggaagcagatttacagtttggtgatattatatattatcaattgcagtttattaatgttgcgcttcttctctattatcaaactattcacacaagacttcatgtgtgcgtgtgtgaaagattttattagtgtaaggtctttagggacagttcacattgaagttctggtgcctacataaattgtaaaccatacatgttgacatgggtacacatctcatggctatatacaactttgacatgaggtttatcttaagattgtgtgttccaataaaagctattactatttcttgcatgtgcatgtctttaggatatccatttttctttatagatttatttatttacatcgcttactgcttactagcctattttttctagcaatttctgcaagtcggcccatcgcgttgaactaaaccatctctaatttcctacaacttcaactccaacaacagaatggccccacacacttaatgaaaacatctctaatttctagcaaattcgactccgaggacaataaaggtaccacaatggacttcttaagaagaataggaaccgtgtacataagcttttttgctctaacaaaataagagtggttgttgcaacaatggcattcagaatgggtcttgataagagtgacgttgaacgggtggttgattgtatcttgccagaaagcgtagaagaatacatacattgaagttcacgaatatgctatgagaaaattctttgccagatattttcttgtgaaaattcagttggatgcatttgctccttggttaaagagtcgacttcagacaagttagatataaaagaggaggcggagctgcgatgccaccaggtggagccgtgcctgctcgctcaggcgtcatgacggagccgaacgcgaggagccgagtgttttatccccgccgaagcccatccccatttgataccagcgagcgcagacatcgccggggacgccatcatcctcggctgcctccaagaccggcccaccgttctgcctgcactcccactcccaaaccccatgatgaacctccctttccggctccgccatctccgacgccttctcgctgccccgcccttaccaaccctcgccgccacacactcccatagcccaccctccttccgaccgctgcaccccacccgaatccagccgctgcggttccatctacccaaccccccagtgcggcggctctcctccgagcacgcaatcctccccacccacctccaggacgagcgcttcgccacgctctcggataggatctatgatgccgtgattaagacggggacggaatccaacgagggcaccgaggccgcgctcgacgcgttgggcgctgagctgactacccctctcgtcgccgacgtgctgcaccgcctccgctacgaggagaagctggcgttccggttcttcgcctgggcgtcccaacaggacggatacagccacgaaccgacgacttacaacgacatcatcgacattctctccggcacgcggtacaagagccgccagttcggtgtcctctgcaacgtgctcgatcacatgaagcgccatggctcgaggtcggtgccggttgagggccttctggagatcctgcgcgcctacacggagaagcatctcacgcacatgagaaagctggccaagaagcggcgggttcggatgcgtacgccgccagagactgacgcgctcaacgttctgctggacgcgttctgcaagtgtgggatggtcaaggaagcagaggcagtgtttggccgcgtgaagaggaagttgctgggtaatgcagagacgtacagtaccctgttcttcgggtggtgccgggcgagggaccccaagaaggccatgaaggtgctcgaggaaatgattcagatgaagcacaccccagagagtttcacctacgttgcagccatcgaatcattttgcagcgctggattggtgtcagaggcaagggaactgtttgagttcatgaggactgaggggttgacggtgtcatcgcccacagccaaaacatattcgattatgattgttgcattagcaaaggctgaccggatggaggagtgttttgaactgctttcagacatgagaacttgtggttgtatgcctgacgtgacgacttataaagatttgattgaagggatgtgcttggtgggtagactggatgctgcttatcgtgtgttggacgagatggggagggctggatttcctcctgacattgtcacgtataattgctttcttaatgtgctttgtagtcttcgaaatgctgatgatgcacttgaactctgtgagaggatgatagaggcacactgtgagcccagtgttcatacctataatatgctgatgatgatgttcttcgagatgggagaggcacatagagcattagatatatggcttgagatggacaaaagaggatgtcaacgtgctatcgatacctacgagataatgatctatggtctctttgattgtggagaaacagaatatgcaactgctcttctagatgaggttataaaccgtgacatgaaactttcatacaagaagtttgatgctataatgctgaggttatcagctgtaggcaaccttggtgcgatacatcggttgtcagagcatatgaggaaattttacaatgttgcgatgtcgagacgatttgcaatcactcagaagaagaagagcataggcctgagaaggaaatgagtgccgtggctattgctgctgttgtttcttgttagttgttactgaggatattcaggagcttattcaaaggtagttaatgtatgccagcacgtattgttggaacagattacagtggaagaagcactgcattttttttaatgtaaaaaataggagtgttgcataaccccattcatttgttgaattgaaccggtgctgtgaatatcattgcatttgcattgtagaagaaacatgtacaaggtgacggctactggttttcaacaaacacatatcggggcatcgggtgaagccgccaaacgcatatgagcagcgttggcttt

SEQ ID NO: 212677 - DNA, 3691 bp, Zea Mays
gccatccctactccaccccaacctaagcagtaggcagtaggcatcaagcgtcttgcgtggctgcgtccaagtccaagcgccatccggccaccagcgcaggtaccgagccaccgaggtaggagccggccaccgggcagatcccaggctgccagccaccggcgtccagcactccggctgctagctaccggccacccgcagcgcaggccacaccaacgggcagcaaccgcatggtgccatagctgtcgacgaacaccagcaaccagacggccagatcccagtaattcgatttattatatcttcgtcgaggatagtgacacgtcacgtcagtgtccggccatcgcttgagaggcacgaatgtcttcgctgcgccgtcacgatccagactcgcatccccttctgacgcgcacccattgcgggcagacgtttgggctttgtgtggatggatcatggacgtacataccacatttgttttttaactaaatcttcacttctttgaatcgcagagtccaacccaaggatggttcaggctacggaagggcaatgcactgcttcttagactattgaagaatttataggatgatgtgcaggagcagagcgtgggcagtaaatgcaaagaaaaaaacacagttgcagaaattgctagcaatagactatacaagatagagccaaattgagcaaaaaaaaagaccattcccatttggatcaccattccctaaccacagcaaaatgaagttggaaaattgagtagttgagtgccgtgtatgcacatgagcagggctaatactttataagaaatgtgctggttcttgatactcctccaaccagttgtagaagaattctggtttggctgaagtagttttacatccgaaagatggactttgtacagatatattctctgtcaacaatatgtatatccaggcggagatgaacttggagggaagcagatttacagtttggtgatattatatattatcaattgcagtttattaatgttgcgcttcttctctattatcaaactattcacacaagacttcatgtgtgcgtgtgtgaaagattttattagtgtaaggtctttagggacagttcacattgaagttctggtgcctacataaattgtaaaccatacatgttgacatgggtacacatctcatggctatatacaactttgacatgaggtttatcttaagattgtgtgttccaataaaagctattactatttcttgcatgtgcatgtctttaggatatccatttttctttatagatttatttatttacatcgcttactgcttactagcctattttttctagcaatttctgcaagtcggcccatcgcgttgaactaaaccatctctaatttcctacaacttcaactccaacaacagaggtaccacaatggacttcttaagaagaataggaaccgtgtacataagcttttttgctctaacaaaataagagtggttgttgcaacaatggcattcagaatgggtcttgataagagtgacgttgaacgggtggttgattgtatcttgccagaaagcgtagaagaatacatacattgaagttcacgaatatgctatgagaaaattctttgccagatattttcttgtgaaaattcagttggatgcatttgctccttggttaaagagtcgacttcagacaagttagatataaaagaggaggcggagctgcgatgccaccaggtggagccgtgcctgctcgctcaggcgtcatgacggagccgaacgcgaggagccgagtgttttatccccgccgaagcccatccccatttgataccagcgagcgcagacatcgccggggacgccatcatcctcggctgcctccaagaccggcccaccgttctgcctgcactcccactcccaaaccccatgatgaacctccctttccggctccgccatctccgacgccttctcgctgccccgcccttaccaaccctcgccgccacacactcccatagcccaccctccttccgaccgctgcaccccacccgaatccagccgctgcggttccatctacccaaccccccagtgcggcggctctcctccgagcacgcaatcctccccacccacctccaggacgagcgcttcgccacgctctcggataggatctatgatgccgtgattaagacggggacggaatccaacgagggcaccgaggccgcgctcgacgcgttgggcgctgagctgactacccctctcgtcgccgacgtgctgcaccgcctccgctacgaggagaagctggcgttccggttcttcgcctgggcgtcccaacaggacggatacagccacgaaccgacgacttacaacgacatcatcgacattctctccggcacgcggtacaagagccgccagttcggtgtcctctgcaacgtgctcgatcacatgaagcgccatggctcgaggtcggtgccggttgagggccttctggagatcctgcgcgcctacacggagaagcatctcacgcacatgagaaagctggccaagaagcggcgggttcggatgcgtacgccgccagagactgacgcgctcaacgttctgctggacgcgttctgcaagtgtgggatggtcaaggaagcagaggcagtgtttggccgcgtgaagaggaagttgctgggtaatgcagagacgtacagtaccctgttcttcgggtggtgccgggcgagggaccccaagaaggccatgaaggtgctcgaggaaatgattcagatgaagcacaccccagagagtttcacctacgttgcagccatcgaatcattttgcagcgctggattggtgtcagaggcaagggaactgtttgagttcatgaggactgaggggttgacggtgtcatcgcccacagccaaaacatattcgattatgattgttgcattagcaaaggctgaccggatggaggagtgttttgaactgctttcagacatgagaacttgtggttgtatgcctgacgtgacgacttataaagatttgattgaagggatgtgcttggtgggtagactggatgctgcttatcgtgtgttggacgagatggggagggctggatttcctcctgacattgtcacgtataattgctttcttaatgtgctttgtagtcttcgaaatgctgatgatgcacttgaactctgtgagaggatgatagaggcacactgtgagcccagtgttcatacctataatatgctgatgatgatgttcttcgagatgggagaggcacatagagcattagatatatggcttgagatggacaaaagaggatgtcaacgtgctatcgatacctacgagataatgatctatggtctctttgattgtggagaaacagaatatgcaactgctcttctagatgaggttataaaccgtgacatgaaactttcatacaagaagtttgatgctataatgctgaggttatcagctgtaggcaaccttggtgcgatacatcggttgtcagagcatatgaggaaattttacaatgttgcgatgtcgagacgatttgcaatcactcagaagaagaagagcataggcctgagaaggaaatgagtgccgtggctattgctgctgttgtttcttgttagttgttactgaggatattcaggagcttattcaaaggtgacggctactggttttcaacaaacacatatcggggcatcgggtgaagccgccaaacgcatatgagcagcgttggcttt

SEQ ID NO: 212678 - DNA, 1756 bp, Zea Mays
gccatccctactccaccccaacctaagcagtaggcagtaggcatcaagcgtcttgcgtggctgcgtccaagtccaagcgccatccggccaccagcgcaggtaccgagccaccgaggtaggagccggccaccgggcagatcccaggctgccagccaccggcgtccagcactccggctgctagctaccggccacccgcagcgcaggccacaccaacgggcagcaaccgcatggtgccatagctgtcgacgaacaccagcaaccagacggccagatcccagtaattcgatttattatatcttcgtcgaggatagtgacacgtcacgtcagtgtccggccatcgcttgagagagtccaacccaaggatggttcaggctacggaagggcaatgcactgcttcttagactattgaagaatttataggatgatgtgcaggagcagagcgtgggcagtaaatgcaaagaaaaaaacacagttgcagaaattgctagcaatagactatacaagatagagccaaattgagcaaaaaaaaagaccattcccatttggatcaccattccctaaccacagcaaaatgaagttggaaaattgagtagttgagtgccgtgtatgcacatgagcagggctaatactttataagaaatgtgctggttcttgatactcctccaaccagttgtagaagaattctggtttggctgaagtagttttacatccgaaagatggactttgtacagatatattctctgtcaacaatatgtatatccaggcggagatgaacttggagggaagcagatttacagtttggtgatattatatattatcaattgcagtttattaatgttgcgcttcttctctattatcaaactattcacacaagacttcatgtgtgcgtgtgtgaaagattttattagtgtaaggtctttagggacagttcacattgaagttctggtgcctacataaattgtaaaccatacatgttgacatgggtacacatctcatggctatatacaactttgacatgaggtttatcttaagattgtgtgttccaataaaagctattactatttcttgcatgtgcatgtctttaggatatccatttttctttatagatttatttatttacatcgcttactgcttactagcctattttttctagcaatttctgcaagtcggcccatcgcgttgaactaaaccatctctaatttcctacaacttcaactccaacaacagaggtaccacaatggacttcttaagaagaataggaaccgtgtacataagcttttttgctctaacaaaataagagtggttgttgcaacaatggcattcagaatgggtcttgataagagtgacgttgaacgggtggttgattgtatcttgccagaaagcgtagaagaatacatacatgaaactggccgtgctgattcaacaacattctataaaagtcgaagtcttttgcacaaatgaatcttatcttcttgtcctttttttcttgtaatttacatttccaacctgctctaagtttcctacataatgacttcaataaaccctttttacagtgaagttcacgaatatgctatgagaaaattctttgccagatattttcttgtgaaaattcagttggatgcatttgctccttggttaaagagtcgacttcagacaagttagatataaaagaggaggtgacggctactggttttcaacaaacacatatcggggcatcgggtgaagccgccaaacgcatatgagcagcgttggcttt

SEQ ID NO: 212679 - DNA, 2068 bp, Zea Mays
cgaacactgtgcggatctgtaaccgtggcaagagcaggcaatggcggaggcgaatgcggggaaggagaagaaggaagtggtgcggctggagcgcgagtccgtgatccccatcatgaagcccaagctcaccatgaagctcgcctacctcatcgaacatcagtctgacagagaagaattcttgaagctctgcaggagggttgagtacaccataagggcttggtaccatctccagtttgatgatatgatggaactgttcgctctcttcgatcctgtgcatggtgctaaaaaactcgagcagcagaacttcctacctgaggaaatcgacacgcttgagcagaacttcctgtcctatttctttcgggtgatggaaaagagcaattttaacatagtaaatgacgatgaggttgaacttgctcattctggacaatatctgttgaatcttcccattaaagttgatgaatcaaagttagatgacaaacttctgtcgaagtattttaaggagcaccgtcatgaaaacctgcccgacttctcagacaagtatgttatatttcgtaggggcattggattggaccgcactagcaactttttcttcatggagaaagtggacatgatcatagctcgtgcatggcgaaggttccttgagaagacgagactgcaaaagctgttctcaagaaagaaaaatagtaagccaaagatagattccaagaagaatgatgatttagctagtgaaatagaagacaaggagctttatgttgaacgcatacgtcttgaaacaatggatttaagctttgggaatttatttggcaaggtcacaattcaagagcctacatttgaagaggtgattgtcttgtataggagaaaaagtccaaagggccaggatgatagggcaattcatgtaaagcacttcaaaaatatcccaatggcagacatggagttggttctgcctgagaagaaaaacccgagcctcacacctatggactgggttcaatttattgtttctgttgtcattggacttgttacactcatcagttcactggaaatgcctaaagctgatttctgggttgtaattgcaatcctctctgcactggcaggatattgcgcgaagatctatttctcgtttcaacagaatatggcaacctaccaaaacttaatcactcaatcaatgtatgacaaacaactagatagtgggaaaggcacactcctccacctctgtgatgatgtgattcaacaggaggtcaaggaggtcataattgcctactacattttgatggagaatggaaaggctaccagtgatgatcttgacttgcaatgcgaggagttaatccaggaagagtttggcttgcaatgcaattttgaggtgatggatgcagttcagaagctggagaggcttggtgtcattacaagagactctattggaaggatttgctgtgtccctctaaagcgtgccaatgagatcatcggcgcgaccacggaagaactggttatgaaagccaggcaaagctagcaatctattattttgaacaatgtagccgcattgtagattcttgcctgatggcgctgtaacgtttatggttactccagaaagtccaaacactgaactcttgcacaccaggagataagtacattctggtcatctccacagtagttctgggagagctacaagaaaatgtggttgtatttatttttttttatttttttggtggggggtactatggtttgtggaacgtcgtcgagggtgttgtaagcatgtagcattcttttgataacaagcgtggtaggaaggatgtttgaagaacacatacaagggctattatgttgctggattgatgctgtgaaccatgtattcttttcgtcagaacagtaaacttccgtaatgctgacggttcactgcggtgtgtacactgggccactggcattggcaacttgacccgtttctggcttctgctcgtgttcctggtctcttcggctcctcgagaagttaggatgctcagatgctgtgatgtaaatgagactctagagcaccattcccacgttccctctaaaactggagtctgaaatctgttctatc

SEQ ID NO: 212680 - DNA, 1105 bp, Zea Mays
cacgacccttacgcatcccaccacacagacaccctctcccacaaaaatgggtggcacatatataatagtgcacaaccagtgtaacatataaagaagtgcaaaaatccacttttatacctgtgtcttatggcattttgagcaacagaaatttagttggtactgtttccaattgctgtccatgtgctgctgctgtgcaaattacatgacacttggcagtggtcatggtagagcctagggatcttagggcgcgatcatgtgtgatggtgggtcggcgcttccacgagtgacgtcgggcaggtgccgtcggaacgggaaagagggagagcatgaactcagggggcaacggctgatgttgtcctgtttaactgttccctggttgctgaacgcgctttgttcttgtggaacaatgatcacattgtaagcttgatagcgcaaaatcgtggtgttatatttccaattatatttgaagcgctcgagaggaatatacatagccactggaatcaagcagttcatggtctcactgcaaatgtgcgcaagatgtttctggacatggacagtgaactatttgaagagtgccagcagcagtatatggataaacaagcaaaagccaaagagatgcaggagcaacgagaatcagcatggagacaattggaagctgttgttgctgccaaggctgctggggatgacatggttttggtcaactagttggcacgacagtttgcaatctgagacttggcactcgtgagtcgtgagagaaacaagtcgatgtctaggcactcacgtgaaagctttccggtcggcggtgaaatagcggagtactcgttagacatcatgctcacgtgcatggcagtgtgtccctgccaaaaaagaatggcggagcatcctgcttttctatgaaacactcggtaaaatttcatactgggatgcagatggaccacgcgttatcgtcttataagtgcctgctaaaaaaatgttgaagataagtatggtgtcaccgctcgccagctgccgccgcatgctgacttgcatcatgtacgtgtccctggacagctagagttattttttacaaaaaaaatcttttaatcaatattttaatattaacctg

SEQ ID NO: 212681 - DNA, 1728 bp, Zea Mays
cttgaaagccttagaaattgaataatacccttcaagtcaggaacccttacttgttgaaaatgtgccagatcctcttgccggggagcagacttggccaacggaagaagacatggaggaggtcgacataaacaacaaacagagaaaattggaaaagaggaagcttccccaaggcacttcagagtaccaggctgcttggattgttgaggacacagatgatgaagataacgactctgatgatgacaaccagactgaatctggaatggtcattgatgagcaaggtcactcagaccaaggaagtgatggttcagatatagatgcagtgtctcactttacggagaagtttgatggagaaactattggggatactgagatggcagatgaagaaaatttgacgaaagaccagatagaggcagagattaagaaaatcaaagaagctaatgctgatgatgaagaatttcctgatgaggtggagacaccattagatgtcccagcaaagaagcggtttgcaaaatacagaggactaaagtcatttaggacatcatcctgggatcctaaggaatcgttgccactggactatgcaagaatatttgcatttgataactttacaagaactcaaaagcatgtctttgctaaaattgctgagttagatggaggcatgaagaattgtgctcaagtgggatcatatgtaaggctttatgtgaaaaatgttcccactgatatagcctccaaactctgtcatccatcaagaagaatacctgtggttgtttctggtcttcttcaacatgagtccaaaatgtcagttcttcacttcagcataaagaaacacgactcttacgaagctcctatcaaatctaaggagcctttgattttcaatgttggattccgacaatttactgcaaggccactgttttcatccgacaacatcaactgcaataaacacaagatggagagatttctgcaccatggccgattttcggttgcatctgtatatgctccaatttccttccctccacttcctctaatagttttgaagaacagagatggcgagcaacctgccattgctgctgtaggttcgctaaaaagtgtggatccagaccggatcattctgaagaaaattgttctgaccgggtatccacagagagtctcgaaactgaaatcgatcgtgcggtatatgttccacaatcccgacgacgtaaaatggttcaagcctgttgagttgtggacaaaacatggtcgtcgtggccgcatcaaggagactgttggtactcatggtgccatgaaatgcttattcaatagcagcattcagcagcatgatactgtgtgcatgagcttgtacaagcgcgcgtatccaaaatggcctgaacagctctaccacgtataagattgcttgacgtttggctggatatgtaccagcaggcagaagcagaacgacgggaatgaaacagccttggagcttgcgtgccgtttagcttaaactaaatattttaggattaggaaaatgttttgttggtcgcctgagctaggaggccgaattttgtattggtccttcatatacttttgaacattctccttggacgtcctttattttagtatcaaatttaaattcaagtttaattgcacgttgagataggatattgccaacttaagctttaacatgttggcatatgtgctacacgcaatcatcggagggtcttctttatcataagaaatagtaggaggtggaatagg

SEQ ID NO: 212682 - DNA, 2422 bp, Zea Mays
gtttttagtgctggtttgacaattgtcattgatcctcgaactttgaacaccaaagaagaattgctgccttgctggtctgggaagcactttctttcactccttccctccccatttcctactgacggccgagggggggcacattctttggcttttgtcccggttttgccctccggctcctgccgagctcagcagggggaggcgctgcgcttcgcttcacgccagatccaacctcaccggccaccagcttgcctccatggccggtcgcttcctcctcgtcgttgccgtcgccctcctcctccgccctggggatgcgtccgtgcacgagtaccgcgggctcagcttcgccaacaagggcaacgccttcatcctccacgccggcagcgagggcctctacgcggcctcccacgccaacaccaccgccgaggacgccgccgcagtggccgaagccttaatccggtttgacaagattacttttaggcgatcagaggatactaataattctgtaaaggagactagttcagctaaggttcaggtactcatttttgagatagaagatcgtgaaatgattggtggatcagcatatggaggtcagaaagctatttgttgtacttcagatcttgcgaagttaggagcttgcacagaaggttctgtcatctaccgcccatcccaggtaaatcctggttggccaaagttgtttgtagcatcttttgatggaagtgacctgatcgcgacactaccgtcaaggaccattccaattaccaaaactgggatatacaatatgtactttatacactgtgatccatcacttgctagtttggaaatcgaggggaaaaccatatggaaaaatcctactggataccttccgggtcggatggcacctcttaagaacttttttggactgatgtcttttgcatttgtcgtacttgggatctattggttttatcagtatatgaagtcctggagagaggttcttccacttcagaactgtattactcttgtgattacactgggcatgtttgagatggcattgtggtattttgagtatgctgaatttaatgagactggagtacggccaaaaggcatcacattttgggctgtcacgtttgggactgtcaagaggacggctgctgaagttattgttctcattgtctcaatgggatatggtgttgtcacgcctactttgggtggcttgacatcaaaagtggtcatgcttggaggaacattctttctagcaacagaaattcttgaattggtagaaaatcttggtgctgttaatgatctatctggaaaagctcgtctgttcttggtctatccagtggccattttagatgctgcatttgttatttggatatttatttctctagctaagaccattggtaaacttcaggcaagaaggttgatggccaaacttgacatttataggaaatttgcaactgcattgatcatatctgttctggtgtctgttgggtggattggctatgagattggtttctcggcagtgtttgaagctggagaccaggagtgttactttaaactgcacctttctactttcaagaacctgtccattttgtattgtttggattcatttgtttgcaccttacttgtttatgcatatgtttcattatttcagaagtcattgatatccctgcaatttctttcttgcagatttactccaaatcaacagatgtatttaatgaacgatggcagcatgcctggattattcctgccttctggcatgtcttgtctttcttacttctttgtgtcatttgctacctgtgggcaccttcacaaaactcaatgagattttcttatgatgcaagtgaattctttgatcgaaaggataatatctcattaattaggccagcacccagtgcatccaagaatggatggaatttatcttctacaccagagcccaaagctacaaaggatgtgaataccgtagcagattttgaaggtgatgatgaggaaaacaaaagggagtagaatgtactgtcgatttgattacggagggtatatttgagatcctttgaagtgtgtgctagagcaattttggtatttaggagaggattggccatgctagttattattaatggagcactccgctcgatgttatttcttcgattcgttaccactacagtagttcttcacatggcgagttatgctgttatcttcatagtcttaatgatggtatatgatagaaacaattagtctggtgtataatatttataataatggcaccatattgcttctggttcctgtgaactcgacatatgttatgaatgtcagagaataaattacgatagaaacaattagtctgatgtataatatttgtattactggcaccatattgcttctggttcctgtgaactctacatatgctatgaatgtcagagaataaattgttttgctggatctttgttag

SEQ ID NO: 212683 - DNA, 2456 bp, Zea Mays
gtgcgggtaaggcgctcacctcaccttcacctacatctcgcactctgtccgtctgtctccaccagctaccgagccagccagcaaacaagcaagcaaccgactgcccccttgcccgtacgcagtacacctcgcgccggtgagcgagcgaatgccgcgggagctctagccctcggctcctcgcccgggccggcgtgtcgttccgatccatgaggaagctgccgccagcgcaccgcctccggtggatgcgcgcgctgctcctcgcgctcccgctcgtctcgctccccatcctctacgcggcgctcggcgcggcgcgctcgtcggcctcggcggcgcggccgccgccgccgccgccgcagcagcagcagcagcggaggccgccgccgaggctggcgtacctcataacgggcgcaggccccggggacggcccgcggatccggaggctgatgcgggcgctctaccacccctggaactactacctcgtcggagtggcgggggaggacgagcggacggatctcgaagccttcgtgcgcgcccaggaggcgccgcgccggtacggcaatgtccgggtgtcggccgcgggggagtggggctccgtctcgcggaggggccccaccgaattggcctccacgctccacgccgccgcggtgctgctccgggagttcgacggctggagctggttcatcaatcttagcgcctccgattacccgctcatgccccaagatgacatccttcatatcttctcatacatgccaagagacctcaatttcattgagcacacaagcaatattggttggaaagagtatcaaagagcccgaccaatcattgtagacccagcattgcaggtcccaaataaaactgaggttgtaacaacaaaggagaaaaggagtatgccctcagctttcaaaatatttgtaggttcgtcttgggtgatgcttagtagatcattcctggagttttgcttactgggatgggataaccttcctcgcacactactcattgatctgcgcttcatggcatgggataacccacctcggacgcaccctgctaacctcacaacagagcattttgatgcaatggcagacagcggggcgccgtttgcacactcatttgccaatgataactcagtcctggatatgatcgacgccaagttgttggggcgagcacctgaccgcttcacgccgggtggatggtgcctgggtagctcagtaggcgggaaagatccgtgtaccttcttgggaaggtcctttattctcaggccgaccaaaggctcggccaagctagagaagttgctgttgaaacttttggaacctgataacttcaggcctaaacagtgtaaataacactcattttacatggtagccagttctttttttttttgtggtagtgttcagaagccgaagtttgatgacatgtttcttgttgttgcggcagtaggcattacatacagatgttttatacttgcaaccggaaagctcaactcacaagtgatttgagatcatacacgatacatgtactcttgctgtttcatcacttctacggctgtacaacaaccgatgataatgagaggttcgctggaagtcagtctgatatgagaggttgccctaggtttcggccccaccctgttccatccgggaattaaccggttcggttcgtgtgggagtttatcatacattttgttttggcaacattggtaaagtaaaattcctgagcgctgcagcagtttttgaacacgaaagtgaagacgctttggtcgttaaagatcgcaaatcccactcacctcaagtcacttcccaacttggacatggcggtccactcccaccttcccgaaactgctcgtacgatctcaagcacggctcctccctagttgtcggctctcggccgcatcaccatccccgtcgccccgagcagtctcgttctccaggtacttctctgattctctctttcttcgtcatggcttacccttccggatcggtgctttctccccgccgcagtaagaatccccccacccacgggttccggttaccactcggcggtagacctgacggtgttgaggtgtttccgcttgctggaacaacttcgctggcgcctgcaagctgttcgaccgaatgcttctgcgaatgaaaaggggaggccaaagaacgcagcgaagaccatcaattaccatctccagcgacttgggcacatcaagttcctctaggtgcatgattttgatatcatttccgcattaggctttactgccctgtgtagaagttcaggaagagaattttttttccaaaatagatttgctgaaacgaggaattaatgtgtttgcttagattgggcaatgctcagcaaataactctgtcaaacaataatatatcagcagtatattgatactgtttttttctcctttttcctaaaataaggatcgggtttaggattttaaggagctattggagatgctctgatgactctgc

SEQ ID NO: 212684 - DNA, 2352 bp, Zea Mays
cgctgcggtgcgggtaaggcgctcacctcaccttcacctacatctcgcactctgtccgtctgtctccaccagctaccgagccagccagcaaacaagcaagcaaccgactgcccccttgcccgtacgcagtacacctcgcgccggtgagcgagcgaatgccgcgggagctctagccctcggctcctcgcccgggccggcgtgtcgttccgatccatgaggaagctgccgccagcgcaccgcctccggtggatgcgcgcgctgctcctcgcgctcccgctcgtctcgctccccatcctctacgcggcgctcggcgcggcgcgctcgtcggcctcggcggcgcggccgccgccgccgccgccgcagcagcagcagcagcggaggccgccgccgaggctggcgtacctcataacgggcgcaggccccggggacggcccgcggatccggaggctgatgcgggcgctctaccacccctggaactactacctcgtcggagtggcgggggaggacgagcggacggatctcgaagccttcgtgcgcgcccaggaggcgccgcgccggtacggcaatgtccgggtgtcggccgcgggggagtggggctccgtctcgcggaggggccccaccgaattggcctccacgctccacgccgccgcggtgctgctccgggagttcgacggctggagctggttcatcaatcttagcgcctccgattacccgctcatgccccaagatgacatccttcatatcttctcatacatgccaagagacctcaatttcattgagcacacaagcaatattggttggaaagagtatcaaagagcccgaccaatcattgtagacccagcattgcaggtcccaaataaaactgaggttgtaacaacaaaggagaaaaggagtatgccctcagctttcaaaatatttgtaggttcgtcttgggtgatgcttagtagatcattcctggagttttgcttactgggatgggataaccttcctcgcacactactcatgtatttcaccaacttcctctcgtcctcagaaggctacttccacacagtgatctgcaactcagagtactaccagaacaccactgtgaacagtgatctgcgcttcatggcatgggataacccacctcggacgcaccctgctaacctcacaacagagcattttgatgcaatggcagacagcggggcgccgtttgcacactcatttgccaatgataactcagtcctggatatgatcgacgccaagttgttggggcgagcacctgaccgcttcacgccgggtggatggtgcctgggtagctcagtaggcgggaaagatccgtgtaccttcttgggaaggtcctttattctcaggccgaccaaaggctcggccaagctagagaagttgctgttgaaacttttggaacctgataacttcaggcctaaacagtgtaaataacactcattttacatggtagccagttctttttttttttgtggtagtgttcagaagccgaagtttgatgacatgtttcttgttgttgcggcagtaggcattacatacagatgttttatacttgcaaccggaaagctcaactcacaagtgatttgagatcatacacgatacatgtactcttgctgtttcatcacttctacggctgtacaacaaccgatgataatgagaggttcgctggaagtcagtctgatatgagaggttgccctaggtttcggccccaccctgttccatccgggaattaaccggttcggttcgtgtgggagtttatcatacattttgttttggcaacattggtaaagtaaaattcctgagcgctgcagcagtttttgaacacgaaagtgaagacgctttggtcgttaaagatcgcaaatcccactcacctcaagtcacttcccaacttggacatggcggtccactcccaccttcccgaaactgctcgtacgatctcaagcacggctcctccctagttgtcggctctcggccgcatcaccatccccgtcgccccgagcagtctcgttctccagaaggggaggccaaagaacgcagcgaagaccatcaattaccatctccagcgacttgggcacatcaagttcctctaggtgcatgattttgatatcatttccgcattaggctttactgccctgtgtagaagttcaggaagagaattttttttccaaaatagatttgctgaaacgaggaattaatgtgtttgcttagattgggcaatgctcagcaaataactctgtcaaacaataatatatcagcagtatattgatactgtttttttctcctttttcctaaaataaggatcgggtttaggattttaaggagctattggagatgctctgatgactctgc

SEQ ID NO: 212685 - DNA, 2736 bp, Zea Mays
cgctgcggtgcgggtaaggcgctcacctcaccttcacctacatctcgcactctgtccgtctgtctccaccagctaccgagccagccagcaaacaagcaagcaaccgactgcccccttgcccgtacgcagtacacctcgcgccggtgagcgagcgaatgccgcgggagctctagccctcggctcctcgcccgggccggcgtgtcgttccgatccatgaggaagctgccgccagcgcaccgcctccggtggatgcgcgcgctgctcctcgcgctcccgctcgtctcgctccccatcctctacgcggcgctcggcgcggcgcgctcgtcggcctcggcggcgcggccgccgccgccgccgccgcagcagcagcagcagcggaggccgccgccgaggctggcgtacctcataacgggcgcaggccccggggacggcccgcggatccggaggctgatgcgggcgctctaccacccctggaactactacctcgtcggagtggcgggggaggacgagcggacggatctcgaagccttcgtgcgcgcccaggaggcgccgcgccggtacggcaatgtccgggtgtcggccgcgggggagtggggctccgtctcgcggaggggccccaccgaattggcctccacgctccacgccgccgcggtgctgctccgggagttcgacggctggagctggttcatcaatcttagcgcctccgattacccgctcatgccccaagatgacatccttcatatcttctcatacatgccaagagacctcaatttcattgagcacacaagcaatattggttggaaagagtatcaaagagcccgaccaatcattgtagacccagcattgcaggtcccaaataaaactgaggttgtaacaacaaaggagaaaaggagtatgccctcagctttcaaaatatttgtaggttcgtcttgggtgatgcttagtagatcattcctggagttttgcttactgggatgggataaccttcctcgcacactactcatgtatttcaccaacttcctctcgtcctcagaaggctacttccacacagtgatctgcaactcagagtactaccagaacaccactgtgaacagtgatctgcgcttcatggcatgggataacccacctcggacgcaccctgctaacctcacaacagagcattttgatgcaatggcagacagcggggcgccgtttgcacactcatttgccaatgataactcagtcctggatatgatcgacgccaagttgttggggcgagcacctgaccgcttcacgccgggtggatggtgcctgggtagctcagtaggcgggaaagatccgtgtaccttcttgggaaggtcctttattctcaggccgaccaaaggctcggccaagctagagaagttgctgttgaaacttttggaacctgataacttcaggcctaaacagtgtaaataacactcattttacatggtagccagttctttttttttttgtggtagtgttcagaagccgaagtttgatgacatgtttcttgttgttgcggcagtaggcattacatacagatgttttatacttgcaaccggaaagctcaactcacaagtgatttgagatcatacacgatacatgtactcttgctgtttcatcacttctacggctgtacaacaaccgatgataatgagaggttcgctggaagtcagtctgatatgagaggttgccctaggtttcggccccaccctgttccatccgggaattaaccggttcggttcgtgtgggagtttatcatacattttgttttggcaacattggtaaagtaaaattcctgagcgctgcagcagtttttgaacacgaaagtgaagacgctttggtcgttaaagatcgcaaatcccactcacctcaagtcacttcccaacttggacatggcggtccactcccaccttcccgaaactgctcgtacgatctcaagcacggctcctccctagttgtcggctctcggccgcatcaccatccccgtcgccccgagcagtctcgttctccaggtacttctctgattctctctttcttcgtcatggcttacccttccggatcggtgctttctccccgccgcagtaagaatccccccacccacgggttccggttaccactcggcggtagacctgacggtgttgaggtgtttccgcttgctggaacaacttcgctggcgcctgcaagctgttcgaccgaatgcttctgcgaatgaagtgaaggtgagggtgaagcagcagaatgggtcggtaggctggtgctttgcacataaacccaaagaagtttggtgctgttgcgaagccttgcatgccagaaatggtggcctggccttaaacaaacagaatgatgacaagtgcatcaggcagaagtatcttttggttgcatgcacccaaactcagaaggggaggccaaagaacgcagcgaagaccatcaattaccatctccagcgacttgggcacatcaagttcctctaggtgcatgattttgatatcatttccgcattaggctttactgccctgtgtagaagttcaggaagagaattttttttccaaaatagatttgctgaaacgaggaattaatgtgtttgcttagattgggcaatgctcagcaaataactctgtcaaacaataatatatcagcagtatattgatactgtttttttctcctttttcctaaaataaggatcgggtttaggattttaaggagctattggagatgctctgatgactctgc

SEQ ID NO: 212686 - DNA, 1150 bp, Zea Mays
atgccacagcacgacagctctgctactccacccgttgagtaccacgacagctctgctacgttcgaaacgaaaaaagggacaggaaaagacagcggaaaaatcctggacgcgatcgcagcaccgcggcgagataatgagcagcctgtcctccggcatctctgcctcgccatctgcagcgcccagcaccgctcggcgccgccatgacgcagcgccgcagcagctgagggtgaaggcggcggcgcggccacagctgctgcacgccggccgccggcgttcgagtgtcgggaggaggccgggcggcggcgcggtggtggtgagggccgggcctgggccgctgtcggagatcgagccggacctggaggaggacgccatcgacgtgtaccgcaccaacggcatcagcccggaggacttcgagtacgggaagtatgacggacaccacacctatttcgaaggccaagacaagaagggcttctgggaggatgtctccgagtggtaccaagaagctgagcctcctcagggctttcaagcactcatctcctgggcatttcctcctgcgatcatcctcggcatggctttcaatgtgccgggggagtacctgtacatcggggcggccgtcttcatcgtggtgttctgcgtcatcgagatgggcaagcccgacaagccgcacaacttcgagccggagatctacatgatggagaggtcggcccgcgacaagctcatcgccgactacaactccatggacatctgggacttcaacgagaagtacggcgagctctgggacttcaccgtcaacaccagggacgacatcgtcaagtcgacctagatgcattgcgtacaccgctcgctgcccttcagattgttgcctcacagcaaaaaaaaccctgtgaaaggaagctgtagctgctaggaaaatctcttgaataaaaaggaaagccatccttcctgtaagactggagagcctgaaaatctgttctatcctcgtgccatataatacacgacatgttctgcagactgttgcttcaactttctgcatgaattgcctttgttttcatgttttctccaatactttgaagggaagagaaaaaaaaacacatgcaagactgatgcgctgaacaatcaagagccgctgaaaagggagaattaggaagga

SEQ ID NO: 212687 - DNA, 1421 bp, Zea Mays
gtttgtttgtgacacacgaaattctcaggtcccggtcccgggtccaggcacccttctcgctcggttgctcgggagctttccccttcctgttcctgaagcttccgacatccgaccgcctcctcctcctcgttctactcgccgccccttctagaatcatccagaggcgtgccggtgaagcgcgagagcggtgaggcatggcgatgcagacgggggtcgcgacctccaagggatgacgggctcgatcctgctgcggaatggccgcttatctgatgtgttgggagaactccaggagattatgaagggtgtaaatcaaggaacttcttcgggtccctatgacattgcacttattcaagctcagattcggaatttagcgcaagaagtcagagatttgacattgtcaaagcccattaccatactgaatggcaaatctgactcgggaggcagtttatcatcctacatactgccagcagcagcagttggagcaatgggttattgctacatgtggtggaaggggttgtctctctcagatgtcatgtttgtcacaaaacacaacatggcaaatgctgttcagagcatgtcaaagcagttggagcaagtttcatcagcactagctgcaacaaaaagacatctaactcaacggcttgagaatttggatggcaaaatggatgaacaagtagaggtctccaaagctattagaaatgaggtcaatgatgttaaagatgacctgtctcaaattggatttgatgtcgaatcaattcagaaaatggttgctggattggagggaaagatcgagttacttgagaacaaacaggacgtggctaatactggtatctggtatctctgccaagtagcaggcggtttaaaagatggaataaacaccaggtttttccaggaaaccagtgagaagctgaagctctcacattcagctcaacctgaaaacaagccagtgaaggggcttgaatttttttcggaaagcaccatggaacagaaagtagctgactccaaaccaattgcggtgacagtcgacgctgagaagcctgagaaaaccgctgctgtaatgggcaccacagtgcacaggtctatcaggttctcatatcggaaggcaggccttgctttgtgatcaaatcctctccgcttgagatgcacgtggccttcctggttgctttttcttttttggcaacaaccttcctggttgctttgtgtgatggtcagaaaacatagaagaataacctgcaactggagtgacagaatttcttttccccgcagtagacaggtgtgcgttatttggttggaattatctccagtccactatcaattttttttccttggattttgattcattttatgtttcgatttgttgccttatatactgtaaagtcattggaaagaataaataaaacacgaatgttttttgtcaaatt

SEQ ID NO: 212688 - DNA, 1805 bp, Zea Mays
gcgggctgcggcctagccacagccacgtcagcaatgtcgaaagtcgaaaccaaccccactccacgtctcccccaggagaagcgaccattcaaagccgccgggagctcggcgtcaccgccgcgagctcgacacctcgacacctcgtgccgccgcagcgcttgctttcgtcccccttacgccactcccacttggccacttcagccaccatctccctgaagctagtggctaacctcctcaccgccatgggcacccctctcctcatcccccttctcgtcaccctccagctgttcactacctcctcccccgcggtcgcgtcgtcacacatctccgccatcatctcgcagtcgggcctcgacttcgccaaggacctgctcgtatcccatgccgttgcgaccctcacgcccatgaacgtgccggacatcgagaggaccatgagcatacccctcgtgggcaccgtccgcatggccgcatccgggattgtgctccacggcctcgccgtcaccaactccaccgtcgctgtgggggacgcgggtgttgtcgtggccgcctcgttggccagcgcgaacctcaccatggagtggaactactcgtatgacgcctggattgtgaccatatccgacagcgggaatgcttcggtccaggttgaaggaatggaggttggtgtttccatggtcatgaagaatcagaatggatctatcaagctgtctgttacagaatgtagctgttatatggaggacttggacataacactaaatgggggagcatcttggttctatcaagtgtttatagatggtttcagtaatcatatcatatcatcggtggaaaatgcaattaagaacaaagtaatggaaggtgcactgaagcttgattctttcctgggaaacctcccaaagaaaattgatcttgatagtgttgctgcaatgaatgtgactgttgttaatgatccaatattcaagagctcctctgttgagtttgatatagatggcttgtttattccatctgatgaaactgctccgagagacatgcatcttggagatacccaatttgcattacctcttgggagctcctcaaaaatgctttggatttcattggatgaagatgtcttcaactccgtttcagctctctacttcaaggctggtttgctgcaacggatggtggacaagattcctgatcagttttttctgaacactgctagctggagatttttggttcctcgattgtatcgagagtttcctgacgataatatgctactgaatatctctgcagtttcgcctccctctgtgagaattaatgtgggtagaattgatgccacagttgacttagatataacggttaatgttttggattttggtgagatagttccagttgcatgcttatcagtgtcggttgatgtttatggagctgcagcagtatcagagaataatcttgttgggagagtggaattggactatttctcatttaccttaaagtggagcaaagttggcaaactccacaccattctagtgcagactgtgctgaggattttgctgaaaaaattgtttgtaccatatgtgaactcgtatctcaagcatggcttccggttgcccatcatcaagggtttctccgtcacagatgcatatatcctcacttcttactcaagaatgattgttagctgcgatgttgccttcattgagccagaggttctgtctcctgtccaagagtccaacaccaacgaagatttgtcatatgaggttctgtctcctgtccaagagtccaagaccaacgaagagttgaccaacgaagatttgtcatttgagcgcgaggac

SEQ ID NO: 212689 - DNA, 1931 bp, Zea Mays
cttaaccattgttctttctttctgtctccagcaagatctatgggaggaatacattgatctgatcatgtagtgcatgtgcaatgatacctgtgaaatagaagtcgttttctggggggagctccatcgtcgggaagaggggtcatggctcaccacggacaaaaggtcgaaaagcaaggtcctgtcatcacaaactcctagcaaatttagcgatatgtcatgagaacaagacaggacaacattacagcctcagaggtaataaccttcgttttctatttgcttcagccaacttgatttaccagcttatcttcttccactttctgcccatttcctattgattcagtccttctactcagctttggaggttgtctgtttacaaatacggaattgtccccaatactgtttttatgatgttaacaccatgaaccgagtagcagtttatgcccatgagaatgcttcaatgccccatttgggtcttgtgggcaaatgatcggatggtgcataacttcgatgtagcttatttgatcagcttataatggaacgatgggaagactttgatccaccacagcgcttgggatgttgagctgcaatttgaattgacaattatttgacaacaactaaaatacattttttcttgcttctgctcttgcagtctttgtaaattcaggtgtcagtgttggattcaaattacttttaaaaaaatagaggttagcattccactagaatatatggtcacatgtggctacttatttcctgcattcaaaatgtagtcacatgagtagtggtgaactgatgatgccatatgtggctacttatttcttgcattgaaaatgtggagctaaagtgtgtatgttttgttacacaaacgttggtgttgttgtgctccttttgctgaagcactgccttttacggttagcgacactcaatgttcgatcacttgtacaaaacaagatatgtattttcttttgagcaattcttttaaaatatatggggcaatgaagagcttcatattgtgttgaacctcagtctataatatttagttgcaagtgagagttttatacttacgacatgctacattttgttatccttatagttggttagcctattgtagaaggtggttgaacttgtactttgagaccaaatatatattgcatacttgatattatactattatttgagcttgtcttattgtactcttatctgttcttatgaaggttagaggaatgtgtttggggtgagtaatttttttgtgttgtttcctctatccatggccatggaggagcaaaggaggccacctagctcgaagatagcgccagtgtccatgaaggcgtcctctgcaaatgcgacgcttcaaggcatgaagaacagaagccattttcgaagggacaggaaaactgcgctgcaacaagacgtgtggacaagctgaggaagaagttgtggcacgagaagaacgtccactaagctctaaagcaggcgttctcgaggccgctctgcctcgcctccctattgtctcaagtcaatgtccttctttgcttttcgatcaatttcacaagcaagaagcaacctaaccaataatctattgcccttccgaaggactcgatacactttctgatttctgcctcttctgaattgttcctagacattggagcttctggccccgttgtaagtggaaaatccttgtacttaaaggttgcaatgtagtggccccgttgtaacgcacgggcactcacctagtgtcaataagaagtacaagctcttgtctgctggtaaaagaaaaacatcttgactggacagtgacattaatataataaaaacggtgtttggctgctatggaaaaatgccagccgactttcttttaaaaaaaatatgctagccgatgtatttttgttggactctatggaaagatgtttttcttttaccagcagacaagagct

SEQ ID NO: 212690 - DNA, 1805 bp, Zea Mays
ctctcttaaccattgttctttctttctgtctccagcaagatctatgggaggaatacattgatctgatcatgtagtgcatgtgcaatgatacctgtgaaatagaagtcgttttctggggggagctccatcgtcgggaagaggggtcatggctcaccacggacaaaaggtagtttatgatcaagctggtgtgggaggctcaccacggacaaaaggttcgtgatttccatcaccacgctcccacaggattttgacagctgttgtcaacgaaggcgagaatggtgtactctaagctcagcaatttccagaaaaaatcgttaacttgcaagttagtttcaatatttctagcatattccaatcacagcatcgtccagcgcacacccatccaatttaggggcttcttgttgtgctctcaggccccagtaagaactccaatccctagatctcttttcgtgtgttaagttgtgcttaagaactgctgatgcagacattaggttagggcaaggattttggttaattggaataaggcagcgctttaaccttagttcctcagtttcagctttaacatgtgttgtctccatagtatatgctctgattaacatggcggagaggatttgtgaggtgaattacttgtaagatgttatctaagtggggggacagggaaagggaactgtggctccattgaggatgatagtgttatgaatttcttctcctactttagagctctgttctatattgttcttcggtaaatcggttgttgcattacttataaggtatgcctaatttactgttcttggttaggcaccatagatcctgtcattgtttgagtgcagtaaaccatgtaaattctctcttataagttgtccttttaattatactaataatcgattgtccaaatttgtttagacaccatattattttgtcattatttgagtacagaaagaagtaaactctcttacttataaatgtgctaataattctctatctaaatttaggcacttgaaatataccaactcgcatataagatataaattatattaacgatgccacgccaaatgtgtacttccctaggtcgaaaagcaaggtcctgtcatcacaaactcctagcaaatttagcgatatgtcatgagaacaagacaggacaacattacagcctcagaggaggccacctagctcgaagatagcgccagtgtccatgaaggcgtcctctgcaaatgcgacgcttcaaggcatgaagaacagaagccattttcgaagggacaggaaaactgcgctgcaacaagacgtgtggacaagctgaggaagaagttgtggcacgagaagaacgtccactaagctctaaagcaggcgttctcgaggccgctctgcctcgcctccctattgtctcaagtcaatgtccttctttgcttttcgatcaatttcacaagcaagaagcaacctaaccaataatctattgcccttccgaaggactcgatacactttctgatttctgcctcttctgaattgttcctagacattggagcttctggccccgttgtaagtggaaaatccttgtacttaaaggttgcaatgtagtggccccgttgtaacgcacgggcactcacctagtgtcaataagaagtacaagctcttgtctgctggtaaaagaaaaacatcttgactggacagtgacattaatataataaaaacggtgtttggctgctatggaaaaatgccagccgactttcttttaaaaaaaatatgctagccgatgtatttttgttggactctatggaaagatgtttttcttttaccagcagacaagagct

SEQ ID NO: 212691 - DNA, 1873 bp, Zea Mays
ctctcttaaccattgttctttctttctgtctccagcaagatctatgggaggaatacattgatctgatcatgtagtgcatgtgcaatgatacctgtgaaatagaagtcgttttctggggggagctccatcgtcgggaagaggggtcatggctcaccacggacaaaaggtagtttatgatcaagctggtgtgggaggctcaccacggacaaaagacggcacactgagcttgcacagtcaggattttgacagctgttgtcaacgaaggcgagaatggtgtactctaagctcagcaatttccagaaaaaatcgttaacttgcaagttagtttcaatatttctagcatattccaatcacagcatcgtccagcgcacacccatccaatttaggggcttcttgttgtgctctcaggccccagtaagaactccaatccctagatctcttttcgtgtgttaagttgtgcttaagaactgctgatgcagacattaggttagggcaaggattttggttaattggaataaggcagcgctttaaccttagttcctcagtttcagctttaacatgtgttgtctccatagtatatgctctgattaacatggcggagaggatttgtgaggtgaattacttgtaagatgttatctaagtggggggacagggaaagggaactgtggctccattgaggatgatagtgttatgaatttcttctcctactttagagctctgttctatattgttcttcggtaaatcggttgttgcattacttataaggtatgcctaatttactgttcttggttaggcaccatagatcctgtcattgtttgagtgcagtaaaccatgtaaattctctcttataagttgtccttttaattatactaataatcgattgtccaaatttgtttagacaccatattattttgtcattatttgagtacagaaagaagtaaactctcttacttataaatgtgctaataattctctatctaaatttaggcacttgaaatataccaactcgcatataagatataaattatattaacgatgccacgccaaatgtgtacttccctaggtcgaaaagcaaggtcctgtcatcacaaactcctagcaaatttagcgatatgtcatgagaacaagacaggacaacattacagcctcagaggttagaggaatgtgtttggggtgagtaatttttttgtgttgtttcctctatccatggccatggaggagcaaaggaggccacctagctcgaagatagcgccagtgtccatgaaggcgtcctctgcaaatgcgacgcttcaaggcatgaagaacagaagccattttcgaagggacaggaaaactgcgctgcaacaagacgtgtggacaagctgaggaagaagttgtggcacgagaagaacgtccactaagctctaaagcaggcgttctcgaggccgctctgcctcgcctccctattgtctcaagtcaatgtccttctttgcttttcgatcaatttcacaagcaagaagcaacctaaccaataatctattgcccttccgaaggactcgatacactttctgatttctgcctcttctgaattgttcctagacattggagcttctggccccgttgtaagtggaaaatccttgtacttaaaggttgcaatgtagtggccccgttgtaacgcacgggcactcacctagtgtcaataagaagtacaagctcttgtctgctggtaaaagaaaaacatcttgactggacagtgacattaatataataaaaacggtgtttggctgctatggaaaaatgccagccgactttcttttaaaaaaaatatgctagccgatgtatttttgttggactctatggaaagatgtttttcttttaccagcagacaagagct

SEQ ID NO: 212692 - DNA, 2944 bp, Zea Mays
cgacgagatgctacaactacactcatgacagcttcaatagcatatctgcattttttcctcgtcctcagaatcttctctctcgcaagatctatgggaggaatacattgatctgatcatgtagtgcatgtgcaatgatacctgtgaaatagaagtcgttttctggggggagctccatcgtcgggaagaggggtcatggctcaccacggacaaaagcacttcttttgacccgaatacatgaagccatgaaagtaatggttgaggggagggggaagcaagtacctgatgatcttttgggtcaatacgggtagtttatgatcaagctggtgtgggaggctcaccacggacaaaaggattttgacagctgttgtcaacgaaggcgagaatggtgtactctaagctcagcaatttccagaaaaaatcgttaacttgcaagttagtttcaatatttctagcatattccaatcacagcatcgtccagcgcacacccatccaatttaggggcttcttgttgtgctctcaggccccagtaagaactccaatccctagatctcttttcgtgtgttaagttgtgcttaagaactgctgatgcagacattaggttagggcaaggattttggttaattggaataaggcagcgctttaaccttagttcctcagtttcagctttaacatgtgttgtctccatagtatatgctctgattaacatggcggagaggatttgtgaggtgaattacttgtaagatgttatctaagtggggggacagggaaagggaactgtggctccattgaggatgatagtgttatgaatttcttctcctactttagagctctgttctatattgttcttcggtaaatcggttgttgcattacttataaggtatgcctaatttactgttcttggttaggcaccatagatcctgtcattgtttgagtgcagtaaaccatgtaaattctctcttataagttgtccttttaattatactaataatcgattgtccaaatttgtttagacaccatattattttgtcattatttgagtacagaaagaagtaaactctcttacttataaatgtgctaataattctctatctaaatttaggcacttgaaatataccaactcgcatataagatataaattatattaacgatgccacgccaaatgtgtacttccctaggtcgaaaagcaaggtcctgtcatcacaaactcctagcaaatttagcgatatgtcatgagaacaagacaggacaacattacagcctcagaggtaataaccttcgttttctatttgcttcagccaacttgatttaccagcttatcttcttccactttctgcccatttcctattgattcagtccttctactcagctttggaggttgtctgtttacaaatacggaattgtccccaatactgtttttatgatgttaacaccatgaaccgagtagcagtttatgcccatgagaatgcttcaatgccccatttgggtcttgtgggcaaatgatcggatggtgcataacttcgatgtagcttatttgatcagcttataatggaacgatgggaagactttgatccaccacagcgcttgggatgttgagctgcaatttgaattgacaattatttgacaacaactaaaatacattttttcttgcttctgctcttgcagtctttgtaaattcaggtgtcagtgttggattcaaattacttttaaaaaaatagaggttagcattccactagaatatatggtcacatgtggctacttatttcctgcattcaaaatgtagtcacatgagtagtggtgaactgatgatgccatatgtggctacttatttcttgcattgaaaatgtggagctaaagtgtgtatgttttgttacacaaacgttggtgttgttgtgctccttttgctgaagcactgccttttacggttagcgacactcaatgttcgatcacttgtacaaaacaagatatgtattttcttttgagcaattcttttaaaatatatggggcaatgaagagcttcatattgtgttgaacctcagtctataatatttagttgcaagtgagagttttatacttacgacatgctacattttgttatccttatagttggttagcctattgtagaaggtggttgaacttgtactttgagaccaaatatatattgcatacttgatattatactattatttgagcttgtcttattgtactcttatctgttcttatgaaggttagaggaatgtgtttggggtgagtaatttttttgtgttgtttcctctatccatggccatggaggagcaaaggaggccacctagctcgaagatagcgccagtgtccatgaaggcgtcctctgcaaatgcgacgcttcaaggcatgaagaacagaagccattttcgaagggacaggaaaactgcgctgcaacaagacgtgtggacaagctgaggaagaagttgtggcacgagaagaacgtccactaagctctaaagcaggcgttctcgaggccgctctgcctcgcctccctattgtctcaagtcaatgtccttctttgcttttcgatcaatttcacaagcaagaagcaacctaaccaataatctattgcccttccgaaggactcgatacactttctgatttctgcctcttctgaattgttcctagacattggagcttctggccccgttgtaagtggaaaatccttgtacttaaaggttgcaatgtagtggccccgttgtaacgcacgggcactcacctagtgtcaataagaagtacaagctcttgtctgctggtaaaagaaaaacatcttgactggacagtgacattaatataataaaaacggtgtttggctgctatggaaaaatgccagccgactttcttttaaaaaaaatatgctagccgatgtatttttgttggactctatggaaagatgtttttcttttaccagcagacaagagct

SEQ ID NO: 212693 - DNA, 5254 bp, Zea Mays
acggaggtcgccttccgcatggacaacattcgcgacgagatgctacaactacactcatgacagcttcaatagcatatctgcattttttcctcgtcctcagaatcttctctctcgcaagatctatgggaggaatacattgatctgatcatgtagtgcatgtgcaatgatacctgtgaaatagaagtcgttttctggggggagctccatcgtcgggaagaggggtcatggctcaccacggacaaaaggttcgtgatttccatcaccacgctcccacaggttacaattattttcttgaattttccattcgactatatcactttctaaatcccactggttatgtacatgagcaagatttttatacttaaataaatattgcttgctgtttccttggattgtaagagatgctaataacgaagctgtcccaattagacggcacactgagcttgcacagtcaggtacagttttggatttatgccttaagtcaaacagttttggagggcaacacaacgctcaaagctaacttttcatgattagttatgctgaatcacgagcgtccttcgatagaaaaatggggggaatcatagaaatttatacagaactgactgaaaagcttactgtcttcaagtattccatagcagcagcccagtcagattctaccaacaattcaccaagctccacaaatgcctgcaaaataatctcattaaaataggttatatgcaaacatgaaataatcgatcggtaaagttaatgtgtggcctcataacggagagtaagaatgcaactaggagtctaggactaaacacaaacaggaagtaatttgaatagacatcatactcatcatctgatattgaacagcttccacactttgttttattcattttttggttaatcactctgaaactatcgtccagtaacttcataatacatgacactgtagtaagtcccaaaaatgtagtactgtgacacataaattagtcaaaagaaaaaacagctaaacaacaaatgtccttttttttgcaatcatgaagcttggtatgggtgtcttatccttttctaaaacaaatatagcagacgtgagagaaactatgaagataaagaatgtttctcattatagattaataattaaggtaacaatagaaaatctgtataccaatcaaaactacacattagggcaaatgtagtgtgttcctttcatggaccaaatacagatcaaatcgacaacaaaaaactgactgtaagatgctagcattccaagttttcaatcaacttcatcctagatcagcatcttcattgttgcaaatcatcagcattcaaagatccagagatggaccaaaattcagtgttcaaaaatatatattttttgccatgttcatatggagtaatttatgttcagattgagcatttgaaaatttcatcagtacattcatcctggaaagcagttgtactatttatgtattgacatgttagaaacaaattagtggcagaattatattttgggaccatgttacagcacttcttttgacccgaatacatgaagccatgaaagtaatggttgaggggagggggaagcaagtacctgatgatcttttgggtcaatacgggtagtttatgatcaagctggtgtgggaggctcaccacggacaaaaggttcgtgatttccatcaccacgctcccacaggttacaattattttcttgaattttccattcgattatatcactttctaaatcccactggttatgtacatgagcaagatttttatacttaaataaatattgcttgctgtttccttggattgtaagagatgctaataacgaagctgtcccaattagacggcacactgagcttgcacagtcaggtacatgatcccttgtcactgtaccagtttctgtgcttctctctcatgaaaacaactgttgggattatttgtttctgaagatcagtgcatttattagttctctcatgaaacacaacactatgatttaaatgctcacattttgattactgtgtaaacaatgggacatacaagatttttttaggtttttgtagctcattattatagtatgtgttattaatatgatgtagcaggcaacatagtatcctgcgattcctaattagttgatgcctaagggtttttgtagcttatgcaactaagaaaacttcttcaggctagaaaaaaactttgaagtgtgggacatggtgcttagaaagtgtggcaagcatcgaatttacattgatgtagtccatggtgtaggatttttagatggcaaacacatcataatttgtgtttacaattgtttattaggaggcacattgaccattgcttccttccaaaatttatatgttgcagtttacttccttaagaaactaactgaagcattatgaggagctgtagcaaatcgacaatccatctgctattgctaataatcatgctattttggcaatggcaaaatttatatgttgtagactacaacaaacaatgtctatgaagtcgttgacatctggattatattctattagtgctgatctggatcaattcttgtttattaggagacttcaaatgttttctctcccctataaaaacactttgtttcatttgcttataattaactgctgcactgtccatggattgctctctcattctacttcctatgattttaggattttgacagctgttgtcaacgaaggcgagaatggtgtactctaagctcagcaatttccagaaaaaatcgttaacttgcaagttagtttcaatatttctagcatattccaatcacagcatcgtccagcgcacacccatccaatttaggggcttcttgttgtgctctcaggccccagtaagaactccaatccctagatctcttttcgtgtgttaagttgtgcttaagaactgctgatgcagacattaggttagggcaaggattttggttaattggaataaggcagcgctttaaccttagttcctcagtttcagctttaacatgtgttgtctccatagtatatgctctgattaacatggcggagaggatttgtgaggtgaattacttgtaagatgttatctaagtggggggacagggaaagggaactgtggctccattgaggatgatagtgttatgaatttcttctcctactttagagctctgttctatattgttcttcggtaaatcggttgttgcattacttataaggtatgcctaatttactgttcttggttaggcaccatagatcctgtcattgtttgagtgcagtaaaccatgtaaattctctcttataagttgtccttttaattatactaataatcgattgtccaaatttgtttagacaccatattattttgtcattatttgagtacagaaagaagtaaactctcttacttataaatgtgctaataattctctatctaaatttaggcacttgaaatataccaactcgcatataagatataaattatattaacgatgccacgccaaatgtgtacttccctaggtcgaaaagcaaggtcctgtcatcacaaactcctagcaaatttagcgatatgtcatgagaacaagacaggacaacattacagcctcagaggtaataaccttcgttttctatttgcttcagccaacttgatttaccagcttatcttcttccactttctgcccatttcctattgattcagtccttctactcagctttggaggttgtctgtttacaaatacggaattgtccccaatactgtttttatgatgttaacaccatgaaccgagtagcagtttatgcccatgagaatgcttcaatgccccatttgggtcttgtgggcaaatgatcggatggtgcataacttcgatgtagcttatttgatcagcttataatggaacgatgggaagactttgatccaccacagcgcttgggatgttgagctgcaatttgaattgacaattatttgacaacaactaaaatacattttttcttgcttctgctcttgcagtctttgtaaattcaggtgtcagtgttggattcaaattacttttaaaaaaatagaggttagcattccactagaatatatggtcacatgtggctacttatttcctgcattcaaaatgtagtcacatgagtagtggtgaactgatgatgccatatgtggctacttatttcttgcattgaaaatgtggagctaaagtgtgtatgttttgttacacaaacgttggtgttgttgtgctccttttgctgaagcactgccttttacggttagcgacactcaatgttcgatcacttgtacaaaacaagatatgtattttcttttgagcaattcttttaaaatatatggggcaatgaagagcttcatattgtgttgaacctcagtctataatatttagttgcaagtgagagttttatacttacgacatgctacattttgttatccttatagttggttagcctattgtagaaggtggttgaacttgtactttgagaccaaatatatattgcatacttgatattatactattatttgagcttgtcttattgtactcttatctgttcttatgaaggttagaggaatgtgtttggggtgagtaatttttttgtgttgtttcctctatccatggccatggaggagcaaaggaggccacctagctcgaagatagcgccagtgtccatgaaggcgtcctctgcaaatgcgacgcttcaaggcatgaagaacagaagccattttcgaagggacaggaaaactgcgctgcaacaagacgtgtggacaagctgaggaagaagttgtggcacgagaagaacgtccactaagctctaaagcaggcgttctcgaggccgctctgcctcgcctccctattgtctcaagtcaatgtccttctttgcttttcgatcaatttcacaagcaagaagcaacctaaccaataatctattgcccttccgaaggactcgatacactttctgatttctgcctcttctgaattgttcctagacattggagcttctggccccgttgtaagtggaaaatccttgtacttaaaggttgcaatgtagtggccccgttgtaacgcacgggcactcacctagtgtcaataagaagtacaagctcttgtctgctggtaaaagaaaaacatcttgactggacagtgacattaatataataaaaacggtgtttggctgctatggaaaaatgccagccgactttcttttaaaaaaaatatgctagccgatgtatttttgttggactctatggaaagatgtttttcttttaccagcagacaagagct

SEQ ID NO: 212694 - DNA, 3829 bp, Zea Mays
caagaagcagagcctccgcgctccacggaggtcgccttccgcatggacaacattcgcgacgagatgctacaactacactcatgacagcttcaatagcatatctgcattttttcctcgtcctcagaatcttctctctcgcaagatctatgggaggaatacattgatctgatcatgtagtgcatgtgcaatgatacctgtgaaatagaagtcgttttctggggggagctccatcgtcgggaagaggggtcatggctcaccacggacaaaagcacttcttttgacccgaatacatgaagccatgaaagtaatggttgaggggagggggaagcaagtacctgatgatcttttgggtcaatacgggtagtttatgatcaagctggtgtgggaggctcaccacggacaaaagacggcacactgagcttgcacagtcaggtacatgatcccttgtcactgtaccagtttctgtgcttctctctcatgaaaacaactgttgggattatttgtttctgaagatcagtgcatttattagttctctcatgaaacacaacactatgatttaaatgctcacattttgattactgtgtaaacaatgggacatacaagatttttttaggtttttgtagctcattattatagtatgtgttattaatatgatgtagcaggcaacatagtatcctgcgattcctaattagttgatgcctaagggtttttgtagcttatgcaactaagaaaacttcttcaggctagaaaaaaactttgaagtgtgggacatggtgcttagaaagtgtggcaagcatcgaatttacattgatgtagtccatggtgtaggatttttagatggcaaacacatcataatttgtgtttacaattgtttattaggaggcacattgaccattgcttccttccaaaatttatatgttgcagtttacttccttaagaaactaactgaagcattatgaggagctgtagcaaatcgacaatccatctgctattgctaataatcatgctattttggcaatggcaaaatttatatgttgtagactacaacaaacaatgtctatgaagtcgttgacatctggattatattctattagtgctgatctggatcaattcttgtttattaggagacttcaaatgttttctctcccctataaaaacactttgtttcatttgcttataattaactgctgcactgtccatggattgctctctcattctacttcctatgattttaggattttgacagctgttgtcaacgaaggcgagaatggtgtactctaagctcagcaatttccagaaaaaatcgttaacttgcaagttagtttcaatatttctagcatattccaatcacagcatcgtccagcgcacacccatccaatttaggggcttcttgttgtgctctcaggccccagtaagaactccaatccctagatctcttttcgtgtgttaagttgtgcttaagaactgctgatgcagacattaggttagggcaaggattttggttaattggaataaggcagcgctttaaccttagttcctcagtttcagctttaacatgtgttgtctccatagtatatgctctgattaacatggcggagaggatttgtgaggtgaattacttgtaagatgttatctaagtggggggacagggaaagggaactgtggctccattgaggatgatagtgttatgaatttcttctcctactttagagctctgttctatattgttcttcggtaaatcggttgttgcattacttataaggtatgcctaatttactgttcttggttaggcaccatagatcctgtcattgtttgagtgcagtaaaccatgtaaattctctcttataagttgtccttttaattatactaataatcgattgtccaaatttgtttagacaccatattattttgtcattatttgagtacagaaagaagtaaactctcttacttataaatgtgctaataattctctatctaaatttaggcacttgaaatataccaactcgcatataagatataaattatattaacgatgccacgccaaatgtgtacttccctaggtcgaaaagcaaggtcctgtcatcacaaactcctagcaaatttagcgatatgtcatgagaacaagacaggacaacattacagcctcagaggtaataaccttcgttttctatttgcttcagccaacttgatttaccagcttatcttcttccactttctgcccatttcctattgattcagtccttctactcagctttggaggttgtctgtttacaaatacggaattgtccccaatactgtttttatgatgttaacaccatgaaccgagtagcagtttatgcccatgagaatgcttcaatgccccatttgggtcttgtgggcaaatgatcggatggtgcataacttcgatgtagcttatttgatcagcttataatggaacgatgggaagactttgatccaccacagcgcttgggatgttgagctgcaatttgaattgacaattatttgacaacaactaaaatacattttttcttgcttctgctcttgcagtctttgtaaattcaggtgtcagtgttggattcaaattacttttaaaaaaatagaggttagcattccactagaatatatggtcacatgtggctacttatttcctgcattcaaaatgtagtcacatgagtagtggtgaactgatgatgccatatgtggctacttatttcttgcattgaaaatgtggagctaaagtgtgtatgttttgttacacaaacgttggtgttgttgtgctccttttgctgaagcactgccttttacggttagcgacactcaatgttcgatcacttgtacaaaacaagatatgtattttcttttgagcaattcttttaaaatatatggggcaatgaagagcttcatattgtgttgaacctcagtctataatatttagttgcaagtgagagttttatacttacgacatgctacattttgttatccttatagttggttagcctattgtagaaggtggttgaacttgtactttgagaccaaatatatattgcatacttgatattatactattatttgagcttgtcttattgtactcttatctgttcttatgaaggttagaggaatgtgtttggggtgagtaatttttttgtgttgtttcctctatccatggccatggaggagcaaaggaggccacctagctcgaagatagcgccagtgtccatgaaggcgtcctctgcaaatgcgacgcttcaaggcatgaagaacagaagccattttcgaagggacaggaaaactgcgctgcaacaagacgtgtggacaagctgaggaagaagttgtggcacgagaagaacgtccactaagctctaaagcaggcgttctcgaggccgctctgcctcgcctccctattgtctcaagtcaatgtccttctttgcttttcgatcaatttcacaagcaagaagcaacctaaccaataatctattgcccttccgaaggactcgatacactttctgatttctgcctcttctgaattgttcctagacattggagcttctggccccgttgtaagtggaaaatccttgtacttaaaggttgcaatgtagtggccccgttgtaacgcacgggcactcacctagtgtcaataagaagtacaagctcttgtctgctggtaaaagaaaaacatcttgactggacagtgacattaatataataaaaacggtgtttggctgctatggaaaaatgccagccgactttcttttaaaaaaaatatgctagccgatgtatttttgttggactctatggaaagatgtttttcttttaccagcagacaagagct

SEQ ID NO: 212695 - DNA, 2950 bp, Zea Mays
caagaagcagagcctccgcgctccacggaggtcgccttccgcatggacaacattcgcgacgagatgctacaactacactcatgacagcttcaatagcatatctgcattttttcctcgtcctcagaatcttctctctcgcaagatctatgggaggaatacattgatctgatcatgtagtgcatgtgcaatgatacctgtgaaatagaagtcgttttctggggggagctccatcgtcgggaagaggggtcatggctcaccacggacaaaaggttcgtgatttccatcaccacgctcccacagagatgctaataacgaagctgtcccaattagacggcacactgagcttgcacagtcaggattttgacagctgttgtcaacgaaggcgagaatggtgtactctaagctcagcaatttccagaaaaaatcgttaacttgcaagttagtttcaatatttctagcatattccaatcacagcatcgtccagcgcacacccatccaatttaggggcttcttgttgtgctctcaggccccagtaagaactccaatccctagatctcttttcgtgtgttaagttgtgcttaagaactgctgatgcagacattaggttagggcaaggattttggttaattggaataaggcagcgctttaaccttagttcctcagtttcagctttaacatgtgttgtctccatagtatatgctctgattaacatggcggagaggatttgtgaggtgaattacttgtaagatgttatctaagtggggggacagggaaagggaactgtggctccattgaggatgatagtgttatgaatttcttctcctactttagagctctgttctatattgttcttcggtaaatcggttgttgcattacttataaggtatgcctaatttactgttcttggttaggcaccatagatcctgtcattgtttgagtgcagtaaaccatgtaaattctctcttataagttgtccttttaattatactaataatcgattgtccaaatttgtttagacaccatattattttgtcattatttgagtacagaaagaagtaaactctcttacttataaatgtgctaataattctctatctaaatttaggcacttgaaatataccaactcgcatataagatataaattatattaacgatgccacgccaaatgtgtacttccctaggtcgaaaagcaaggtcctgtcatcacaaactcctagcaaatttagcgatatgtcatgagaacaagacaggacaacattacagcctcagaggtaataaccttcgttttctatttgcttcagccaacttgatttaccagcttatcttcttccactttctgcccatttcctattgattcagtccttctactcagctttggaggttgtctgtttacaaatacggaattgtccccaatactgtttttatgatgttaacaccatgaaccgagtagcagtttatgcccatgagaatgcttcaatgccccatttgggtcttgtgggcaaatgatcggatggtgcataacttcgatgtagcttatttgatcagcttataatggaacgatgggaagactttgatccaccacagcgcttgggatgttgagctgcaatttgaattgacaattatttgacaacaactaaaatacattttttcttgcttctgctcttgcagtctttgtaaattcaggtgtcagtgttggattcaaattacttttaaaaaaatagaggttagcattccactagaatatatggtcacatgtggctacttatttcctgcattcaaaatgtagtcacatgagtagtggtgaactgatgatgccatatgtggctacttatttcttgcattgaaaatgtggagctaaagtgtgtatgttttgttacacaaacgttggtgttgttgtgctccttttgctgaagcactgccttttacggttagcgacactcaatgttcgatcacttgtacaaaacaagatatgtattttcttttgagcaattcttttaaaatatatggggcaatgaagagcttcatattgtgttgaacctcagtctataatatttagttgcaagtgagagttttatacttacgacatgctacattttgttatccttatagttggttagcctattgtagaaggtggttgaacttgtactttgagaccaaatatatattgcatacttgatattatactattatttgagcttgtcttattgtactcttatctgttcttatgaaggttagaggaatgtgtttggggtgagtaatttttttgtgttgtttcctctatccatggccatggaggagcaaaggaggccacctagctcgaagatagcgccagtgtccatgaaggcgtcctctgcaaatgcgacgcttcaaggcatgaagaacagaagccattttcgaagggacaggaaaactgcgctgcaacaagacgtgtggacaagctgaggaagaagttgtggcacgagaagaacgtccactaagctctaaagcaggcgttctcgaggccgctctgcctcgcctccctattgtctcaagtcaatgtccttctttgcttttcgatcaatttcacaagcaagaagcaacctaaccaataatctattgcccttccgaaggactcgatacactttctgatttctgcctcttctgaattgttcctagacattggagcttctggccccgttgtaagtggaaaatccttgtacttaaaggttgcaatgtagtggccccgttgtaacgcacgggcactcacctagtgtcaataagaagtacaagctcttgtctgctggtaaaagaaaaacatcttgactggacagtgacattaatataataaaaacggtgtttggctgctatggaaaaatgccagccgactttcttttaaaaaaaatatgctagccgatgtatttttgttggactctatggaaagatgtttttcttttaccagcagacaagagct

SEQ ID NO: 212696 - DNA, 4353 bp, Zea Mays
atgccctcaccccgcaacgcgcgccctgcccccgcaacgcgcgcccgcgcaagccatcccgcaacgcccgcgcccccgcccgcgttcctcacccgcgcgcgtcgccctcaccgccgattattcctcgcctcgattgcatcccgcggcatccatctccacctcaccgcggcagatccccatttctcgcgccccctccctcgcgcctgcgacatccatgccaccctcgccctcccgctaatctcgccgcgatgaaggtggaatctccgcggacctcgccctcccgcgcagatccctcgcctcgattgcatcccagcgacatccatctccacctcatcgcgacatccatggcatgccgtgcgtggccccgtctacgtcccgcgcatctgcgagggtggcctccacgaatccccttcttccccccatacgaggatcacgctgacgccgacgccgggcgaagaaaggagtccacccgcccccgcgacgccgtgatgcctgtgcccctccgcgacgccgcgacaccgcgatgcccgtgcccctctccgcgacgccgcgatgcccgcacagcaagggcgtgcccccaccccgacgcccccccgcctcaccatgcccccagctcgccgtgtgatccatgcccccagcccagcttcccctactacctcaagcaagatctatgggaggaatacattgatctgatcatgtagtgcatgtgcaatgatacctgtgaaatagaagtcgttttctggggggagctccatcgtcgggaagaggggtcatggctcaccacggacaaaagcacttcttttgacccgaatacatgaagccatgaaagtaatggttgaggggagggggaagcaagtacctgatgatcttttgggtcaatacgggtagtttatgatcaagctggtgtgggaggctcaccacggacaaaagacggcacactgagcttgcacagtcaggtacatgatcccttgtcactgtaccagtttctgtgcttctctctcatgaaaacaactgttgggattatttgtttctgaagatcagtgcatttattagttctctcatgaaacacaacactatgatttaaatgctcacattttgattactgtgtaaacaatgggacatacaagatttttttaggtttttgtagctcattattatagtatgtgttattaatatgatgtagcaggcaacatagtatcctgcgattcctaattagttgatgcctaagggtttttgtagcttatgcaactaagaaaacttcttcaggctagaaaaaaactttgaagtgtgggacatggtgcttagaaagtgtggcaagcatcgaatttacattgatgtagtccatggtgtaggatttttagatggcaaacacatcataatttgtgtttacaattgtttattaggaggcacattgaccattgcttccttccaaaatttatatgttgcagtttacttccttaagaaactaactgaagcattatgaggagctgtagcaaatcgacaatccatctgctattgctaataatcatgctattttggcaatggcaaaatttatatgttgtagactacaacaaacaatgtctatgaagtcgttgacatctggattatattctattagtgctgatctggatcaattcttgtttattaggagacttcaaatgttttctctcccctataaaaacactttgtttcatttgcttataattaactgctgcactgtccatggattgctctctcattctacttcctatgattttaggattttgacagctgttgtcaacgaaggcgagaatggtgtactctaagctcagcaatttccagaaaaaatcgttaacttgcaagttagtttcaatatttctagcatattccaatcacagcatcgtccagcgcacacccatccaatttaggggcttcttgttgtgctctcaggccccagtaagaactccaatccctagatctcttttcgtgtgttaagttgtgcttaagaactgctgatgcagacattaggttagggcaaggattttggttaattggaataaggcagcgctttaaccttagttcctcagtttcagctttaacatgtgttgtctccatagtatatgctctgattaacatggcggagaggatttgtgaggtgaattacttgtaagatgttatctaagtggggggacagggaaagggaactgtggctccattgaggatgatagtgttatgaatttcttctcctactttagagctctgttctatattgttcttcggtaaatcggttgttgcattacttataaggtatgcctaatttactgttcttggttaggcaccatagatcctgtcattgtttgagtgcagtaaaccatgtaaattctctcttataagttgtccttttaattatactaataatcgattgtccaaatttgtttagacaccatattattttgtcattatttgagtacagaaagaagtaaactctcttacttataaatgtgctaataattctctatctaaatttaggcacttgaaatataccaactcgcatataagatataaattatattaacgatgccacgccaaatgtgtacttccctaggtcgaaaagcaaggtcctgtcatcacaaactcctagcaaatttagcgatatgtcatgagaacaagacaggacaacattacagcctcagaggtaataaccttcgttttctatttgcttcagccaacttgatttaccagcttatcttcttccactttctgcccatttcctattgattcagtccttctactcagctttggaggttgtctgtttacaaatacggaattgtccccaatactgtttttatgatgttaacaccatgaaccgagtagcagtttatgcccatgagaatgcttcaatgccccatttgggtcttgtgggcaaatgatcggatggtgcataacttcgatgtagcttatttgatcagcttataatggaacgatgggaagactttgatccaccacagcgcttgggatgttgagctgcaatttgaattgacaattatttgacaacaactaaaatacattttttcttgcttctgctcttgcagtctttgtaaattcaggtgtcagtgttggattcaaattacttttaaaaaaatagaggttagcattccactagaatatatggtcacatgtggctacttatttcctgcattcaaaatgtagtcacatgagtagtggtgaactgatgatgccatatgtggctacttatttcttgcattgaaaatgtggagctaaagtgtgtatgttttgttacacaaacgttggtgttgttgtgctccttttgctgaagcactgccttttacggttagcgacactcaatgttcgatcacttgtacaaaacaagatatgtattttcttttgagcaattcttttaaaatatatggggcaatgaagagcttcatattgtgttgaacctcagtctataatatttagttgcaagtgagagttttatacttacgacatgctacattttgttatccttatagttggttagcctattgtagaaggtggttgaacttgtactttgagaccaaatatatattgcatacttgatattatactattatttgagcttgtcttattgtactcttatctgttcttatgaaggttagaggaatgtgtttggggtgagtaatttttttgtgttgtttcctctatccatggccatggaggagcaaaggaggccacctagctcgaagatagcgccagtgtccatgaaggcgtcctctgcaaatgcgacgcttcaaggcatgaagaacagaagccattttcgaagggacaggaaaactgcgctgcaacaagacgtgtggacaagctgaggaagaagttgtggcacgagaagaacgtccactaagctctaaagcaggcgttctcgaggccgctctgcctcgcctccctattgtctcaagtcaatgtccttctttgcttttcgatcaatttcacaagcaagaagcaacctaaccaataatctattgcccttccgaaggactcgatacactttctgatttctgcctcttctgaattgttcctagacattggagcttctggccccgttgtaagtggaaaatccttgtacttaaaggttgcaatgtagtggccccgttgtaacgcacgggcactcacctagtgtcaataagaagtacaagctcttgtctgctggtaaaagaaaaacatcttgactggacagtgacattaatataataaaaacggtgtttggctgctatggaaaaatgccagccgactttcttttaaaaaaaatatgctagccgatgtatttttgttggactctatggaaagatgtttttcttttaccagcagacaagagct

SEQ ID NO: 212697 - DNA, 2150 bp, Zea Mays
caccattctcgccttcgttgacaacagctgtcaaaatcctaaaatcataggaagtagaatgagagagcaatccatggacagtgcagcagttaattataagcaaatgaaacaaagtgtttttataggggagagaaaacatttgaagtctcctaataaacaagaattgatccagatcagcactaatagaatataatccagatgtcaacgacttcatagacattgtttgttgtagtctacaacatataaattttgccattgccaaaatagcatgattattagcaatagcagatggattgtcgatttgctacagctcctcataatgcttcagttagtttcttaaggaagtaaactgcaacatataaattttggaaggaagcaatggtcaatgtgcctcctaataaacaattgtaaacacaaattatgatgtgtttgccatctaaaaatcctacaccatggactacatcaatgtaaattcgatgcttgccacactttctaagcaccatgtcccacacttcaaagtttttttctagcctgaagaagttttcttagttgcataagctacaaaaacccttaggcatcaactaattaggaatcgcaggatactatgttgcctgctacatcatattaataacacatactataataatgagctacaaaaacctaaaaaaatcttgtatgtcccattgtttacacagtaatcaaaatgtgagcatttaaatcatagtgttgtgtttcatgagagaactaataaatgcactgatcttcagaaacaaataatcccaacagttgttttcatgagagagaagcacagaaactggtacagtgacaagggatcatgtacctgactgtgcaagctcagtgtgccgtctaattgggacagcttcgttattagcatctcttacaatccaaggaaacagcaagcaatatttatttaagtataaaaatcttgctcatgtacataaccagtgggatttagaaagtgatataatcgaatggaaaattcaagaaaataattgtaacctgtgggagcgtggtgatggaaatcacgaaccttttgtccgtggtgagcctcccacaccagcttgatcataaactacctatatatgacatccaaaattaatagttctaattttcttttcaatcttcttccttaggtttgcacatgatgcatgcagcctagattagcatgattggtcatttggagcactccactgtatattaagttgatatttataacacaatttgatctgaaccaggacttggtcaaattcagttaaaatttggagacttcaaaagttcattaggtagctttgagaaagttttggaggtgcaccctgaaaattgtgaaagtttgaaggtaagacatatatctaatcaaacgcttattctcagttcatgtatttgcaacatagcgttgtatttgtgaaatgatttttatgtttcttctaggctattggtcacatacatgcaaaatctggggaaactgaaaaagctatagaaaccttcaaggaagttacccgtattgacccaaaagatcatcaggcatttgtggagcttggtgaattgttggtagaatctgactgggctgctgctatggaatacttgaagacagtaagcttttcagtcagttctgtataaatttctatgattccccccatttttctatcgaaggacgctcgtgattcagcataactaatcatgaaaagttagctttgagcgttgtgttgccctccaaaactgtttgacttaaggcataaatccaaaactgtacctgactgtgcaagctcagtgtgccgtctaattgggacagcttcgttattagcatctcttacaatccaaggaaacagcaagcaatatttatttaagtataaaaatcttgctcatgtacataaccagtgggatttagaaagtgatatagtcgaatggaaaattcaagaaaataattgtaacctgtgggagcgtggtgatggaaatcacgaaccttttgtccgtggtgagccatgacccctcttcccgacgatggagctccccccagaaaacgacttctatttcacaggtatcattgcacatgcactacatgatcagatcaatgtattcctcccatagatcttgctggagacagaaagaaagaacaatggttaagagaggac

SEQ ID NO: 212698 - DNA, 2857 bp, Zea Mays
cgagacccttttgcgttgctctctctcccgcagcagtatataggatgggcgccaacgtctagccattgctgcatctgtttgggagaagcaaagcagggtccctccgtatttcccatggtttttgtgacttgtgagagagaacaaggccaaacactgaaacacatctctgaagtctgagccctgacccagcagcgccaagatccgggaccgggagagggacctgctccctggggggtgccctttttgaggtttgtgtgttctttgcctccctcccctttaattttcttttaatttcccatgtcatgcattgttgcctgagaagtgatggcgtctcccgctgccgtgccctgcccccctttgctatcctgctccttgcaggcgttccatttggaagtgttcatctttccattttagaggacgtccatggggggtcatggggagctcaatcttcgagttttgatatattttttttcttgacgtctgccttggttcttgtgttcgtcttatattttatcgcttctgcttgctgtctcctctcaatccgtcaatctttgtcctactacttgtttacttccatcgaggtccttggctccttgcccattacttgtctgtttatctccatcaccgataattacttcgccagtcattgcacttacacacagtgggtttatctgttcatgcactttcgtatgcttgaattcagtttggctctatgtgccttccaataatgacagtagtagttatcaaaccctcctttttttccttcccaatgaatcatttcgcaatcaccatggggatctttttagcgtgctgaaatcactacaaactttacaagattcccctacaatggcgagcgatccgtcgacgttctcgccaatcggggtggacgccatgggcggcggctacttcatggccggcagcagcagctacggaggcggcggcattatgagcgccgaggtgccgcacttccaccaccccggcgtgcttcttgaccagggcggcttcgggttcggcggcctcggcaacgcggcggtcgtcggcggcgccgcgacggcggcggatctgggcgcgcactacgcggcgaacaacatcgtgctggcctccttcgccagccagctcctcgctaacgcccccgcgccgccgcgggatgatcgtgccggcgggaggacgccgccggacgagatggacgaagagctgtacggcgtcgccggctgcgacagccgcgtcgcggcgagcttgcggtgccccagccaatccggggccatggcggtctggtcgtcgccatcgtcgtccaagaagccgtacggcatctggaccagcgccggcggaccagctcatgaaccataccacctcgccgcggccgggctctccgacgcgggaggcctccgctacccgctcgccgcctgcagtggcggcaacgcgtccgcggcggcggcgagcgagctgtcgctgactctgtgctccaactccatcgcttcctcggacagcgcgctgaacgcgacggagcagtgctcctcgggagcgagccggtccgccctgaccgagctgccgcgggcgcggtcccggatggcgctgcacttcgccgcggtggtggcgcgctcgcggtacgcggccgtggtccaggatttgctcaacgacgtcgtcggccacatgctggacggcgtcgccgacgtgaccgacgactcgtgcagcggcatcggctcggttggcgcgccgtccgcggtgagctccaacaggttcatggcctcgaccgaagacgccggcgcgcgctggggccaggcccagagggtccggagcaacctcctcaagacgcttcagctgatggacgagaagtacaaccagtgcttggacgagatccagagcacgacggccaggttcaacaccctgatgcactcgcccccgggcggcggcggcggcggcggcggcatctgcgcgccgttcgcgcaccgcgccgtgtcgacgatgtaccgtgggctgaggcggcggctcgccggcgagatcatggctgcggcgagcagggccagctgctggggcgagtcgtcgtcgtcggtgacggtggccgcgggcggcgacgtggagcggagctgggagtcggccttcatacagaagcactggtcggcgcagcagctgcggcgcaccgagcagcagtgctggcggccccagcgcggcctgccggagaagtccgtcgccgtgctcaaggcgtggatgttcgagaacttcctgcacccgtatcccaaggaccatgagaaggacgtgctggcggcaaggagcggcctcaccaggaaccaggtgtcgaattggttcataaacgcgcgggttcgtctatggaagccgatgatcgaggagatgtaccaggacctcaagaggagctcgggtgcaggaggaggagggcacggcccggcgatggagccacagcagcacttgagcaagcgtcgaatttgcgagctggaagatggtggccagtgaaccatccagctccatagctgcctgccgtggatttaccattggcccttgtagtttccctgtgctatgtttatgtacatatcattgccaacgccagcatttaacatctgcgcatcttttatcctgggttgactgggaagggccaagagcagcggcggcggatactgctggatcagggttctggatgctctattcgtccgctcagcattccgatggttgcccgtttcagatatagcggatttcatgctttgtttcttgtcatgtcagcttgcattgcagtagtcaatttcagcaaaacaatttttttttggagatttgattctttctaggatcatgagcggatttcattgcagtagtcagttataaaatggttcatcctgaggtccaaaaagca

SEQ ID NO: 212699 - DNA, 1193 bp, Zea Mays
atggccgcgcccgccgccgcctctgctccccggcggcaatggcggtacacgtgggaagccctaacgcacctccccctcctccgcctatacctcttcccccgccccgcattctcctcctccttcccctccgacctccgcgccgacctccgactccagggctccctcctccacctctccttctcgctccccggggatggggccaccatcgcgctcagggtccccgtcccgagggtgctcatagacccttccgcccccttcgagtgccgcgccgccgccgcgggggaccacctcgagctcctcctggcgctcgtcctgcccgtcgaccaccccgtcgtcgccgccgcgtttcccccgcccgccggtgcggagcttccggctcctctagctctgcgcgatgatttgaagggcttatctactggagacgttcacttgtattgcagaaattgttcgtcaaggttgacaaaacagccactaagtggtttgcactttgcaccactagaaatgagttcgcttgttccggctgatggccgtgtacgactcttcaaatgctacacatctacagaaattcctgtaacagggtctcatgatgtgtttagggggcatacattggaaagagtttttgtgaatctgctgctcgaagtcgcagaagatgaaatatcttttcggacagtagtcagagatttgaaaaccaaaaggccaatgctgcaattagttcttcttagctcaaaagcatggttatcttctggttggtgctatgaaaatgataccaatggttcacatggaacaacagatctgcagcctagtgttaaactcttgtattctgattataggaatgcttcagaagcagacttaaggacagtagaagagtgggcatccaaataccgggctgaagagctgtacatgatgaggcggcaaatagacgaactcactgaatgcctgggctcggcaatggacaactttccagtttcttgttcttcccttgaaggcttgctgctctcttctcttaggcgctgacttgagtatacggtaggattaaaattctgcgtgaactgatcacatttttgtacccaaaggagtctacagctgatcggcatgcctggtcatcctcggtttcttttggactttgagctaggccgtaatcatctctaacatctgtaatggatcaattgctgctgctaattgtaaacttccag

SEQ ID NO: 212700 - DNA, 1207 bp, Zea Mays
gtatgcctgggggagttcagcactgggcgaggttcctggaccacgcggccatcgtcgtcgtcgacggcggcggcgagtcgtcaccggcggcgagcaagtgggcgctgtgcacgcggacggacgtggaggaggtgaagcaggtggtgcggatgctgcccatctgggccaccaccatcatgttctggaccatccacgcgcagatgaccaccttctcggtggcgcaggccgaggtcatggaccgggccctcggcggcggctcgggcttcctcatccccgcgggctccctcaccgtcttcctcatcggctccatcctgctcaccgtgcccgtctacgaccgcctcctggcgcccctcgcccgccgcctcacgggcaacccgcacggcctcaccccgctgcagcgcgtcttcgtcggcctcctcctctccgtcgccggcatggccgtggccgcgctcgtcgagcgccaccgccaggtggcctccggccacggggccacgctcacggtgttcctgctcatgccgcagttcgtgctcgtcggcgcgggcgaggcattcacgtacatgggccagctcgccttcttcctgcgcgagtgccccaagggcatgaagaccatgagcacgggcctgttcctcagcacctgcgcgctcgggttcttcttcagcaccctgctcgtcaccatcgtgcacaaggtcacggcccacgccggccgtgacggttggctcgccgacaacctcgacgacgggaggctcgactacttctactggctgctcgccgtcatcagcgccatcaacctcgtcctcttcacgttcgccgccaggggctacgtctataaggagaagcgcctggccgacgccggcatcgagctcgcagacgaggagtctattgccgtcggccactgatgctgctgccagtgccacaaccctgcatgcatgcgtctttccttctctttttttttttatatatgttttgaacttttgatgacttgttttggcctgaaatcggtggggccgccaaggggggccatgcgtgatgtattttggcacacggtgtgaccccgtcgtacagacgcaggtcgagctaattaacgtgtacctaaggggtgaaacaaatgtagatacaaatatacggcctaataagtacgtacctaatagtggtatacgtacgttgtattctgcttcttgaaatgaatgacagctagcgttgctgcgct

SEQ ID NO: 212701 - DNA, 3680 bp, Zea Mays
cccctcccaacggcgcccttcctccccgcacgctacgacggccgagacgaacgcgcggcttcctccccaccaacggcgccctttccaaaagcctcgacccgctgctctcgccgagatcccgcgcgtagcacgcgcggcttccttcccaggctggcgagatgcctccttctacgctcgcgcatgcactatgcccctgtcgttgtccacctcccacgcccacgcatgcacccatcccctcgtcacgcaaaccatagtctcctccgcccccgtgctcgccaccgcgtcgacttcggtggagtccagcgatagggcgaggtcgtaccccgacgactcccccccccccgacgtgtcgtcctagcccgcacgctccgcctctggcaccgttgcacaccacgccatcctcacccttcaactcctaaactgtccagtgggagacgatgccgccctcggttcgcgatgccgcccactcccacacgtcgtcgcgcgaagccggcgctcacttcgggccagatctacctgcccgtgtggtgttgtgcgtacgaccacctcgtgaagatgctgcaacaggcgtacgcgcaggtcgaggagctctccgtcgagcgcgagcacctcgtcaatgagctctagcttctacagagccgcttccacaagcgcaagatctgccaggcctgcctccagaaggacgaggagatcaggaagagagtcgtaaaggctgagacggcgatgcgtcttggcggcaaggagcttcagattcactgctgcgaggctgttccttagccccagcttcaattgttcctcatttagtttattgaaatctgaattatttggagctaatttgtacagtttatacatagagcacccttgaaagccacattcacatgaaagcagtatacacagagcacttcaattgaaagctgctgcattgtacagggaatatggaattctggattcctatatatcgtaactcctttgctgttgcatatgcattccagtttcagtttggagttacaaaacgaattcaattacaggtgtgcttgttcagttatatagggggggaaactgtttgtgccagaagtaatatactgaattttgtagctgcattgttcaccttatatcgttttgctatggtcaaatctcttctcaccattgggcttgtgaatttcatgttccgggtgatgtgtcatgcctagcagctgattatattctcagcgtgcatgtcatctcactttgcctgtgcagcaagtgtactgagtctgattgatgcatctttagttagctgtaaacttacagaggcaatatgggagcggtgatttcactgtttcgcccgaatccatataaaagtgagtcggaccgggccaaaaaacgtgctttgggctgggcttcaggctttctgtatactgatggtgcatcgactgcagaaggatgaagcggagctatgcatgctggttctgaatttatcaatagacgtatatgtttttttgtggggcttcattgtatccataatttcatatctaagcatttatagttagcgggccttctgctaatctttgctacattaagcatttacctaatatcgttggccatactgcctaattattcagtaaaagtgtgcctgtacattatgtcttcaatttgctgctccatacatctacgtcgacgcttatattcagcctgattggaattgttggctgatgcaacgttgctgatgctgttgtagctagactgcatgtaagtactatgctttgtagtacagaatgagcccgatctggtgagtttttttgtttcaactaaataggagctacttaatcaagtaaatggggatttcagattgttgtggtgttcctagaaattataatagatttcctattttatgttataaaatatggtatttcaaagaaaaccttttcaaaccaggaagtataaggaaaggctttgttttggaattgaaatcgcaaggacatattttcaccccaacatgcatagttttttatgttcacatgagaggtagaaactataatattataaaaataataactgaggtcttggaaagctaactttggcatattgctaggttgtaaattcttagatgctggagtcttcttgattcttttaataatttgcccgtgtttattgcagatggatggatttgatcaaacagtgaatgtgaaggttgtaatggcaactaatagggcacatactctagattctactttgttgcggccaggtagacttgacaggaaagttgagttctctcttcctgattggcggtagaagaggcctgtgttccaagtatgtactactaagatgaatttgagtgacgaggctgatttggaagattatgtttgcagactggataagatcagtgatgctgatgttgagttggtttcatggcacagaccaaaaattttatgcatttgttgttttctaacaattgtattgctagggacttttgtcctgcgctggccaaagctgtcaaaactatgaaaaaggcagagaagctgctccttatatatagtaaagccattaccaacagttggagaggaaggtgttctgatgagcatcatcttgttctgcatcatcactaatcaacttgttatgcacagtgtccgatgtgcctgtctcaactcgattgctaaggcatataattgacctaaaaaggcacttcaagcgggtaggaaaattcaaggtcgttctcaagtacttccaagtcggtacggtcgttgagcctgcatctgagttctactcaagtaggctgaaaaatagggaacgcaaggcaacattggttgacgagctgttatcagatcaatctctgaagagctacaggtatgctcatcatacttttgccattttgcatgtgcatcaatggacagtggcttgtttttcagtgcaagattttctataaaaattgcatatggtcttttgcaagatttcctggtgccttgtttcagagtccaaccatcataataattacacggttgtggtgtgtatatctaaatgggtttcactggttacaactaaggtgcatggttttaaagtcggctgactaatcgcgattagtcgcgattagtcggccttatcgcctggcatagcacgatcagcatggacgactcgatcagggcgactaggttacgactaatcgtcctggtcgccgactaatcacgattagtcggccgactaggtgccatgtccgactagcttgtgccaggtttgggcctgtaaaaaaatgtgtcctctgttatatgggctggcggcccactatctcctgtccacagtagaaagaagctctactgccactgtgccgcacagtacaagcacagtagaaagttagaaaccctaaaaccctaagccgccgcctctgcctcctctgccccggtggtcctcagctccggtggtcctcagctccggcgactgtctgctctctgctcccgtgctccgttgcgctcgcctctgctcagctccggcgctcgcctctgctcactgctcagctccagcaaccgtctgcagccagtctgttctgaactctgttcagagttcagtgctcacttcagttgttaatctcactatctgcaccctctgttctgaacttaaccgaaatgagcacctctacagatggtaatctccaaggtaagtgatctttaccttttacttttagtggaaacatcctttattttgattgcttg

SEQ ID NO: 212702 - DNA, 3572 bp, Zea Mays
cccctcccaacggcgcccttcctccccgcacgctacgacggccgagacgaacgcgcggcttcctccccaccaacggcgccctttccaaaagcctcgacccgctgctctcgccgagatcccgcgcgtagcacgcgcggcttccttcccaggctggcgagatgcctccttctacgctcgcgcatgcactatgcccctgtcgttgtccacctcccacgcccacgcatgcacccatcccctcgtcacgcaaaccatagtctcctccgcccccgtgctcgccaccgcgtcgacttcggtggagtccagcgatagggcgagtgggagacgatgccgccctcggttcgcgatgccgcccactcccacacgtcgtcgcgcgaagccggcgctcacttcgggccagatctacctgcccgtgtggtgttgtgcgtacgaccacctcgtgaagatgctgcaacaggcgtacgcgcaggtcgaggagctctccgtcgagcgcgagcacctcgtcaatgagctctagcttctacagagccgcttccacaagcgcaagatctgccaggcctgcctccagaaggacgaggagatcaggaagagagtcgtaaaggctgagacggcgatgcgtcttggcggcaaggagcttcagattcactgctgcgaggctgttccttagccccagcttcaattgttcctcatttagtttattgaaatctgaattatttggagctaatttgtacagtttatacatagagcacccttgaaagccacattcacatgaaagcagtatacacagagcacttcaattgaaagctgctgcattgtacagggaatatggaattctggattcctatatatcgtaactcctttgctgttgcatatgcattccagtttcagtttggagttacaaaacgaattcaattacaggtgtgcttgttcagttatatagggggggaaactgtttgtgccagaagtaatatactgaattttgtagctgcattgttcaccttatatcgttttgctatggtcaaatctcttctcaccattgggcttgtgaatttcatgttccgggtgatgtgtcatgcctagcagctgattatattctcagcgtgcatgtcatctcactttgcctgtgcagcaagtgtactgagtctgattgatgcatctttagttagctgtaaacttacagaggcaatatgggagcggtgatttcactgtttcgcccgaatccatataaaagtgagtcggaccgggccaaaaaacgtgctttgggctgggcttcaggctttctgtatactgatggtgcatcgactgcagaaggatgaagcggagctatgcatgctggttctgaatttatcaatagacgtatatgtttttttgtggggcttcattgtatccataatttcatatctaagcatttatagttagcgggccttctgctaatctttgctacattaagcatttacctaatatcgttggccatactgcctaattattcagtaaaagtgtgcctgtacattatgtcttcaatttgctgctccatacatctacgtcgacgcttatattcagcctgattggaattgttggctgatgcaacgttgctgatgctgttgtagctagactgcatgtaagtactatgctttgtagtacagaatgagcccgatctggtgagtttttttgtttcaactaaataggagctacttaatcaagtaaatggggatttcagattgttgtggtgttcctagaaattataatagatttcctattttatgttataaaatatggtatttcaaagaaaaccttttcaaaccaggaagtataaggaaaggctttgttttggaattgaaatcgcaaggacatattttcaccccaacatgcatagttttttatgttcacatgagaggtagaaactataatattataaaaataataactgaggtcttggaaagctaactttggcatattgctaggttgtaaattcttagatgctggagtcttcttgattcttttaataatttgcccgtgtttattgcagatggatggatttgatcaaacagtgaatgtgaaggttgtaatggcaactaatagggcacatactctagattctactttgttgcggccaggtagacttgacaggaaagttgagttctctcttcctgattggcggtagaagaggcctgtgttccaagtatgtactactaagatgaatttgagtgacgaggctgatttggaagattatgtttgcagactggataagatcagtgatgctgatgttgagttggtttcatggcacagaccaaaaattttatgcatttgttgttttctaacaattgtattgctagggacttttgtcctgcgctggccaaagctgtcaaaactatgaaaaaggcagagaagctgctccttatatatagtaaagccattggtagaccaacagttggagaggaaggtgttctgatgagcatcatcttgttctgcatcatcactaatcaacttgttatgcacagtgtccgatgtgcctgtctcaactcgattgctaaggcatataattgacctaaaaaggcacttcaagcgggtaggaaaattcaaggtcgttctcaagtacttccaagtcggtacggtcgttgagcctgcatctgagttctactcaagtaggctgaaaaatagggaacgcaaggcaacattggttgacgagctgttatcagatcaatctctgaagagctacaggtatgctcatcatacttttgccattttgcatgtgcatcaatggacagtggcttgtttttcagtgcaagattttctataaaaattgcatatggtcttttgcaagatttcctggtgccttgtttcagagtccaaccatcataataattacacggttgtggtgtgtatatctaaatgggtttcactggttacaactaaggtgcatggttttaaagtcggctgactaatcgcgattagtcgcgattagtcggccttatcgcctggcatagcacgatcagcatggacgactcgatcagggcgactaggttacgactaatcgtcctggtcgccgactaatcacgattagtcggccgactaggtgccatgtccgactagcttgtgccaggtttgggcctgtaaaaaaatgtgtcctctgttatatgggctggcggcccactatctcctgtccacagtagaaagaagctctactgccactgtgccgcacagtacaagcacagtagaaagttagaaaccctaaaaccctaagccgccgcctctgcctcctctgccccggtggtcctcagctccggtggtcctcagctccggcgactgtctgctctctgctcccgtgctccgttgcgctcgcctctgctcagctccggcgctcgcctctgctcactgctcagctccagcaaccgtctgcagccagtctgttctgaactctgttcagagttcagtgctcacttcagttgttaatctcactatctgcaccctctgttctgaacttaaccgaaatgagcacctctacagatggtaatctccaaggtaagtgatctttaccttttacttttagtggaaacatcctttattttgattgcttg

SEQ ID NO: 212703 - DNA, 3450 bp, Zea Mays
cccctcccaacggcgcccttcctccccgcacgctacgacggccgagacgaacgcgcggcttcctccccaccaacggcgccctttccaaaagcctcgacccgctgctctcgccgagatcccgcgcgtagcacgcgcggcttccttcccaggctggcgagatgcctccttctacgctcgcgcatgcactatgcccctgtcgttgtccacctcccacgcccacgcatgcacccatcccctcgtcacgcaaaccatagtctcctccgcccccgtgctcgccaccgcgtcgacttcggtggagtccagcgatagggcgaggtcgtaccccgacgactcccccccccccgacgtgtcgtcctagcccgcacgctccgcctctggcaccgttgcacaccacgccatcctcacccttcaactcctaaactgtccagtgggagacgatgccgccctcggttcgcgatgccgcccactcccacacgtcgtcgcgcgaagccggcgctcacttcgggccagatctacctgcccgtgtggtgttgtgcgtacgaccacctcgtgaagatgctgcaacaggcgtacgcgcaggtcgaggagctctccgtcgagcgcgagcacctcgtcaatgagctctagcttctacagagccgcttccacaagcgcaagatctgccaggcctgcctccagaaggacgaggagatcaggaagagagtcgtaaaggctgagacggcgatgcgtcttggcggcaaggagcttcagattcactgctgcgaggctgttccttagccccagcttcaattgttcctcatttagtttattgaaatctgaattatttggagctaatttgtacagtttatacatagagcacccttgaaagccacattcacatgaaagcagtatacacagagcacttcaattgaaagctgctgcattgtacagggaatatggaattctggattcctatatatcgtaactcctttgctgttgcatatgcattccagtttcagtttggagttacaaaacgaattcaattacaggtgtgcttgttcagttatatagggggggaaactgtttgtgccagaagtaatatactgaattttgtagctgcattgttcaccttatatcgttttgctatggtcaaatctcttctcaccattgggcttgtgaatttcatgttccgggtgatgtgtcatgcctagcagctgattatattctcagcgtgcatgtcatctcactttgcctgtgcagcaagtgtactgagtctgattgatgcatctttagttagctgtaaacttacagaggcaatatgggagcggtgatttcactgtttcgcccgaatccatataaaagtgagtcggaccgggccaaaaaacgtgctttgggctgggcttcaggctttctgtatactgatggtgcatcgactgcagaaggatgaagcggagctatgcatgctggttctgaatttatcaatagacgtatatgtttttttgtggggcttcattgtatccataatttcatatctaagcatttatagttagcgggccttctgctaatctttgctacattaagcatttacctaatatcgttggccatactgcctaattattcagtaaaagtgtgcctgtacattatgtcttcaatttgctgctccatacatctacgtcgacgcttatattcagcctgattggaattgttggctgatgcaacgttgctgatgctgttgtagctagactgcatgtaagtactatgctttgtagtacagaatgagcccgatctggtgagtttttttgtttcaactaaataggagctacttaatcaagtaaatggggatttcagattgttgtggtgttcctagaaattataatagatttcctattttatgttataaaatatggtatttcaaagaaaaccttttcaaaccaggaagtataaggaaaggctttgttttggaattgaaatcgcaaggacatattttcaccccaacatgcatagttttttatgttcacatgagaggtagaaactataatattataaaaataataactgaggtcttggaaagctaactttggcatattgctaggttgtaaattcttagatgctggagtcttcttgattcttttaataatttgcccgtgtttattgcagatggatggatttgatcaaacagtgaatgtgaaggttgtaatggcaactaatagggcacatactctagattctactttgttgcggccaggtagacttgacaggaaagttgagttctctcttcctgattggcggtagaagaggcctgtgttccaagtatgtactactaagatgaatttgagtgacgaggctgatttggaagattatgtttgcagactggataagatcagtgatgctgatgttgagttggtttcatggcacagaccaaaaattttatgcatttgttgttttctaacaattgtattgctagggacttttgtcctgcgctggccaaagctgtcaaaactatgaaaaaggcagagaagctgctccttatatatagtaaagccattgtgagattctatttcaaaattcgattattcttctataactttcatgtctaatttctctgaattatgacacttcgttaaacttcctcgcttcaaatgcaaatggatctggtgagaagggtagaccaacagttggagaggaaggtgttctgatgagcatcatcttgttctgcatcatcactaatcaacttgttatgcacagtgtccgatgtgcctgtctcaactcgattggtattatgttgtgtgtttagtgattctggtttatcctttgggatgcttatgtgataatatgtttgtaatgtgtttttccagctaaggcatataattgacctaaaaaggcacttcaagcgggtaggaaaattcaaggtcgttctcaagtacttccaagtcggtacggtcgttgagcctgcatctgagttctactcaagtaggctgaaaaatagggaacgcaaggcaacattggttgacgagctgttatcagatcaatctctgaagagctacagcaggcagctacgtgcccacgtttggcgaggcgccatttccggccaccggccacgtcgccgcgcgcaggagagaagctaggcactacatgatgtcagccgaccaagatttttaaaaaaagatacgaaagcttgctacaaaataaaccggtccagtcacaagctagctagctagccagattaagtcgatgccgcactgcttgtatatgcattggattccatattgttctcttcagatggacatcaaatgttctgttcattaattaaggttaatcagtggcatcctatgtggaatcgtccctgcttacatgcatatatagtgcgtgcgtgcattatatgtatccattccacatgcatgcatctgtttcaccatctttaatttggatgcttatgcatgcatgcttctttactttgattattgttttttg

SEQ ID NO: 212704 - DNA, 2574 bp, Zea Mays
cccctcccaacggcgcccttcctccccgcacgctacgacggccgagacgaacgcgcggcttcctccccaccaacggcgccctttccaaaagcctcgacccgctgctctcgccgagatcccgcgcgtagcacgcgcggcttccttcccaggctggcgagatgcctccttctacgctcgcgcatgcactatgcccctgtcgttgtccacctcccacgcccacgcatgcacccatcccctcgtcacgcaaaccatagtctcctccgcccccgtgctcgccaccgcgtcgacttcggtggagtccagcgatagggcgagtgggagacgatgccgccctcggttcgcgatgccgcccactcccacacgtcgtcgcgcgaagccggcgctcacttcgggccagatctacctgcccgtgtggtgttgtgcgtacgaccacctcgtgaagatgctgcaacaggcgtacgcgcaggtcgaggagctctccgtcgagcgcgagcacctcgtcaatgagctctagcttctacagagccgcttccacaagcgcaagatctgccaggcctgcctccagaagatggatggatttgatcaaacagtgaatgtgaaggttgtaatggcaactaatagggcacatactctagattctactttgttgcggccaggtagacttgacaggaaagttgagttctctcttcctgattggcggtagaagaggcctgtgttccaagtatgtactactaagatgaatttgagtgacgaggctgatttggaagattatgtttgcagactggataagatcagtgatgctgatgttgagttggtttcatggcacagaccaaaaattttatgcatttgttgttttctaacaattgtattgctagggacttttgtcctgcgctggccaaagctgtcaaaactatgaaaaaggcagagaagctgctccttatatatagtaaagccattggtagaccaacagttggagaggaaggtgttctgatgagcatcatcttgttctgcatcatcactaatcaacttgttatgcacagtgtccgatgtgcctgtctcaactcgattgctaaggcatataattgacctaaaaaggcacttcaagcgggtaggaaaattcaaggtcgttctcaagtacttccaagtcggtacggtcgttgagcctgcatctgagttctactcaagtaggctgaaaaatagggaacgcaaggcaacattggttgacgagctgttatcagatcaatctctgaagagctacaggtatgctcatcatacttttgccattttgcatgtgcatcaatggacagtggcttgtttttcagtgcaagattttctataaaaattgcatatggtcttttgcaagatttcctggtgccttgtttcagagtccaaccatcataataattacacggttgtggtgtgtatatctaaatgggtttcactggttacaactaaggtgcatggttttaaagtcggctgactaatcgcgattagtcgcgattagtcggccttatcgcctggcatagcacgatcagcatggacgactcgatcagggcgactaggttacgactaatcgtcctggtcgccgactaatcacgattagtcggccgactaggtgccatgtccgactagcttgtgccaggtttgggcctgtaaaaaaatgtgtcctctgttatatgggctggcggcccactatctcctgtccacagtagaaagaagctctactgccactgtgccgcacagtacaagcacagtagaaagttagaaaccctaaaaccctaagccgccgcctctgcctcctctgccccggtggtcctcagctccggtggtcctcagctccggcgactgtctgctctctgctcccgtgctccgttgcgctcgcctctgctcagctccggcgctcgcctctgctcactgctcagctccagcaaccgtctgcagccagtctgttctgaactctgttcagagttcagtgctcacttcagttgttaatctcactatctgcaccctctgttctgaacttaaccgaaatgagcacctctacagatggtaatctccaagagtcattcatgttggtgggcgtcttggatgaactacattttcttcaacaaagatggagctcatgcagattgatttagtccctttttgcaatgcagctacgtgcccacgtttggcgaggcgccatttccggccaccggccacgtcgccgcgcgcaggagagaagctaggcactacatgatgtcagccgaccaagatttttaaaaaaagatacgaaagcttgctacaaaataaaccggtccagtcacaagctagctagctagccagattaagtcgatgccgcactgcttgtatatgcattggattccatattgttctcttcagatggacatcaaatgttctgttcattaattaaggttaatcagtggcatcctatgtggaatcgtccctgcttacatgcatatatagtgcgtgcgtgcattatatgtatccattccacatgcatgcatctgtttcaccatctttaatttggatgcttatgcatgcatgcttctttactttgattattgttttttg

SEQ ID NO: 212705 - DNA, 3358 bp, Zea Mays
cccctcccaacggcgcccttcctccccgcacgctacgacggccgagacgaacgcgcggcttcctccccaccaacggcgccctttccaaaagcctcgacccgctgctctcgccgagatcccgcgcgtagcacgcgcggcttccttcccaggctggcgagatgcctccttctacgctcgcgcatgcactatgcccctgtcgttgtccacctcccacgcccacgcatgcacccatcccctcgtcacgcaaaccatagtctcctccgcccccgtgctcgccaccgcgtcgacttcggtggagtccagcgatagggcgaggtcgtaccccgacgactcccccccccccgacgtgtcgtcctagcccgcacgctccgcctctggcaccgttgcacaccacgccatcctcacccttcaactcctaaactgtccagtgggagacgatgccgccctcggttcgcgatgccgcccactcccacacgtcgtcgcgcgaagccggcgctcacttcgggccagatctacctgcccgtgtggtgttgtgcgtacgaccacctcgtgaagatgctgcaacaggcgtacgcgcaggtcgaggagctctccgtcgagcgcgagcacctcgtcaatgagctctagcttctacagagccgcttccacaagcgcaagatctgccaggcctgcctccagaaggacgaggagatcaggaagagagtcgtaaaggctgagacggcgatgcgtcttggcggcaaggagcttcagattcactgctgcgaggctgttccttagccccagcttcaattgttcctcatttagtttattgaaatctgaattatttggagctaatttgtacagtttatacatagagcacccttgaaagccacattcacatgaaagcagtatacacagagcacttcaattgaaagctgctgcattgtacagggaatatggaattctggattcctatatatcgtaactcctttgctgttgcatatgcattccagtttcagtttggagttacaaaacgaattcaattacaggtgtgcttgttcagttatatagggggggaaactgtttgtgccagaagtaatatactgaattttgtagctgcattgttcaccttatatcgttttgctatggtcaaatctcttctcaccattgggcttgtgaatttcatgttccgggtgatgtgtcatgcctagcagctgattatattctcagcgtgcatgtcatctcactttgcctgtgcagcaagtgtactgagtctgattgatgcatctttagttagctgtaaacttacagaggcaatatgggagcggtgatttcactgtttcgcccgaatccatataaaagtgagtcggaccgggccaaaaaacgtgctttgggctgggcttcaggctttctgtatactgatggtgcatcgactgcagaaggatgaagcggagctatgcatgctggttctgaatttatcaatagacgtatatgtttttttgtggggcttcattgtatccataatttcatatctaagcatttatagttagcgggccttctgctaatctttgctacattaagcatttacctaatatcgttggccatactgcctaattattcagtaaaagtgtgcctgtacattatgtcttcaatttgctgctccatacatctacgtcgacgcttatattcagcctgattggaattgttggctgatgcaacgttgctgatgctgttgtagctagactgcatgtaagtactatgctttgtagtacagaatgagcccgatctggtgagtttttttgtttcaactaaataggagctacttaatcaagtaaatggggatttcagattgttgtggtgttcctagaaattataatagatttcctattttatgttataaaatatggtatttcaaagaaaaccttttcaaaccaggaagtataaggaaaggctttgttttggaattgaaatcgcaaggacatattttcaccccaacatgcatagttttttatgttcacatgagaggtagaaactataatattataaaaataataactgaggtcttggaaagctaactttggcatattgctaggttgtaaattcttagatgctggagtcttcttgattcttttaataatttgcccgtgtttattgcagatggatggatttgatcaaacagtgaatgtgaaggttgtaatggcaactaatagggcacatactctagattctactttgttgcggccaggtagacttgacaggaaagttgagttctctcttcctgattggcggtagaagaggcctgtgttccaagtatgtactactaagatgaatttgagtgacgaggctgatttggaagattatgtttgcagactggataagatcagtgatgctgatgttgagttggtttcatggcacagaccaaaaattttatgcatttgttgttttctaacaattgtattgctagggacttttgtcctgcgctggccaaagctgtcaaaactatgaaaaaggcagagaagctgctccttatatatagtaaagccattggtagaccaacagttggagaggaaggtgttctgatgagcatcatcttgttctgcatcatcactaatcaacttgttatgcacagtgtccgatgtgcctgtctcaactcgattgctaaggcatataattgacctaaaaaggcacttcaagcgggtaggaaaattcaaggtcgttctcaagtacttccaagtcggtacggtcgttgagcctgcatctgagttctactcaagtaggctgaaaaatagggaacgcaaggcaacattggttgacgagctgttatcagatcaatctctgaagagctacagagtcattcatgttggtgggcgtcttggatgaactacattttcttcaacaaagatggagctcatgcagattgatttagtccctttttgcaatcgcctttgttgcagcaggcagctacgtgcccacgtttggcgaggcgccatttccggccaccggccacgtcgccgcgcgcaggagagaagctaggcactacatgatgtcagccgaccaagatttttaaaaaaagatacgaaagcttgctacaaaataaaccggtccagtcacaagctagctagctagccagattaagtcgatgccgcactgcttgtatatgcattggattccatattgttctcttcagatggacatcaaatgttctgttcattaattaaggttaatcagtggcatcctatgtggaatcgtccctgcttacatgcatatatagtgcgtgcgtgcattatatgtatccattccacatgcatgcatctgtttcaccatctttaatttggatgcttatgcatgcatgcttctttactttgattattgttttttg

SEQ ID NO: 212706 - DNA, 3240 bp, Zea Mays
cccctcccaacggcgcccttcctccccgcacgctacgacggccgagacgaacgcgcggcttcctccccaccaacggcgccctttccaaaagcctcgacccgctgctctcgccgagatcccgcgcgtagcacgcgcggcttccttcccaggctggcgagatgcctccttctacgctcgcgcatgcactatgcccctgtcgttgtccacctcccacgcccacgcatgcacccatcccctcgtcacgcaaaccatagtctcctccgcccccgtgctcgccaccgcgtcgacttcggtggagtccagcgatagggcgagtgggagacgatgccgccctcggttcgcgatgccgcccactcccacacgtcgtcgcgcgaagccggcgctcacttcgggccagatctacctgcccgtgtggtgttgtgcgtacgaccacctcgtgaagatgctgcaacaggcgtacgcgcaggtcgaggagctctccgtcgagcgcgagcacctcgtcaatgagctctagcttctacagagccgcttccacaagcgcaagatctgccaggcctgcctccagaaggacgaggagatcaggaagagagtcgtaaaggctgagacggcgatgcgtcttggcggcaaggagcttcagattcactgctgcgaggctgttccttagccccagcttcaattgttcctcatttagtttattgaaatctgaattatttggagctaatttgtacagtttatacatagagcacccttgaaagccacattcacatgaaagcagtatacacagagcacttcaattgaaagctgctgcattgtacagggaatatggaattctggattcctatatatcgtaactcctttgctgttgcatatgcattccagtttcagtttggagttacaaaacgaattcaattacaggtgtgcttgttcagttatatagggggggaaactgtttgtgccagaagtaatatactgaattttgtagctgcattgttcaccttatatcgttttgctatggtcaaatctcttctcaccattgggcttgtgaatttcatgttccgggtgatgtgtcatgcctagcagctgattatattctcagcgtgcatgtcatctcactttgcctgtgcagcaagtgtactgagtctgattgatgcatctttagttagctgtaaacttacagaggcaatatgggagcggtgatttcactgtttcgcccgaatccatataaaagtgagtcggaccgggccaaaaaacgtgctttgggctgggcttcaggctttctgtatactgatggtgcatcgactgcagaaggatgaagcggagctatgcatgctggttctgaatttatcaatagacgtatatgtttttttgtggggcttcattgtatccataatttcatatctaagcatttatagttagcgggccttctgctaatctttgctacattaagcatttacctaatatcgttggccatactgcctaattattcagtaaaagtgtgcctgtacattatgtcttcaatttgctgctccatacatctacgtcgacgcttatattcagcctgattggaattgttggctgatgcaacgttgctgatgctgttgtagctagactgcatgtaagtactatgctttgtagtacagaatgagcccgatctggtgagtttttttgtttcaactaaataggagctacttaatcaagtaaatggggatttcagattgttgtggtgttcctagaaattataatagatttcctattttatgttataaaatatggtatttcaaagaaaaccttttcaaaccaggaagtataaggaaaggctttgttttggaattgaaatcgcaaggacatattttcaccccaacatgcatagttttttatgttcacatgagaggtagaaactataatattataaaaataataactgaggtcttggaaagctaactttggcatattgctaggttgtaaattcttagatgctggagtcttcttgattcttttaataatttgcccgtgtttattgcagatggatggatttgatcaaacagtgaatgtgaaggttgtaatggcaactaatagggcacatactctagattctactttgttgcggccaggtagacttgacaggaaagttgagttctctcttcctgattggcggtagaagaggcctgtgttccaagtatgtactactaagatgaatttgagtgacgaggctgatttggaagattatgtttgcagactggataagatcagtgatgctgatgttgagttggtttcatggcacagaccaaaaattttatgcatttgttgttttctaacaattgtattgctagggacttttgtcctgcgctggccaaagctgtcaaaactatgaaaaaggcagagaagctgctccttatatatagtaaagccattaccaacagttggagaggaaggtgttctgatgagcatcatcttgttctgcatcatcactaatcaacttgttatgcacagtgtccgatgtgcctgtctcaactcgattgctaaggcatataattgacctaaaaaggcacttcaagcgggtaggaaaattcaaggtcgttctcaagtacttccaagtcggtacggtcgttgagcctgcatctgagttctactcaagtaggctgaaaaatagggaacgcaaggcaacattggttgacgagctgttatcagatcaatctctgaagagctacagagtcattcatgttggtgggcgtcttggatgaactacattttcttcaacaaagatggagctcatgcagattgatttagtccctttttgcaatcgcctttgttgcagcaggcagctacgtgcccacgtttggcgaggcgccatttccggccaccggccacgtcgccgcgcgcaggagagaagctaggcactacatgatgtcagccgaccaagatttttaaaaaaagatacgaaagcttgctacaaaataaaccggtccagtcacaagctagctagctagccagattaagtcgatgccgcactgcttgtatatgcattggattccatattgttctcttcagatggacatcaaatgttctgttcattaattaaggttaatcagtggcatcctatgtggaatcgtccctgcttacatgcatatatagtgcgtgcgtgcattatatgtatccattccacatgcatgcatctgtttcaccatctttaatttggatgcttatgcatgcatgcttctttactttgattattgttttttg

SEQ ID NO: 212707 - DNA, 530 bp, Zea Mays
ccttaatttcttatcccctcgtcctctgcgtcttgttgcacttgaagcttcctccgcggcctcccgtcgagcaaccatggcggcggcggtaaccctcctccgccttcctctcgcccgactctcctaccacctccgctccgtaccttcctctcgtctcccgtccccgcgcctccgtatctttgcctcccatcgccttttctcctccctggaccatggctccgcctctgcttccgcctccgcggccgtggccgaggttgtaggcgtgccggacgcggaggagtcggtagaggaggaatctgcggccgaggccgaggcggaggcgcccaggtcgttcgtgctcccacggctgccgcggccgaagctgagcgtgaaggagcggaaggagctggcctcgtacgctcacggcctcggcaaaaagctcaagtcgcaacaggtcggtaagagcggcgtcacaccgaaccttgtctccgccttcagtgacaacctcgagtccaacgagctcctaaagctgttaggtttttctcaccaag

SEQ ID NO: 212708 - DNA, 1991 bp, Zea Mays
caacactatagtcttgtggcagttgctgcctgtttgggactaggagttgtcgggttatgcaagtcattgtattgtggtttgtccataccatgggtttctccaaggaatttgttttcggggtttgggagagtatactatgtaggagatctgcgaaatttttggcaacaattgctttcttaatgtcatcctccaggtaaatattgactttgtaattctactgacatccagctagatgaatgctaaataagacagccttttctcggcacacacttgccagttgtgatggttttatttcctttatagaaaatttgtttgcaaccgatggcttgctacctaaagaaaagcctgtaaaaatgcctcttcttcttgctctaagccctctcttggaatgtaatatttttactatggactattgaacttcttatcattttcgagatccccactatgaacttcttatgacaactgtagattcattgtccaatgcaagtattgtccttttactacagacaatttctgggacctcttgacacttgagggctagaagatgtaaattcatgagagcttagatcgaacatgcattttggagagaccaacttgaatgtgcggagcagtcgatcacacggtattttcataatgttgaatggaagcgataactgaatcaagaatgttctatttatatcggtctcacgtaattgtgagcagcaatagagactaagtagttctgtaattgcatttgttctaagaccattttctgtagttgcatggaagcgataactgaatcaagaatgctctatttatatcgatctcagctattctaagaccactgctattttgtaatagatgtcagtgcttattactggtcaatcctcctcagctgcactcaaatctgaagttcgttcagctctttagaagagaaacaaagctaatttcagaagtcgaatactacctgactaacctcatttcagcagagatgtttataatagatgttagtgctcactcgccctcaatggaggaaagggagtttcagaaacatatggaatcgacaagactagctactcaagtatctattgcaagcccaagtagctcacaggggcttcccacatctgcaagggcaaatcaggaggaaactgatatggcaggtacggatgagggatatccgtggtcaagtttgatgcttcaggaccaatatcgttgtgtgtcgttgctggtggtatctgaatgggggtaaagatatagagagggatttttttcttcaaatgatgatttatcgttgcgtgtcgatgctggtgttatttgaatgggggtatgcggtcggtgctcgtgcgacacagacccacgattctccttggacgccggccgcatgtccgtcagtgacatgggcttctcttgggatgagccctgtgcgtcgtgggacggctgaaacgtgtaacagagagtctcaagttctatagatcttcacttcccctgcttgttctacatttcacgatcctgactgatatttctttttatcatattagggccgagatgtatatatactggtaagcactcatcacttccattattgtgtttttctttagatgttaggggaaaaatgaagagggcaatttctattcaaagatatgtgcattatattgtatatgcaattgctattgctataaatataaatttaacaaacttcattaattcaggcaatacaactttggagaatgcgagttgtgtttctgcctctgagccagtgtagctatatctgatttaaaccatactctgttacagggttccacaaatgttggaaaatctgcatatatgttgttcgtttccatgtaattgttgtgcactaacatttatcgaatagtttgtacaccgttgtaacgcacgtgcactcacctagttgtagtatatatgacaaataatttgcagtcttcaacatcggaaaatccgggtcaaaaggcatgggttgtacacacatttattaaagtcacctagaaacttac

SEQ ID NO: 212709 - DNA, 757 bp, Zea Mays
gtttttttggtatttggctggcatcctgagtccgctgctgcccgccgaacgatggtcgatctgatgattgggcaggcaaatacccagatcggtggcaccggcgtttaagttgaagaggagctgggatgagtttgtacgatactggctctacagttaggagaacacatttaatctaccttcactagcattcagtaatgcctttgcctaaatcagacctggggtcataactctttagtagagaaccaagaagatgcaggcatctagggcaaggcttttcaaggagtacaaggaggtacagcgagagaagtcagctgaccctgatatccaattaatatgtgatgattctaacatattcaagtggactgctcttatcaagggcccttctgaaacaccttatgaaggtggtgtgtttcaacttgcattcgcaattccagagcagtatcctctgctgcctcctcaagttcgatttttgaccaaaactttccacccaaatgtgcatttcaagacaggtgagatttgtctggatatattgaagaatgcatggagccctatatggacccttcagtctgtttgtagagccataattgctctgatggcccaccctgaaccagacagcccacttaactgtgattcaggcaatctcctgcggtccggtgatatcagaggctatcaatcaatggcccgcatgtatacaaggctggcggccatgccaaagaaagtatgcgttcaggagggtttcaaatgtaagaaccacatg

SEQ ID NO: 212710 - DNA, 1256 bp, Zea Mays
ctttgatccctagggaggtctgcccggatccgacagccgtgagcgcgtgctctatctgcacaagctttcccgacgggctgcagagaaatcaaccaaaaaaattcacatcaaaccaccgtaacgacgcaaaaatcccaccgatctcgatgggggagacgagtaagcgagcgatgtagcgaggggagcacgaacctgaaagtggtaagcgagaaggagtattggctgtcacccatgaccgaggcgcggagtcacctcgttgcctcttccgggttggagtgtcggcgattcgtggcaaggtttttgctctagcgagggagagaggtggctgaggaaaaaaaggggaagacaacgacgagacggagcagggaaagagatggagaatcgcaggaggaaagagagagcggagtgtttctcaagaagaaacgttttgggctggagtccaagttgtacttgggctggctatctgagttggtgaccaaatataggttgcacctgggctgggcctgacccaccgccgcctcttccgccttgcacggttcccccaactcccttctccgacggccactgcccaccgtcacagcagaagctcctccggtcctcccttctctccgtagaaacatttcccgacgggtgtttcccacgccggaatggaccagccggcaccataagcccaagattcgtttgcattcagtaatgcctttgcctaaatcagacctggggtcataactctttagtagagaaccaagaagatgcaggcatctagggcaaggcttttcaaggagtacaaggaggtacagcgagagaagtcagctgaccctgatatccaattaatatgtgatgattctaacatattcaagtggactgctcttatcaagggcccttctgaaacaccttatgaaggtggtgtgtttcaacttgcattcgcaattccagagcagtatcctctgctgcctcctcaagttcgatttttgaccaaaactttccacccaaatgtgcatttcaagacaggtgagatttgtctggatatattgaagaatgcatggagccctatatggacccttcagtctgtttgtagagccataattgctctgatggcccaccctgaaccagacagcccacttaactgtgattcaggcaatctcctgcggtccggtgatatcagaggctatcaatcaatggcccgcatgtatacaaggctggcggccatgccaaagaaagtatgcgttcaggagggtttcaaatgtaagaaccacatg

SEQ ID NO: 212711 - DNA, 727 bp, Zea Mays
actgggttcataccaatttgatacaacattcacctccaaaaagaaaattcacatggacataaaaactacataaaagaggaaacaatagagaggatgaggttagatgaagagaagcttatggatttctttagggaacacgtcaacgtgacaaaagttgaaagtagagtgcggattctggcagatatgagagatctagcttcagctgggagtttggatagctttactctcattttcacaaatatactggaacatcaacctgattgcccgcctgaggttgttgagaagcttgtggcaatgcgggaagacattccaagaaaggaagccaaggagattgtacaagaatgcaaagagatatacgagaactcgctcgtggatggcaaccctcgcaagtcaggttttgtgttcggcaaattgaagtgcttgacagcaaagaaaggcatatggaggaagcgtgggcagtaagtggcgacttgcagcagagtggacgaacttatcaccaaggcaaagattgtacatttcacttctctatgatcattcttttttcgatgctactgttgggtttcacgtttatactatcagtatgtactcagcttgaggagcaaacatgtaatttattcaataaaatggttgttatttgcaataatataaaattattgcaagataggttcttcggctttctggactgcacaacagagtttagagaatggtatgctttatgattcagagt

SEQ ID NO: 212712 - DNA, 738 bp, Zea Mays
agtctgtatgagcgccgagaatcgagtttgcgctctcctttccggctttccgcccaaacagccgtcgggcgtcccacggccgccgcccctgccggagatacgcgtagccgggagttaagggatgagtcctcaaatgctgttattggaaacatcttaagttagagtaagttgctgaaactatggaagaggttcaaaactgtgtgatgaagctgcggagcaatccaaggcggcacagggataaagtgtatgttggctgtggggctggatttggtggagacaggctaatggctgcttataagttgctgcagagagtcaaggagcttaattacctagttctcgagtgtttggcagagcgaactctggcggatcgataccgaattatggtgtcaggaggcaaaggctacgatcctcgggtcaaagagtggatgtctttgcttctacccttggcttttgaacggaaagtttgcatcataactaacatgggggcaagtaagatattgctggctatggttcaactttagtgcgtgattaccttttcacttcttttgcctgtttcttcatgttacgtcagtggatcctcttggagcacagaaagaagtactgaacctggcatctgtcttgggactggagataacagttgccgtagcttatgaatcatcctttgaaactcaaggaagccctgtattgtccgatgaatcaacaggagggagaggggcttcatgtgtggtcgaggacatc

SEQ ID NO: 212713 - DNA, 2309 bp, Zea Mays
agcctccaccccccctactatccgcatccttcatcccagtagttgatgagtcctcaaatgctgttattggaaacatcttaagttagagtaagttgctgaaactatggaagaggttcaaaactgtgtgatgaagctgcggagcaatccaaggcggcacagggataaagtgtatgttggctgtggggctggatttggtggagacaggctaatggctgcttataagttgctgcagagagtcaaggagcttaattacctagttctcgagtgtttggcagagcgaactctggcggatcgataccgaattatggtgtcaggaggcaaaggctacgatcctcgggtcaaagagtggatgtctttgcttctacccttggcttttgaacggaaagtttgcatcataactaacatgggggcaatggatcctcttggagcacagaaagaagtactgaacctggcatctgtcttgggactggagataacagttgccgtagcttatgaatcatcctttgaaactcaaggaagccctgtattgtccgatgaatcaacaggagggagagggggatgtagcacatatcttggggcagcttcaattgtacattgcttggaaaactataaaccacatgttgtcattacttcacgggttgctgatgcttcactcttcttagcacctatgatctatgaattaggttggaattggaatgacacacagttggcacaaggaacattagcaagccatcttctagagtgtggctgccaactcactggaggatatttcatgcaccctggagatgcatacagggattttccttttgaacaacttctggatttgtctctcccatttgccgaagttagttgcagaggagaagtcattgtcagtaaggttgtagatttctgtaatgtacagttccatcaaatatcaaaagacaaggtcagctgtgatggagcaaaaccttctaatgcttgttgccctgagaaactcctgcaattatctcctactgaaagtggatggaaaggctggggagagatctcatatggggggcatcaatgtttaaagcgtgcccaggcagcagaataccttgtaaggtcgtggataggtgaaaggtacccaggcattaatgaaaaaattgtctcatatgtcatgggctatgatagtttgaaagctattggaggtgatgaggatagttacttggccaagcaagtattggatgtaaggcttcggatggatggtctcttcgagcttgaagagcatgctgttcagtttgtcgaagaatttattgctctatatacaaatggtccagctggtggcggtggaatcagcactggacacaggaaggaaattattctgcaaaagatgctggttgatcgggaaaacatcttttggcgatcgcatgcaaagaaggcgagcattccctgcctgcataatcaagctacatattctgaaacaggtcaggcacgtatttcacaagcgcaacgaaacccaacatgtcgtacaatggccattcaacactttgaagcaagcacggagaccccagcatcccctgctccagctttacctgggaaaagggtcgctctctaccatgtggctcacagcagggccggtgacaaggggaatgatatgaacttctctgtcattcctcactcccctgctgacatcggccggctcaggtccgtaataactccggattgggtgaagaacgctgtgtcacctctgcttggttcgtcttcgtttcctgacgagcgagatgttcagcatcgaaacaagctgcttgagcttgtcaccgtggaaatttactacgtcccgggcataagctccctgaatgttgtggtgaggaatatcctggatggtggcgtcaactgctcgaggaggatagatcggcatggaaagaccttgtcagatgtcatattgtgccaacaagttatcctaccgccatgattgtcaatattcttatccgtattcgaattaaaatatggtaaatagtatctgtattcgaaccaaaatatggtaaatagtgacatccgaatttgtatccgtgcgtatttgatccgaatacatctctattaattgactacagtacccactataaacttatgtgtattaatattattaaggtttgttttttagagcctgtgtgaactctgggagacttgatgctaataccagagccgtgtacaggtgaagacggagcaattctgtcacccgttttacgcttacccatattatattatattatattatattatattaaatattatctcaggaattactttttttcgtttttactgtagcaaaattttggtttgacaaaaaaata

SEQ ID NO: 212714 - DNA, 1060 bp, Zea Mays
gtcttctcctctcccctttcaatttcagtttcaggtgccgcgtggtggtgtcgtggcgtgacgcgaatccgtgcctaatttggcgcgctcatgaagctgtggcagctgtgttgcgtttcggtgcagtaggatgcaggggagtctgattctgatagtgaagcatcggatgttagcggctctgatggagaagacacctcatggatttcatggtattgcaacttaagagggaatgagttcttctgtgaagtcgacgatgattatattcaagacgacttcaacctttgtggtctcagcagccaagttccttattatgattatgctctcgatctcattttagatatcgagtcatctcatggtgatatgttcactgaggaacaaaatgagctcgtagaatcagctgcagagatgctttatggtctgatacatgcacgatacattctgaccagtaaaggactggctgcaatgctggagaagtataagaactatgactttgggcggtgcccgcgtgtttactgctgtggtcaaccatgcctgccagttggacaatcagacatccatcgatctagtaccgtgaagatatactgccccaagtgtgaagacatctactacccacggtccaagtaccaaggcaacatcgacggcgcatactttgggacaacgttccctcatctgttcctgatgacatacgagcacctcaagccacagaagctctcgcagcgctatgttcctcgtgtctttggcttcaagctccacaagccatgaacctcatgtatttgtcttttaaactcctcaagacgtggcactgggggcatgcgggagttttgcaatccttgaagacttgcatataagagcgccattggcaggaatgtggggttggtttatgaagcgatcgagacaatctgacaatggtattaggtgatgaagatgtgaccagcaagacagcgaccgtgaaggtggcgaagcagggcagagaggtggcacaagaggctgggagtgacaactaacaacagaggtgggcttgacccttaacttctgctcgattaatcatgatacatattct

SEQ ID NO: 212715 - DNA, 1364 bp, Zea Mays
gtttcctttcctttttgcattcccacccacccatcccctcaaaattcgcagcgtgtctcttcctccatcgcagcgtgtctcgtgctccccccaggctcctcttcctcgctttccctccaccccgggcgcaaaccctaaccctaccgtcgctcgccccgcggcgtctgccaatggcgcgccccgtgtgagtgtgcgcgagagaggggtagaccttgaggccgctacccggggaggagagcgagagatgtataaacaggggggagcggggggaggggctgggctggaccggaagcggatcaacgacgcgctggataagcatctcgagaaggcggtcgcgtcgccgtccacgtcgagggggtcggcgggcggcgggcgcgaccaccaccgcctcgtcgtgccgtcctccgtgtcgtccatccccaagggccgctgctccgaaggggagtctgattctgatagtgaagcatcggatgttagcggctctgatggagaagacacctcatggatttcatggtattgcaacttaagagggaatgagttcttctgtgaagtcgacgatgattatattcaagacgacttcaacctttgtggtctcagcagccaagttccttattatgattatgctctcgatctcattttagatatcgagtcatctcatggtgatatgttcactgaggaacaaaatgagctcgtagaatcagctgcagagatgctttatggtctgatacatgcacgatacattctgaccagtaaaggactggctgcaatgctggagaagtataagaactatgactttgggcggtgcccgcgtgtttactgctgtggtcaaccatgcctgccagttggacaatcagacatccatcgatctagtaccgtgaagatatactgccccaagtgtgaagacatctactacccacggtccaagtaccaaggcaacatcgacggcgcatactttgggacaacgttccctcatctgttcctgatgacatacgagcacctcaagccacagaagctctcgcagcgctatgttcctcgtgtctttggcttcaagctccacaagccatgaacctcatgtatttgtcttttaaactcctcaagacgtggcactgggggcatgcgggagttttgcaatccttgaagacttgcatataagagcgccattggcaggaatgtggggttggtttatgaagcgatcgagacaatctgacaatggtattaggtgatgaagatgtgaccagcaagacagcgaccgtgaaggtggcgaagcagggcagagaggtggcacaagaggctgggagtgacaactaacaacagaggtgggcttgacccttaacttctgctcgattaatcatgatacatattct

SEQ ID NO: 212716 - DNA, 992 bp, Zea Mays
ttgcgtttcggtgcagtaggatgcaggggagtctgattctgatagtgaagcatcggatgttagcggctctgatggagaagacacctcatggatttcatggtattgcaacttaagagggaatgagttcttctgtgaagtcgacgatgattatattcaagacgacttcaacctttgtggtctcagcagccaagttccttattatgattatgctctcgatctcattttagatatcgagtcatctcatggtgatatgttcactgaggaacaaaatgagctcgtagaatcagctgcagagatgctttatggtctgatacatgcacgatacattctgaccagtaaaggactggctgcaatgctggagaagtataagaactatgactttgggcggtgcccgcgtgtttactgctgtggtcaaccatgcctgccagttggacaatcagacatccatcgatctagtaccgtgaagatatactgccccaagtgtgaagacatctactacccacggtccaaacatcgacggcgcatactttgggacaacgttccctcatctgttcctgatgacatacgagcacctcaagccacagaagctctcgcagcgctatgttcctcgtgtctttggcttcaagctccacaagccatgaacctcatgtatttgtcttttaaactcctcaagacgtggcactgggggcatgcgggagttttgcaatccttgaagacttgcatataagagcgccattggcaggtcagtggattggtaaaattctatcatgctgcagcgtgcttgtaccttagctggctggcacctatccaacatttgaatgtagctctaaggatatcaatgttgtaacctaactgctattgttctttgattagtaaaccaggagccccccctacaatgtagaatatggcaattatttatggctttgcagaaaataacaacccttcatctgcttggttctccaaaaagctatttatctaaaaaaatatcaaaa

SEQ ID NO: 212717 - DNA, 882 bp, Zea Mays
acgacttctgaaacgggtaatgctagtgctgagctgctgaagacggttgtgctctcaggcaccaaaacattcggatctgaaatcctaaacggaagtgagacgcccaatcggtgatccaccgcttccccgtcggtaccatgtccgctggaagcgagaggccgtacgccttctcgcccccgtcggcggtcccgggccccttctcccgcggctccggctccgctcccaccacggccgcgacagatagcactgggaggagctcgtcctccgtggcgccgacgaagagccgaaagccaccgttccggcccgccgtggacgacacaaagcccgtcctccgcgatccgatatcacgctcggacctggcggtcaccgagcaggtcgtgctgcggctgccgccgttcccctaagttcgcgccacccaatggcatatgaaaataaagaagaggaagaaaatgttgaggatcgagaacattcaaactagtatattctgtggcgagatttgaattccacatgtacagccaaaaaattgaattcaaaagagagaaaactctactaagttatcacaaatactctttcatcctgtagcggcacaccaggagtgtactagtgttaaatctgtagtagagtcagttgctacctcgcttgctattctttatgattcgcttgtgacaaagaatctattcttgtcgataacccaattcatagattttaggtcttccccgcattctatttacaatgtcacggagaaatgactaagcaactgacttgtgaaggtaacaggtataagtgctgcaacagtgaagtatcacagggtcgtaagaatgtttgttttgtttatggcatgctgttatgtggggacattaataccagaggagaaccaagaag

SEQ ID NO: 212718 - DNA, 2560 bp, Zea Mays
ccggcaaagagataaaccgaggcaaaggcttccctccgcaggtccaattagacgtgtgacatcaacaaacttgaagtacttgaacctgtcacacaataatcttcagggaactttaccgatcacatttggaagctgttcagtagttgatttgagtggaaacatgctgtatgggaacttatcagttgcccgaacatggggaaattatctccagatggttgatttgagctcaaacagattaacaggaagttggccaaatgagacaacccagtttttaaggctgacatctttgaggatttccaacaacttgctatcaggagaactgccaattgtccttggaacctatccagagctgattttcattgacctcagtattaatcagctgcatggacctttgcctggaaatctgtttacagcggttaagctgacttttcttaatctttcaggcaacagttttacagggactctcccccttcgaaattccgataccaagaactcgacttctatagacttgtccattcttcctgtgcaaacttcaaacctctcctatgttgatctttcaagcaattttttgcacggctcactgcctatgggcattggtgatttgagcgcgttgacattgctgaaccttcgtcagaacaactttactggcgaaatcccaagaacaatcaccaaacttaagaatctcttatacattgacttatcaagcaacaatttcaatggtagcatacctgatggcctccctgatgatctggtcgaatttaatgtttcctacaactacctgtctggctctgttccaagtaatttactgaaattcccagattcatctttccatccagggaacgaattgctcgttcttcctcgctctgaatcattaaatggttctgacaaatcagatgaggcaagacacggcttgaagcgtgggattctatatgcattgattatctgtgttgttgtatttgttactgggattattgcgcttttgcttgttcattggaagatcagtagctggaaaagtagggaaaaaggtactggccaaggtaaacatgtgggtcaagtccagagtgctcagagaagtgcagaaatttcaacaactgaaatgcatgatgtagcattagaatcgtcaccttctgcagagtatggagctgtttcattgcctggcaaggaaagacgacatgaagcccaagatgcgccaattgatgctgcttatttcaacgaaccagcaggtagtagctcagcccgtaaagacagcacaaagtcttcgatgccttctttatcatcgtcgcctcctgatgcacgctcccagcatcatcactctatccttagagtgcactctcctgataaactggttggggatttacatcttttcgacaattcagttgtgttcacggctgaagagctctcttgtgcccctgctgagataattggcaggagctgccatgggacatcctacaaggctacacttgataacgggtacatgctgacagtgaagtggctgaaggagggctttgctaagagtaagaaagaattttcccgtgaaataaagaagcttggcagtgtaaggcaccccaatcttgtccccttgcgtggctactactggggccccaaagagcatgagaggatcatgatatcagactatgcagatgccacatctctgtctacctacttgtctgaatttgatgagcggaatctcccacccctatcagctggacagcggctgaacattgcgattgatattgcccgctgtctagattacctgcacaacgagcgggtgattccacatggcaacatcaagtcgtctaacgtcctgattcagaactccactccatctgctctggtgactgactacagccttcacaggctgatgactccaatcggcatggcggagcaggtcctaaacgccggcgcgctaggatattcccctcctgagttttcaagcaccagcaagccatgcccatctctgaagagcgacgtgtatgccttcggtgtcatcctgctggagttgctgacagggaagattgccggtgagatcatctgcatgaacgatggcgtggtcgacctgaccgactgggtgaggatgctggatctggaggagcgtgtctcggagtgctacgacaggcacatcacgggtgttgagagctcggaaggcgccccacaggcactggatggcatgctgcgcatcgccctccggtgtatccggtcagcatcggagaggccggaggtccggacggtgtttgaggatctcttgtccttatcgtcgtgaccgtagttattggtagtgtacatctcgtacttgcatcagcttgtggaaacttggagggtatactaacaattgctaggatttcggggtgatcaggtgatgtgtgtgtagtctccttgagcattcattgtttgggtcgctctttctgggaatagttgattcgtttttagttagtccacaattttagcagtagatgattgtgagaataatgtttgtgcattgtgatttcagacactagaaaggaaaataaagatagtcttattgatttgttgctctgatgccctccaacagtatgtattccta

SEQ ID NO: 212719 - DNA, 1144 bp, Zea Mays
cacgctttcgctccgaggagaatttaagaaccgagtaggcagacagggaaggctaggaggggactaggggagagagagagggggaaggccaagaagaggcttcctctccccccattctccaatccgtgccctagtcgagccagccgcgaggaaggaggcgtctcgcctagcgcccgcccgtcggccgaccttctgctgcaccttcgaactctggaaagatcatagatttttgggcaatagcaagtggacatggaaccatcctctcagcctcagcctgcgatgggtgtcgccgccggtgggtcacaagtgtatcctgcgtctgcctacccgcctgcagcaacagtagctcctcctgctgttgcatctgctggtttacagtcagtgcaaccattcccagccaaccctgcccatatgagtgctcagcaccagattgtctaccaacaagctcaacagttccaccaacagctccagcagcagcaacagcagcagcttcagcagttctgggtcgaacgcatgactgaaatcgaggcaacagctgatttcaggaaccacaacttgccacttgcgaggataaagaagatcatgaaggccgacgaagatgtccgcatgatctcagccgaagctcccgtggtcttcgcaaaagcttgcgagatattcatactggagctgacgctgaggtcgtggatgcacaccgaggagaacaagcgccgcaccttgcagaagaacgacattgccgcagccatcaccaggaccgacatttacgacttcttggtcgacattgttcccagggatgagatgaaggacgacggaatcgggcttcctaggcccgggctgccacccatgggagccccagctgacgcatatccatactactacatgccacagcagcaggtgcctggtcctgggatggtttatggcgcccagcaaggccacccggtgacgtatctgtggcaggatcctcaggaacagcaggagcaagctcctgaagagcagcagtctctgcatgaaagggactgaggatgtcgctcaagctatcacctgatttttcagagctctcattttaggttctctaaactgcaggttttcgttggctaatatcgttgggtatcaaactgaaacagacttgtgtctagttgaattctgg

SEQ ID NO: 212720 - DNA, 1146 bp, Zea Mays
cacgctttcgctccgaggagaatttaagaaccgagtaggcagacagggaaggctaggaggggactaggggagagagagagggggaaggccaagaagaggcttcctctccccccattctccaatccgtgccctagtcgagccagccgcgaggaaggaggcgtctcgcctagcgcccgcccgtcggccgaccttctgctgcaccttcgaactctggaaagatcatagatttttgggcaatagcaagtggacatggaaccatcctctcagcctcagcctgcgatgggtgtcgccgccggtgggtcacaagtgtatcctgcgtctgcctacccgcctgcagcaacagtagctcctcctgctgttgcatctgctggtttacagtcagtgcaaccattcccagccaaccctgcccatatgagtgctcagcaccagattgtctaccaacaagctcaacagttccaccaacagctccagcagcagcaacagcagcagcttcagcagttctgggtcgaacgcatgactgaaatcgaggcaacagctgatttcaggaaccacaacttgccacttgcgaggataaagaagatcatgaaggccgacgaagatgtccgcatgatctcagccgaagctcccgtggtcttcgcaaaagcttgcgagatattcatactggagctgacgctgaggtcgtggatgcacaccgaggagaacaagcgccgcaccttgcagaagaacgacattgccgcagccatcaccaggaccgacatttacgacttcttggtcgacattgttcccagggatgagatgaaggacgacggaatcgggcttcctaggcccgggctgccacccatgggagccccagctgacgcatatccatactactacatgccacagcagcaggtgcctggtcctgggatggtttatggcgcccagcaaggccacccggtgacgtatctgtggcaggatcctcaggaacagcaggagcaagctcctgaagagcagcagtctctgcatgaaagggactgaggatgtcgctcaagctatcacctgatttttcagagctctcattttaggttctctaaactgcaggttttcgttggctaatatcgttgggtatcaaactgaaacagttcatgcttctctcttttctccatt

SEQ ID NO: 212721 - DNA, 1742 bp, Zea Mays
ggcttcttcgtcaccgagccttctcgtcctcgcggacttgtgacttgtgactccagtcccttccaatcaacaagttgctatagtagtcccttccaaaatccacactggaaccggaacctccatctccaatccaatccaactccagatccgcctccctgctgcatccccatcccgcacgagcaccaccccttgtcctctccgcctctacatctcatcggctggtgcacctcctccctcctctgctcggcccctccctcccttctcgtgctacggcagcgtggatgcacgagactacagctgtggcaaagcggagatccggcgggagtgcagcggccggcgtgcctctacgtggtatggtgacatgaagatgcgaggcgaggcgagcaaggccagctccggctccggctctggctccagcgaggatggtgagcgaaccggccccgtgccttcccccgctcgtcgcgcgccgcccatccgcatcgacgtcgccatgggctccttctccgcatgtcgccgccacgagatctgcccgcgcgtctccttcggcagccgatgcccgacggccgtccgacctccgacgcatcgtcgccggtccggtcctcttcgccccctctccgctgcgtggcgccacccgtcgtcacctccgcccccttcaccgacctctcctgggtcctccacacactgctcgtcaccatcgtcatgcgcgaggcgctcaaggactggtgattgcggtgtgttggttgaggatgccagagatgagctgaagcttctagcattatgtacaaaaggtatttgtcgaattacctggatgggattttgctatacttcacttgatttatcatatttcctttgctcatcagttctgaacaagtgaccacgtctaactcacaactctcccatttctggttgcgcgaatttcttcaattctttcagaaatcagaattgcatgacttttatcttaacataagttagagtagctgtgcataaatgtggagaatattgatcagagtttatgatttgttcaaactgaaactcactaaattcttgcaattaaggactatcggatggtcagcatccaatttatctatgttcagcataatggcatcaagtttttgctaatatgactgtagagtcttaagacttcaattaatttttgcaggggattgacatgctatcatttgtatcaattaaaactagagctgttctcttgatataagggttttctccatatttgagatggattgaacactgtatcctttacctgcagcattttttctgtatctcgtgataatttttcagtcactctaatctctctctccatgcagctgataggttttctccatatgttgcttgggaatgcttgattttttttctagctgcataaagctttgtatcatcaaacaattcataaaagaggctgacctgttctagttattggtgtcagatttgactgcagtcccatgattttttgcttcagatgggactggactttggttcagagtttgagataatcaatctgtagtctaaaaattgtatgtgtttgtagttgatgggagcacctctcaggagttaccttagtgctttagatgtaataattgttctgtaactgaataaacatttgcatttgtgatgcattttgactatatatgtgagatgtttataaaaacacgtgcaatatatataatattggctttcctccatgtttttttccagtttttcatttagtgacgcgtctcggcgag

SEQ ID NO: 212722 - DNA, 1236 bp, Zea Mays
cgacactttccaccacaccgtgttaaaaaaacttcaaaccttcaccagacactgactagaccgtccccacacatacacacatccctcgtgccctggtgtcagtgacacaaagagttcacaaacctaacacgccacgctccgcctccgctcctgctaaacgagacgtctttttgactcctcgtctcttctccgttctgccatctcactatccgtctctgcttagcggcgaagccagagaaacgggagtaaattaggaaaacccgctgtgcgaatcgaacatctcgaaagcgatttactgctgcgtgcgtttcggccgctgatcccgaacacttcctggcttcgtgaggataagttcagggccagccagagttttagatgaagacttgatttctcctctcagataatagagtgtttcaaaatgactgatcaggagcgagatgatgttcccatgttgctaagaaatgttgagctaccaagatttcctctaagaagtacttcaatgtgtataccagtcagggatgatgattatgaagaagacacctttgtgccccatactggtcctctattcgtccagccatcaactcagacggcaccgggaatttcatttacaggtagagacacacctgataggcttcctaaaccttcacagggaaaacaagtcagcaagccacatgcaatcatgccagaagaaataagaggaaataagtggtcttacagtgggcaggttccaaagaatgaacacttgatgatgtctgggcctttggggcaatgtgataatcccgactgtgtgaattgccctcctgcttgtaaaaacagaagacattttcagagaggttcaaatgctttagacaataagatccataatattctttatggtcacagtcgtggatggaagaagaagattgagcaaatcatggcatgcattccgattatgaacccacatgcaaagcctgttcagcggtggaatcaattctttgtcatatcatgcctgattgccattttcattgatcccctgttcttcttcttactatcagtacgacaggatggcaactgcatagtgttaaattgggaaattgctacagcgcttgctgttgtgagaagtgtgactgatgctatttatttcctccacatgttgcttcagattggcttatgttgcaccagagtcacgagtggtgggagctggagacttggttgatgagccaaaaaaagttgctatccattatcttcgtggttact

SEQ ID NO: 212723 - DNA, 1125 bp, Zea Mays
cacaaacctaacacgccacgctccgcctccgctcctgctaaacgagacgtctttttgactcctcgtctcttctccgttctgccatctcactatccgtctctgcttagcggcgaagccagagaaacgggagtaaattaggaaaacccgctgtgcgaatcgaacatctcgaaagcgatttactgctgcgtgcgtttcggccgctgatcccgaacacttcctggcttcgtgaggataagttcagggccagccagagttttagatgaagacttgatttctcctctcagataatagagtgtttcaaaatgactgatcaggagcgagatgatgttcccatgttgctaagaaatgttgagctaccaagatttcctctaagaagtacttcaatgtgtataccagtcagggatgatgattatgaagaagacacctttgtgccccatactggtcctctattcgtccagccatcaactcagacggcaccgggaatttcatttacaggtagagacacacctgataggcttcctaaaccttcacagggaaaacaagtcagcaagccacatgcaatcatgccagaagaaataagaggaaataagtggtcttacagtgggcaggttccaaagaatgaacacttgatgatgtctgggcctttggggcaatgtgataatcccgactgtgtgaattgccctcctgcttgtaaaaacagaagacattttcagagaggttcaaatgctttagacaataagatccataatattctttatggtcacagtcgtggatggaagaagaagattgagcaaatcatggcatgcattccgattatgaacccacatgcaaagcctgttcagcggtggaatcaattctttgtcatatcatgcctgattgccattttcattgatcccctgttcttcttcttactatcagtacgacaggatggcaactgcatagtgttaaattgggaaattgctacagcgcttgctgttgtgagaagtgtgactgatgctatttatttcctccacatgttgcttcagttcagattggcttatgttgcaccagagtcacgagtggtgggagctggagacttggttgatgagccaaaaaaagttgctatccattatcttcgtggttact

SEQ ID NO: 212724 - DNA, 921 bp, Zea Mays
atcggaattcgggacttcgtttgtttggtgcatctcacagctggccagccagagttttagatgaagacttgatttctcctctcagataatagagtgtttcaaaatgactgatcaggagcgagatgatgttcccatgttgctaagaaatgttgagctaccaagatttcctctaagaagtacttcaatgtgtataccagtcagggatgatgattatgaagaagacacctttgtgccccatactggtcctctattcgtccagccatcaactcagacggcaccgggaatttcatttacaggtagagacacacctgataggcttcctaaaccttcacagggaaaacaagtcagcaagccacatgcaatcatgccagaagaaataagaggaaataagtggtcttacagtgggcaggttccaaagaatgaacacttgatgatgtctgggcctttggggcaatgtgataatcccgactgtgtgaattgccctcctgcttgtaaaaacagaagacattttcagagaggttcaaatgctttagacaataagatccataatattctttatggtcacagtcgtggatggaagaagaagattgagcaaatcatggcatgcattccgattatgaacccacatgcaaagcctgttcagcggtggaatcaattctttgtcatatcatgcctgattgccattttcattgatcccctgttcttcttcttactatcagtacgacaggatggcaactgcatagtgttaaattgggaaattgctacagcgcttgctgttgtgagaagtgtgactgatgctatttatttcctccacatgttgcttcagattggcttatgttgcaccagagtcacgagtggtgggagctggagacttggttgatgagccaaaaaaagttgctatccattatcttcgtggttact

SEQ ID NO: 212725 - DNA, 896 bp, Zea Mays
gtcttttcatacccctgggccagccagagttttagatgaagacttgatttctcctctcagataatagagtgtttcaaaatgactgatcaggagcgagatgatgttcccatgttgctaagaaatgttgagctaccaagatttcctctaagaagtacttcaatgtgtataccagtcagggatgatgattatgaagaagacacctttgtgccccatactggtcctctattcgtccagccatcaactcagacggcaccgggaatttcatttacaggtagagacacacctgataggcttcctaaaccttcacagggaaaacaagtcagcaagccacatgcaatcatgccagaagaaataagaggaaataagtggtcttacagtgggcaggttccaaagaatgaacacttgatgatgtctgggcctttggggcaatgtgataatcccgactgtgtgaattgccctcctgcttgtaaaaacagaagacattttcagagaggttcaaatgctttagacaataagatccataatattctttatggtcacagtcgtggatggaagaagaagattgagcaaatcatggcatgcattccgattatgaacccacatgcaaagcctgttcagcggtggaatcaattctttgtcatatcatgcctgattgccattttcattgatcccctgttcttcttcttactatcagtacgacaggatggcaactgcatagtgttaaattgggaaattgctacagcgcttgctgttgtgagaagtgtgactgatgctatttatttcctccacatgttgcttcagattggcttatgttgcaccagagtcacgagtggtgggagctggagacttggttgatgagccaaaaaaagttgctatccattatcttcgtggttact

SEQ ID NO: 212726 - DNA, 914 bp, Zea Mays
ctcagctgcaacttctcttgcagcttccaatgcttggccagccagagttttagatgaagacttgatttctcctctcagataatagagtgtttcaaaatgactgatcaggagcgagatgatgttcccatgttgctaagaaatgttgagctaccaagatttcctctaagaagtacttcaatgtgtataccagtcagggatgatgattatgaagaagacacctttgtgccccatactggtcctctattcgtccagccatcaactcagacggcaccgggaatttcatttacaggtagagacacacctgataggcttcctaaaccttcacagggaaaacaagtcagcaagccacatgcaatcatgccagaagaaataagaggaaataagtggtcttacagtgggcaggttccaaagaatgaacacttgatgatgtctgggcctttggggcaatgtgataatcccgactgtgtgaattgccctcctgcttgtaaaaacagaagacattttcagagaggttcaaatgctttagacaataagatccataatattctttatggtcacagtcgtggatggaagaagaagattgagcaaatcatggcatgcattccgattatgaacccacatgcaaagcctgttcagcggtggaatcaattctttgtcatatcatgcctgattgccattttcattgatcccctgttcttcttcttactatcagtacgacaggatggcaactgcatagtgttaaattgggaaattgctacagcgcttgctgttgtgagaagtgtgactgatgctatttatttcctccacatgttgcttcagattggcttatgttgcaccagagtcacgagtggtgggagctggagacttggttgatgagccaaaaaaagttgctatccattatcttcgtggttact

SEQ ID NO: 212727 - DNA, 910 bp, Zea Mays
aacttctcttgcagcttccaatgcttggccagccagagttttagatgaagacttgatttctcctctcagataatagagtgtttcaaaatgactgatcaggagcgagatgatgttcccatgttgctaagaaatgttgagctaccaagatttcctctaagaagtacttcaatgtgtataccagtcagggatgatgattatgaagaagacacctttgtgccccatactggtcctctattcgtccagccatcaactcagacggcaccgggaatttcatttacaggtagagacacacctgataggcttcctaaaccttcacagggaaaacaagtcagcaagccacatgcaatcatgccagaagaaataagaggaaataagtggtcttacagtgggcaggttccaaagaatgaacacttgatgatgtctgggcctttggggcaatgtgataatcccgactgtgtgaattgccctcctgcttgtaaaaacagaagacattttcagagaggttcaaatgctttagacaataagatccataatattctttatggtcacagtcgtggatggaagaagaagattgagcaaatcatggcatgcattccgattatgaacccacatgcaaagcctgttcagcggtggaatcaattctttgtcatatcatgcctgattgccattttcattgatcccctgttcttcttcttactatcagtacgacaggatggcaactgcatagtgttaaattgggaaattgctacagcgcttgctgttgtgagaagtgtgactgatgctatttatttcctccacatgttgcttcagttcagattggcttatgttgcaccagagtcacgagtggtgggagctggagacttggttgatgagccaaaaaaagttgctatccattatcttcgtggttact

SEQ ID NO: 212728 - DNA, 4178 bp, Zea Mays
agcccattcgtgacgctaaaaaggcctagcccacccggctatcagccgcgtattcgcatctccccgtatcgctcgttcctctccggcaggactcgtgtttcagccaccggcggcggcggcaccctccacacctccggttatcatcaatctctgcgccgactaaggcactggcagcctgcggcttgcgtggcggcacctccagcatcccagggttgatgcaaatccagcatcatccttcaagatcgccccccactttgtccggtctttagatccgccattgagtcaagctgcggcgatcgcgtgcgagactgggacggcgatgctcctctgcatctccacctgccctgtcgaccgctagccgccgcctgtttcctccaattgctaagggcttaaaaagtcgaacacccaattgccaagggcttctgccccccagcggtgaaggggagtgagaagcaccgggaagatgacgagcgtgtacatcccggtgcaggggacagaggaggaggtgcaggtggcgctggaccagcttccgcacgacgcatccgatatcctcgacatcctcaaagccgaacaggcccctcttcacctctggctcatcatcgccagagaatacttcaagcaaggaaagatagagcagttccgtcagattctggaggaaggatctggccctgaaattgacgagtattatgctgatgtgaagtatgaacggatagcaatccttactgctttgggtgctttccatactttcttgggaaaggttgatagagcaccacagaaggaatcacattttaaagatgcaactcaatactataatagggcatcaaggatagatgaaactgaaccttctacatggattggaagaggtcaactctgtattgccaagggtgagttgcaaatggcgtctgactcgttcaagattgtgttggatgaagatgagaacaattttccagctctacttggtcaggcctctgtttactttttgatgggcgaagcagagcagcaacacaaaaaatcattggagcattacaggaactcattagatctctacaagaaagctcttcgggtctattgcaattgtcctgctgctgtaaggcttggtatagccttttgccgatacaaacttggacaagtggaaaaagctcgtcaagcttttcagcgagttttagagttggaccctcagaatgttgatgctctagtagcactggcaatcatggacttgcaaacaaatgaagctggtgggattcggcggggaatggagaaaatgaaaaaagcatttgaaatctatccttattatacattggcactcaaccaccttgcgaatcattatttctttaccggccaacattttgttgttgaacaattgactgagacggctctttcttcaagcaaccatggactactgaaatcacatgcttactacaacttagccagatcataccacagtaagggggacattgagactgctggacgatattacatggcatctgttaatgaaatcagtaaaccacaagactttgtgttaccatatattggacttggtcaaattcagttaaaatttggagacttcaaaagttcattaggtagctttgagaaagttttggaggtgcaccctgaaaattgtgaaagtttgaaggctattggtcacatacatgcaaaatctggggaaactgaaaaagctatagaaaccttcaagaaagttacccgtattgacccaaaagatcatcaggcatttgtggagcttggtgaattgttggtagaatctgactgggctgctgctatggaatacttgaagacagctcgaaatctcctcaagaaggctggggaggctgtccctgttgagttgctcaatggaattggacttcttcattttgagaagggagagtttgagatggcagaacagagttttaaggaagcactaggtgatggtctttgggtttcaattatggacgggaaagtaggcagttctatgatcaactggagtgtccagaacaaggatcagagcttctttcaccaacttgaaggtgtacctcttgaattacattcaaataaagtaaccacactgtttaattatgcaagattactggaagaactccatgattctgtcagagcaagcatcttttaccgttttataattttcaagcaatgaaaagtacctcctgtgacttttccgttgtgctctaaatcagttttgtcaataacagtaccctgactacatagatgcctatctgaggttagcggctattgcaaaacaaagaaacaatgttcaactgagcattgaactgataggtgatgctttaaagatagacgagaagaacccaaatgcactgtctatgcttgggagtcttgaactccagagcgatgaagcctggcttaccgcaaaggagcatttccgtaatgcaaaagaggccaccaagggagatacctactctttgcttcaattggggaactggaattactttgctgccaatcgtcctgagaaaaaagccccgaagattgaggctactcatagggagaaagccatggaactctatcagactcaagtactaaagcagcaccgcagtaatatgtttgctgcaaatggtattggaatcttatacgctgagaaggccaaatgggatgtcgctaaggagttgttcacacaggtgcatgaagctgcatcaggaagtatatttgtacacatgcctgatgtatggataaatctggctcatacatattttgctcaaggtcattttcaacaagcagttaaattgtatcaaaattgtttgcggaagttcttccacaatacagatgcaaccatcctattataccttgctcggacacactatgaggctgagcgatggcaagactgcaggaaaactttgcttagagctatacatttggctccatcaaattacttgttacggtttaatgtaggagtgtcaatgcagaaattctcagcttcaaccctgcaaaagacaaaacaaacagttgatgaggttcgcgccacagtcactgaacttcagaatgccattagagttttcagtctgttatctgttgcatcaacgtaccactcccatggttttgatgagaggaaaatagaaactcatgttgagtactgtaaacatttacttgatgctgctaaggttcatcgtgatgcagctgagcaagctgaacagcagaataagcaaaaaatggaagttgctcgtcagattgctttggcagaggaagctcgccgaagggcagaagagcagagaaaatttcagttagaaaggaggagggaagaggatgaactcaagcaagtaaaacaacaggaggaacacttccagcgtgtgaaggaacaatggaaaacatccagcaacacccctggcaagagaaaagatagatctaagactgaagatgaagaggtgggaaataaaaagcggaggaggaagggaattaggaggaaggatcaaaaaacaaagatgcagtatggggaagaggaagatgagtacaaagatgaaccagaagcagatgatgactatgcagacctggcgaggtataatggcgctgacaattcagagagagccccagatcaccttcttgcggctgctggccttgacgattctgatgccgaagatgacatgggtcatcctcaatctgcaatagaacggaagagacgagcttggtcagaatctgaagacgatgagccagtgaagaagccagcagcacaacctagcccgggcgctgatggtttgagtgaatgaaagaaaccgagatgatgttcttgcagtgaagattaacatgcatgggtctttgctttaggttagcatggtgttgaattggggagattcagaacttcactatacatagctgatagtcaaggactatgtatataccttgttgccaatcttgtttatcgcattagattatggagttgtttaatctgctggtttctgcaatataacatggaatccagtcctattagatggtgacttgtaggtgttttagttgggatgcaaagttttgcacgtcaagtttcagcagttagatttcccaatggacgtatcatgaattaatgatatcacattggccgatatatgtagagaaatgttgaacatgctagtcatctcagcaagaggacataaaactaagccaaaacaacaaacttaagagaaatgttgaacgggctagttatctcagcaagaggacataaaactaag

SEQ ID NO: 212729 - DNA, 4056 bp, Zea Mays
agcccattcgtgacgctaaaaaggcctagcccacccggctatcagccgcgtattcgcatctccccgtatcgctcgttcctctccggcaggactcgtgtttcagccaccggcggcggcggcaccctccacacctccggttatcatcaatctctgcgccgactaaggcactggcagcctgcggcttgcgtggcggcacctccagcatcccagggttgatgcaaatccagcatcatccttcaagatcgccccccactttgtccggtctttagatccgccattgagtcaagctgcggcgatcgcgtgcgagactgggacggcgatgctcctctgcatctccacctgccctgtcgaccgctagccgccgcctgtttcctccaattgctaagggcttaaaaagtcgaacacccaattgccaagggcttctgccccccagcggtgaaggggagtgagaagcaccgggaagatgacgagcgtgtacatcccggtgcaggggacagaggaggaggtgcaggtggcgctggaccagcttccgcacgacgcatccgatatcctcgacatcctcaaagccgaacaggcccctcttcacctctggctcatcatcgccagagaatacttcaagcaaggaaagatagagcagttccgtcagattctggaggaaggatctggccctgaaattgacgagtattatgctgatgtgaagtatgaacggatagcaatccttactgctttgggtgctttccatactttcttgggaaaggttgatagagcaccacagaaggaatcacattttaaagatgcaactcaatactataatagggcatcaaggatagatgaaactgaaccttctacatggattggaagaggtcaactctgtattgccaagggtgagttgcaaatggcgtctgactcgttcaagattgtgttggatgaagatgagaacaattttccagctctacttggtcaggcctctgtttactttttgatgggcgaagcagagcagcaacacaaaaaatcattggagcattacaggaactcattagatctctacaagaaagctcttcgggtctattgcaattgtcctgctgctgtaaggcttggtatagccttttgccgatacaaacttggacaagtggaaaaagctcgtcaagcttttcagcgagttttagagttggaccctcagaatgttgatgctctagtagcactggcaatcatggacttgcaaacaaatgaagctggtgggattcggcggggaatggagaaaatgaaaaaagcatttgaaatctatccttattatacattggcactcaaccaccttgcgaatcattatttctttaccggccaacattttgttgttgaacaattgactgagacggctctttcttcaagcaaccatggactactgaaatcacatgcttactacaacttagccagatcataccacagtaagggggacattgagactgctggacgatattacatggcatctgttaatgaaatcagtaaaccacaagactttgtgttaccatatattggacttggtcaaattcagttaaaatttggagacttcaaaagttcattaggtagctttgagaaagttttggaggtgcaccctgaaaattgtgaaagtttgaaggctattggtcacatacatgcaaaatctggggaaactgaaaaagctatagaaaccttcaagaaagttacccgtattgacccaaaagatcatcaggcatttgtggagcttggtgaattgttggtagaatctgactgggctgctgctatggaatacttgaagacagctcgaaatctcctcaagaaggctggggaggctgtccctgttgagttgctcaatggaattggacttcttcattttgagaagggagagtttgaggtttgcttacaattactgcacaatattacgaactatcatttataccggtcactacccttaaattacactttcagatggcagaacagagttttaaggaagcactaggtgatggtctttgggtttcaattatggacgggaaagtaggcagttctatgatcaactggagtgtccagaacaaggatcagagcttctttcaccaacttgaagatgcctatctgaggttagcggctattgcaaaacaaagaaacaatgttcaactgagcattgaactgataggtgatgctttaaagatagacgagaagaacccaaatgcactgtctatgcttgggagtcttgaactccagagcgatgaagcctggcttaccgcaaaggagcatttccgtaatgcaaaagaggccaccaagggagatacctactctttgcttcaattggggaactggaattactttgctgccaatcgtcctgagaaaaaagccccgaagattgaggctactcatagggagaaagccatggaactctatcagactcaagtactaaagcagcaccgcagtaatatgtttgctgcaaatggtattggaatcttatacgctgagaaggccaaatgggatgtcgctaaggagttgttcacacaggtgcatgaagctgcatcaggaagtatatttgtacacatgcctgatgtatggataaatctggctcatacatattttgctcaaggtcattttcaacaagcagttaaattgtatcaaaattgtttgcggaagttcttccacaatacagatgcaaccatcctattataccttgctcggacacactatgaggctgagcgatggcaagactgcaggaaaactttgcttagagctatacatttggctccatcaaattacttgttacggtttaatgtaggagtgtcaatgcagaaattctcagcttcaaccctgcaaaagacaaaacaaacagttgatgaggttcgcgccacagtcactgaacttcagaatgccattagagttttcagtctgttatctgttgcatcaacgtaccactcccatggttttgatgagaggaaaatagaaactcatgttgagtactgtaaacatttacttgatgctgctaaggttcatcgtgatgcagctgagcaagctgaacagcagaataagcaaaaaatggaagttgctcgtcagattgctttggcagaggaagctcgccgaagggcagaagagcagagaaaatttcagttagaaaggaggagggaagaggatgaactcaagcaagtaaaacaacaggaggaacacttccagcgtgtgaaggaacaatggaaaacatccagcaacacccctggcaagagaaaagatagatctaagactgaagatgaagaggtgggaaataaaaagcggaggaggaagggaattaggaggaaggatcaaaaaacaaagatgcagtatggggaagaggaagatgagtacaaagatgaaccagaagcagatgatgactatgcagacctggcgaggtataatggcgctgacaattcagagagagccccagatcaccttcttgcggctgctggccttgacgattctgatgccgaagatgacatgggtcatcctcaatctgcaatagaacggaagagacgagcttggtcagaatctgaagacgatgagccagtgaagaagccagcagcacaacctagcccgggcgctgatggtttgagtgaatgaaagaaaccgagatgatgttcttgcagtgaagattaacatgcatgggtctttgctttaggttagcatggtgttgaattggggagattcagaacttcactatacatagctgatagtcaaggactatgtatataccttgttgccaatcttgtttatcgcattagattatggagttgtttaatctgctggtttctgcaatataacatggaatccagtcctattagatggtgacttgtaggtgttttagttgggatgcaaagttttgcacgtcaagtttcagcagttagatttcccaatggacgtatcatgaattaatgatatcacattggccgatatatgtagagaaatgttgaacatgctagtcatctcagcaagaggacataaaactaagccaaaacaacaaacttaagagaaatgttgaacgggctagttatctcagcaagaggacataaaactaag

SEQ ID NO: 212730 - DNA, 3300 bp, Zea Mays
attttgtctactatcttccttcgagcatgtatgccctgctgcttaggtcaactctgtattgccaagggtgagttgcaaatggcgtctgactcgttcaagattgtgttggatgaagatgagaacaattttccagctctacttggtcaggcctctgtttactttttgatgggcgaagcagagcagcaacacaaaaaatcattggagcattacaggaactcattagatctctacaagaaagctcttcgggtctattgcaattgtcctgctgctgtaaggcttggtatagccttttgccgatacaaacttggacaagtggaaaaagctcgtcaagcttttcagcgagttttagagttggaccctcagaatgttgatgctctagtagcactggcaatcatggacttgcaaacaaatgaagctggtgggattcggcggggaatggagaaaatgaaaaaagcatttgaaatctatccttattatacattggcactcaaccaccttgcgaatcattatttctttaccggccaacattttgttgttgaacaattgactgagacggctctttcttcaagcaaccatggactactgaaatcacatgcttactacaacttagccagatcataccacagtaagggggacattgagactgctggacgatattacatggcatctgttaatgaaatcagtaaaccacaagactttgtgttaccatatattggacttggtcaaattcagttaaaatttggagacttcaaaagttcattaggtagctttgagaaagttttggaggtgcaccctgaaaattgtgaaagtttgaaggctattggtcacatacatgcaaaatctggggaaactgaaaaagctatagaaaccttcaagaaagttacccgtattgacccaaaagatcatcaggcatttgtggagcttggtgaattgttggtagaatctgactgggctgctgctatggaatacttgaagacagctcgaaatctcctcaagaaggctggggaggctgtccctgttgagttgctcaatggaattggacttcttcattttgagaagggagagtttgagatggcagaacagagttttaaggaagcactaggtgatggtctttgggtttcaattatggacgggaaagtaggcagttctatgatcaactggagtgtccagaacaaggatcagagcttctttcaccaacttgaaggtgtacctcttgaattacattcaaataaagtaaccacactgtttaattatgcaagattactggaagaactccatgattctgtcagagcaagcatcttttaccgttttataattttcaagtaccctgactacatagatgcctatctgaggttagcggctattgcaaaacaaagaaacaatgttcaactgagcattgaactgataggtgatgctttaaagatagacgagaagaacccaaatgcactgtctatgcttgggagtcttgaactccagagcgatgaagcctggcttaccgcaaaggagcatttccgtaatgcaaaagaggccaccaagggagatacctactctttgcttcaattggggaactggaattactttgctgccaatcgtcctgagaaaaaagccccgaagattgaggctactcatagggagaaagccatggaactctatcagactcaagtactaaagcagcaccgcagtaatatgtttgctgcaaatggtattggaatcttatacgctgagaaggccaaatgggatgtcgctaaggagttgttcacacaggtgcatgaagctgcatcaggaagtatatttgtacacatgcctgatgtatggataaatctggctcatacatattttgctcaaggtcattttcaacaagcagttaaattgtatcaaaattgtttgcggaagttcttccacaatacagatgcaaccatcctattataccttgctcggacacactatgaggctgagcgatggcaagactgcaggaaaactttgcttagagctatacatttggctccatcaaattacttgttacggtttaatgtaggagtgtcaatgcagaaattctcagcttcaaccctgcaaaagacaaaacaaacagttgatgaggttcgcgccacagtcactgaacttcagaatgccattagagttttcagtctgttatctgttgcatcaacgtaccactcccatggttttgatgagaggaaaatagaaactcatgttgagtactgtaaacatttacttgatgctgctaaggttcatcgtgatgcagctgagcaagctgaacagcagaataagcaaaaaatggaagttgctcgtcagattgctttggcagaggaagctcgccgaagggcagaagagcagagaaaatttcagttagaaaggaggagggaagaggatgaactcaagcaagtaaaacaacaggaggaacacttccagcgtgtgaaggaacaatggaaaacatccagcaacacccctggcaagagaaaagatagatctaagactgaagatgaagaggtgggaaataaaaagcggaggaggaagggaattaggaggaaggatcaaaaaacaaagatgcagtatggggaagaggaagatgagtacaaagatgaaccagaagcagatgatgactatgcagacctggcgaggtataatggcgctgacaattcagagagagccccagatcaccttcttgcggctgctggccttgacgattctgatgccgaagatgacatgggtcatcctcaatctgcaatagaacggaagagacgagcttggtcagaatctgaagacgatgagccagtgaagaagccagcagcacaacctagcccgggcgctgatggtttgagtgaatgaaagaaaccgagatgatgttcttgcagtgaagattaacatgcatgggtctttgctttaggttagcatggtgttgaattggggagattcagaacttcactatacatagctgatagtcaaggactatgtatataccttgttgccaatcttgtttatcgcattagattatggagttgtttaatctgctggtttctgcaatataacatggaatccagtcctattagatggtgacttgtaggtgttttagttgggatgcaaagttttgcacgtcaagtttcagcagttagatttcccaatggacgtatcatgaattaatgatatcacattggccgatatatgtagagaaatgttgaacatgctagtcatctcagcaagaggacataaaactaagccaaaacaacaaacttaagagaaatgttgaacgggctagttatctcagcaagaggacataaaactaag

SEQ ID NO: 212731 - DNA, 783 bp, Zea Mays
ggggtaatgaggaagggaattaggaggaaggatcaaaaaacaaagatgcagtatggggaagaggaagatgagtacaaagatgaaccagaagcagatgatgactatgcagacctggcgaggtataatggcgctgacaattcagagagagccccagatcaccttcttgcggctgctggccttgacgattctgatgccgaagatgacatgggtcatcctcaatctgcaatagaacggaagagacgagcttggtcagaatctgaagacgatgagccagtgaagaagccagcagcacaacctagcccgggcgctgatggtttgagtgaatgaaagaaaccgagatgatgttcttgcagtgaagattaacatgcatgggtctttgctttaggttagcatggtgttgaattggggagattcagaacttcactatacatagctgatagtcaaggactatgtatataccttgttgccaatcttgtttatcgcattagattatggagttgtttaatctgctggtttctgcaatataacatggaatccagtcctattagatggtgacttgtaggtgttttagttgggatgcaaagttttgcacgtcaagtttcagcagttagatttcccaatggacgtatcatgaattaatgatatcacattggccgatatatgtagagaaatgttgaacatgctagtcatctcagcaagaggacataaaactaagccaaaacaacaaacttaagagaaatgttgaacgggctagttatctcagcaagaggacataaaactaag

SEQ ID NO: 212732 - DNA, 2098 bp, Zea Mays
ctcagcttctccgtcgctcccgcaagagtttgcacaatgctgtaggttgtgagaaatttttcctttttcggcatttctccagtggttccggatcctttatcgccaaggaaaatggtgttggaaaaagaaccagaggtcccagattttcccagcattaccagctacaaaagagcttgacccattctcactaggagtaaatggaaactgcagttggagaagagcatccaacagccttaccccaagtgctgctagttggctcaatggttcattctcatgtggacaggtagtttcagcacggacattctcaaatagtgcagacctgcctccacatcaagaaattggaatgccttcactttcacctaccatgactgagggaaacattgccaagtggcttaagaaggaaggagataaggtctcccctggcgaggttctctgtgaggtggaaactgataaagcaactgtggagatggagtgcatggaagagggctatcttgctaagattattcatggagatggtgcaaaggagattaaagttggtgaggtcattgctataactgtggaagaagagggtgacattgagaagtttaaggattataagccgtcatcttcagctgaacctgtagctcctgctgaatcaaaggctcaaccagaaccttcacaaccaaaggtggaggaaaagaagcttacccaggctcctgaggttaaggccccaaagattgaagaagcttctcaatctggagatcgcatatttgccagccctcttgcccgtaaactggctgaagataacaatgtcccactatcaagtgtgaaaggtactggtcctgatgggcgtattttgaaggcagacattgaagattacttggccaagggtgggctgagggaggcttttgcagctccagggttaggttacgttgatattccaaatgcacagataagaaaggttaccgcaaaccgcttgctagcatctaaacagaccattcctcattactacttgacagtagatgcacgtgttgacaaacttgtcaagttgcgaggtgaactgaatccactgcaggatgcttctggtggaaagaaaatatctatcaatgatcttgtcatcaaggctgcagctttggctcttagaaaggtccctcagtgtaacagctcatggatgaatgattttattcgccaatatcacaatgtgaacatcaacgtggctgtgcagactgaacacggattgtttgttccagtaattagggatgcagacaagaagggacttggtacaattgctgaggaggtgaagcagttggctcaaaaagcaagagacaatagcttaaaaccagcagattatgagggtggcaccttcacgatatcaaacttgggaggtcccttcggaatcaaacaattctgtgccatcataaatcctcctcagtcagcaattttggctattggttctgccgagaagaggtgatacctggttccgccgatggtctgtatgagtttggttcgttcatgtcagccacactgagctgtgaccacagggttatagatggtgcaatcggtgcggaatttctgaaagcattcaagggctacatcgagaacccgacttcgatgctgctgtgaagttaggatcgatgacctaacacaattcttgtcaagttgtttaaataaccaggccacccaaaggtggcgtctccaaagttccaaaccaatagcacagagccgttatgatattcccagtgttaattaggatcaacgtatagaggcctgaagtcatttttgggattgttctcacgggcaattgatgggaataaatatgaaagcagccaacatgggaaataacttttgattttttttctttggaacatcgctatgcgatttaaaaaaattgtgtaaatctgttgagcttctccacagtaagcgtgatttgatgcgttgatgatatcttgataagagtggtaatcatggattgggttaatatgttatgatgcatggtctaataccatcaaagggcctgcctaatgacagcgcctgggctgacagattcataggaaaaatttattaagtttgctgaaatataatcaaaactgctgtaatggctgcttttgcggctattccg

SEQ ID NO: 212733 - DNA, 727 bp, Zea Mays
cggggatagatctgagcaagatgtcgagactagtgggtgaaatagtacggaatggacggcgatgtctccatccaaggcgacctgtacagctatggcgtcctcctgctcgagatgttcacggggaagcggccgacggatgcctcgttccagggaggccggactctgcagagctacgtcgcgtcctgctacccggacaaggtactggaggtagccgaccctggcctacggcatcagctgggcaacgggtgtttgagcggaggggacgtttgttgcgacgagatcgacgccgaaaagctgcgcaggtgcatggcgtcggtatttcgagtcggcttgcaatgctcccaggaaccacccagagcgagaatgcatgtcgggactgccatcaaagaactcgaggcggtcaaggatgccctgctaaacgactgagtctggatagaatctctcggcaacagaaacacaataaaacctgacagaaaaaaattgacggttagtgaataagttttagggacaacatcttcatttcttctaaagcggtagcaaacatattgttttcagattatctgctttgacttcggcaacgtgcttcgtctgagcgcttgaactgaatcttcttccactttcctatttacctgtattgatacatataaattagttgctcctgaaatagattgtgaaatggctaataccagttagttttgaggaccttcgataaagacattccttcaac

SEQ ID NO: 212734 - DNA, 2040 bp, Zea Mays
cgatctctcccatcccaaactcccaacgtcctcccctagcacggctttccacggccgtgtccgtgctggtgctgtgcctgcataaaagccacggccagggcagtgttaaggcgtcggagggcgcgaggggaggccgggagggacagccagcagccaagccatggacctctgccccccgcgcctgcaataataccacccctcgccgacgccgccaccatgggcaagaaggcgtggctcaccgccgtcaagcgcgccttccgctcgccctctaaggacgacagcagcagccccgccaggaaggcgtcgcgcctccgcgaggacgccgacggcgaagacgacaaggggaagcgggagcggcggagatggctgttccggaggtcctcgtccccgtcgccggccccggcaccacccgcgccggcccccgcggccgtgacggaggagcagcggcacgccatcgcgctggccgtggcgaccgcggccacggccgaggcggcggtggccacggcgcaggcggcagccgaggtggtccgcctcacgcgccccggcggccacgccgccgcccccagcttcgcgcgccgcgaccaccacgccgccgtcgccatccagaccgccttccgcggctacctcgcccgccgcgcgctgcgcgcgctcaggggcctcgtcaagctgcaggcgctggtgcgcgtgcaggcccgtgtccgcgaccggcgcatgcgcctctcccaggaatccgtgctctccatgtccggcggcggcggcggcgccggcgccgcgccgtgcggcagcagtaagtcgtcgtacagcgtcgacacgtccgccttttgggaccccaagtacgcccacgactacgccgaccgtcgctccgttgagcggtcgcgcgacggcagcagcttcgccgccgacgactgggacgaccggccgcggacgatagaggagatccaggctatgctgcagacgagaaaagacgcggcgctcaagcgtgagagggcgctctcctacgccttctcacaccagattcggaggaacccagcggcgccgtcggcggacatggacgtggacgtggacgtggacgggcagccgcggtgggcggagcggtggatggcgtcgcgcgcgtcgttcgacaccagccgcagcagcgtacgcggggccgcggcggcggcgcccgggcgcgcgtccatggagcagcaccgcgagccggtgaagacgctggagatggacacggcgaggcccttctcgtactcgacgccgcggcgtcacgcgggggcgtcgtcgccgatgcaccgcgcgcagcagaaccagcatcatccggcggtggccacgccgtcgcctgtgaaggcgcggccgccgatccaggtgcggtcggcgagcccgcgcgtggaccaccaccaccgcgggactggcggcggtggcgggagctacacgccgagcctgctgcactcgcagcggcacgcggcggcggtgcccaactacatggcggcgacggagtcggccaaggcgcgcgtgcggtcgcagagcgcgccgcggcagcgccccgcgacgccggagcgggagcgcgaccgcggcgccaagaagcggctgtcgttcccggcgcagctgcagcaccaggtgctggcggcggagtacgcgcagagcctgcgcagcccgagcttcaagagcgcggcggggcggttctcgtcagagcagcggtccaccgtgtcgtcgtcgtgcgcggacagcctcggcggcggctgcggcggggacgtggggtcgccgtcgtcgtccgccgcggacctccggcgctggctccgctgagtagagctagagagtagtggcgagtggctcgtcacgtcatcagacacggccacgtgctagctgtatttcttcttttcttctttctctaggtgtaattcatggcagcttttctctattttgtattgagccgacggattggagtttggagcgtgtgctgctgcctgctggtgcatgcgcgtggtgtgtccagtgtcccaactcccaatcgtgagcggccagctccaggtcgcaggcaacgcagggcaaaag

SEQ ID NO: 212735 - DNA, 1871 bp, Zea Mays
caacagcccaacttctcgtcgtgctgttcccatctttcctttcctcttcccttccccgtcgatctcgtcggcgacgccactacctcgccgtccggtcccaccacccgcctccgactcctgcgacccagccacggatcccgaggatacgggccgagtccggcgatgggggtggtggtagagcgggaggagtgggcactcagccccttcgcctacccgctcctctccgccgccgccctcgccgcggtgctcctcctcccttacctttccccgaggactgcggcgcacgccaccggaccctcgtcccccttcgacgtgggagccgcacccttcctccggttccgccgcgccttcctcgtcctcttctccctcgcgtccgtggttgaaggtatccattccgtgtttggggaggatgagttcgtgcggtgtgggcttggcagagagcagacgaccgcgcgccttgcctctaccactgcagctgcgctgttccccggtgccatttctggcgtcatctccgacaaaataggaccacgaagggcttgcatattgtattgggtacttcagcttgcagtaggtgttgtgaagagtttcagtgcgcttcgctgttcatggatcaacaatttcattctggcttttgcctcttcagtgttctctttctgttttgagacgtggcttgtgctggagcatgagaagaccagaagcaagatctgctgtttgataccttctggctgatgacattctttgaatcggtgtcccttgtcggaagtcaagaaatcacaaatgtattggttagtgatgatgacagtagattcttgcttccctatgcatttgcagccacactatcggtagtgggcattctgtatatcagaaatgcatcaagtacatgtcagcatgcatctgccattgggagctaccaaaaatcatttcttgctcatgtcctcagagacaaaagagtactgatcctggtcttagctcaagcaagcatccattttgctgtctcagccttttggtttctctgggcaccaaccatagtggctgacggaaggtatgctcaactgtcagtaatctacccctgtttcttggcatcaaggatgcttggaagtgctggttttccatggttttacggagccatagcccccttccggaacgaggacagcttgacaatagcttacgttggtgctggactcgctttgtcgattgtggcttatgattaccaggagattgcaccactggtgatagtgttctgcatcttccatgcctgtgtgggcttcattttgccgtcactggccagattgcgaacaatgtacctgccaaatgagctgcgagggggcatgatgagcttttcaatgtcactggcaaatgccgccaccttcgttttcttgatacagggcagcgcccaccatcgacacgttgcaaactcaaccatcctgagccttgcgtcctatggcctgttaggagctgggggctgcgtccatatgttgaggaggtggaggaagcacactcggctgaatgcccgtagtctgtaggagctggaggcacccaatgaatgctatacacactgcagggtgagcttgagagcggtttctgtagcatgctagtatctcacgttttgtttatctgactttttctggaaatatcaggaggtaggtgtaggatactacttttgttgttgttcaaagaaattgttgaaattgaaggttgacaaaaaatctgtgtacatgcgtcggggccatcaaactaacgtctgactttgatttttagcaattaaactcgaaagccaggaatctgtgtatgtatgtttggtttgtagtttttttttcaagtgttcgtttcatacattgtcttgatagtataaaaatcgctcgtaccataca

SEQ ID NO: 212736 - DNA, 2426 bp, Zea Mays
cttaaccatcacctcgggaagacttccgcctcgcccgagcagggctctgacctcaatatccgcagcgaaggactcccaacgtcaccctgcacagggacgctgacgcatcccgtaagcaggctttttacccataccgaagccctgttacaacaactacggcatggacatcccctcccctgggggctcgggcgtacagcccacccctcggcctcggctctcagcaggaaaacaacaagctcaagtcaacaacgcagcgcaaggtcatgtcacccacaggacgccaagacatctcccctgggaatgcgacgcccctcatctcaaacaacgtacatctcctaggtgtataaatagggtagtcgtagctcctccaaggggcagacgaacacttggtagttttcctccagtctttcggtattggcacttgcctcaatcagttctagggacttagagacttcccctctcccgtcgtgcttgtattccctattgcaggcacctcgggtgcgagtaatataagcttcatcccccctctgctggaagtagggcattgcattgccggaaccaggataaatcgcttgtgtcaactcgcacaccatctagattctgggtacgcagcatcattttactagttggttaggaccgttagtccgaacaccgacaaattgattgaccatagcctacaaatccattcacgggcttgtagccttgtactggagtaggattaccattttcattttgtgacggggaatgattaataagcaacatctgcacctgtgtttctgaaaccaccaggggtgtaaatttctggttcttataccacataccacctggtttactagctattaacttttcatgtaatatggcctttgtgcctccaagacaagtagacaactatgggcaccaaaaactgtgtctgcttacaacataaagatgctgaatattagtttagctaatgcgttgatactttgtagttctatgcattacttgttagttgctaaccttgacttgtgcatcttgatgaagtttggatgatatatttggctggtaggaatttcagagtataatctgaaccttgaggaccacgaagggcttgcatattgtattgggtacttcagcttgcagtaggtgttgtgaagagtttcagtgcgcttcgctgttcatggatcaacaatttcattctggcttttgcctcttcagtgttctctttctgttttgagacgtggcttgtgctggagcatgagaagcaagaccagaagcaagatctgctgtttgataccttctggctgatgacattctttgaatcggtgtcccttgtcggaagtcaagaaatcacaaatgtattggttagtgatgatgacagtagattcttgcttccctatgcatttgcagccacactatcggtagtgggcattctgtatatcagaaatgcatcaagtacatgtcagcatgcatctgccattgggagctaccaaaaatcatttcttgctcatgtcctcagagacaaaagagtactgatcctggtcttagctcaagcaagcatccattttgctgtctcagccttttggtttctctgggcaccaaccatagtggctgacggaaggtatgctcaactgtcagtaatctacccctgtttcttggcatcaaggatgcttggaagtgctggttttccatggttttacggagccatagcccccttccggaacgaggacagcttgacaatagcttacgttggtgctggactcgctttgtcgattgtggcttatgattaccaggagattgcaccactggtgatagtgttctgcatcttccatgcctgtgtgggcttcattttgccgtcactggccagattgcgaacaatgtacctgccaaatgagctgcgagggggcatgatgagcttttcaatgtcactggcaaatgccgccaccttcgttttcttgatacagggcagcgcccaccatcgacacgttgcaaactcaaccatcctgagccttgcgtcctatggcctgttaggagctgggggctgcgtccatatgttgaggaggtggaggaagcacactcggctgaatgcccgtagtctgtaggagctggaggcacccaatgaatgctatacacactgcagggtgagcttgagagcggtttctgtagcatgctagtatctcacgttttgtttatctgactttttctggaaatatcaggaggtaggtgtaggatactacttttgttgttgttcaaagaaattgttgaaattgaaggttgacaaaaaatctgtgtacatgcgtcggggccatcaaactaacgtctgactttgatttttagcaattaaactcgaaagccaggaatctgtgtatgtatgtttggtttgtagtttttttttcaagtgttcgtttcatacattgtcttgatagtataaaaatcgctcgtaccataca

SEQ ID NO: 212737 - DNA, 3066 bp, Zea Mays
tttcctcctctcgtcgtccagggaaggatgcaggatgctctccgtccctcccccaccacctgaggaggaaagcaagaaatttttaaccaaccaaacgcaccaccgcgtgcctccgtgattcccagcccaattaacccggaacagaagagaagagctcgccacgccaccggtgggatcgccggacacctacgcgggcctggccttgggatccccggaacgcggggcgtgggaaaccgaggaggagcatgtcgcgggtggcgtcgctgtcgccgtccttgtcgggcgacgaggtggaggtggaggaggaagaggaggacgagggcgtcgacggctaccgcaagggcggctaccacgccgtccgccccggggaccagttcgccgccggccgctacgtcgcccagcggaagctcggctggggcaacttctccaccgtctggctcgccttcgacgtccagtcacagagatacgtggccctgaagatccaaaagagtgcgcctgagtttgcgcaagctgctcttcatgaaatcgagttcctgtcagagatcaccaagaaggacccattgaactgcaaatgcattattcagctgatagatcacttcaagcacacggggcctaacggacagcatatctgcctcgtctttgagttactgggagatagcttgcttaagctggtacagtacaaccggtacaaaggcatcgggcttgatagggtgaggcaaatatgcaagtcgatcttggtaggtcttgactacttgcacaatgagcttggcatcatccactcagatttgaagctcgagaaccttctccttctctcgaccattgatccctccaaggaccccattcgctctggcctcaaaccttgccttgagaggcctgagggaaaccctaacggtgaagctgggattaatgcgattgagaataagctaaagatgagagcaaggagggtgcttgcaaagcttgctgagaaaagaaaatcagctgtggaatcttcacgctcagaaaggagcttgggtggaattgatcttacatgcaagattgtagactttgggaatgcttgctgggccgacaaacaatttacagattttattcagacaaggcagtaccgggcaccagaggtcattctaggtgcaggatactcgttttctgttgacatgtggtcatttgcgtgtatcgcttttgagctcgcaaccggagaaatgctatttacacccaaggaaggccatggatacagtgaagatgaggatcacttggctttaatgatggaactacttggcaaggtgccgaagaagattgcaaccacgggaacacgatcaaaggaatattttgaccgccatggagatctgaagcggataagaaggctgaaattatcatccattgaacgtgtccttgttgacaaatacaaaatttctgaatctgatgcccgggaatttgccaattttctttgcccattacttgactttgcaccagagaagaggccaacagctttaggttgcctaaagcatccatggcttcattataacgaggataaaacttgtcagtctcttaacaataatgatgccaagaacattgacctggcccaaagcccagggagcatcaccagcggatattgtacaaatattgatttgacgagcaaaaaaggcggacccactggaacttgtgataagactgctgatgcaaaatataacaccagaagcattaccagcaatgctaccatgaacactgatgtacagcccaatattggaagcattgctaacggacttgccaaaaatgttgatgtaaatccgaacattggatccatcactaatagagatgccaagagttctgatatgaagccccacattggaagcatcaccatcagtaacgccaaaagctctaatgtaaagctggatacaggtaacatcactgatagaaatgccaaaactgtcgatataaagcccaactctgacatctctagcagagatgacaagagcagtaatgtggacaccaccacttccagtgttatcaacaaagatgcgaagcgcagcattagaagtgtcgttaattcttatatcaagaatttcgatgcaaagtgcaacactggaagcactgctaacagtgatgctagggacccatcagatacgaaatccagcactaaaattgttagtagtgctgataatgctaagtgtgtggacataaaaccgatcagtggaagtgataagagcaatgacaccagtgataagagcaatgacaccgtcgatgctaatgtgaaatccaactctggaattgttgcaaacagtgatgctagcaacaccgatgtacagactaacactggaagtgtcgacagcagcgatgattacagcattgactcaaaaccaaacattggccgggttgctgcaagcatacagaggttggagagcagtatggggaaatacagggccgacctttctcaagattgaggatctggcaggtaccagctggcgttattgtatatctctattcctgctgactgtacaaagttttgtatttgcctacagaacttacacggagtgggtaaacgtggaatctctttgggaatatacttgtacatgcagtagtaacagaagattgctgttcctagtatggtggatgcactggaaggggaagaattatactctgaccagtcacacgtcatctctcttgattatgttcatattctgccctcagtgaaaaaaaagagatttctttatgtcatttaacaaggatcaccatttatctgagcaagggtgacatttttgtttggtttatggtgtgaggtttgcttgtaaaaagcgggacatgtgttgtataaaactattctttgttcattttgtagtgaaacaatcatatagatgaaatgtttttttttcactttaggctggttcagttaggagtggatcggaggggattaagggctactttggtgactagtgaaataaaggggatccctaggggaggaatcccttgctattccctaggatccctttcatttctttaatcaccaaagcagccttgaaaaaaattaaatcccttcctattcaaaattgaataggaatagttttaattctgttc

SEQ ID NO: 212738 - DNA, 955 bp, Zea Mays
gtcatccagcagccccattgcagtttcgagttcctggctggtggcgtggcacctcgttccctccgatcgagtccgcgactaagatacaccccgactcgctagcgagcaggcaggcagaatggagcgccacgccgagaagccgctcctcgtgctgccctcctgcctcctcttccttgtcctcctcctcgccccgctcgtctccgccgtccccacgccaagaagcctgcgcctggggagccaccagcagcacccgccgccggctctgaagctcagttactctcaggtactggcaattggctgtttccgtcaggtctctcccgcctgctgccgtgtttctccctcttgatttggcacaactgttagcgaatatacgtacagaggacacgacggcgatcgcggcggcgatgatgaaaaacacgggcaggccgacggcgagggtggacgtggaggtgaacgactaccagccgtccggccccaacaaccgccacgacccacccaagggtcccggaagaccttgaacgggggccggctcagctggacgacgacccggccaatcaataatccaactccgtcgtcgtcgtcgtcacaccggtagtacaaagtgcgtcgcttgtgctagctcctctactctagttctagtagaaattaaggtcgtcgaaacaaagtcacctagctgcgtttgtatatatatacaccggccgcgcgtgtgtatggctgtgtcctgtgtgcaaggcacatcggtcatcggtgcagtgggttgtgttgttcttaggctggttaattggttgctgttcgtcggaaagaactccactgcatgcagatcgatttgcatctcctgcagcaggtgccggtacagtgtaccagcagattgagattgtccagcttgttagttctatgctcccgatcttgatatacttctatatatcatactagtatatccatcagcaaaagcagc

SEQ ID NO: 212739 - DNA, 1990 bp, Zea Mays
tatacatactttaatagagtaaatacttatcagttatcggatcacggatacccatttctagtccccatcagaaaaaagctgaaacaagactcggcttccacctgtcaatcaaaaaaaaaaaactccacattggacagcatccaggccccactgtccaggcacccggatccagccctctctcccttctccacttccgtttccggattcttgcgtttccaagtccgatacaaaccagcgccgcgccgcgcgagcacgtcgggcgacgttgcggcaggcgagatccgagaacactcctccctcgcgcccccgcacccgcatggccgccgctggccgcagatagggaggcgcaggcgggggcgtgcagatccagatccggtgggcggcgaggacgagatcgccccctaccaccatggcgggcgccgtgtcggcgctcttcctgctggacattaagggccgcgtcctcgtctggcgcgactatcgtggtgatgtctccgcgctccaggccgagcgcttcttcaccaagctcctcgacaaggagggcgactcggaagtccactcgcctgtggtctacgacgacgccggcgtcacgtacatgttcatccagcacaacaatgtcttcctcctcaccgctgctcgccagaactgcaacgcggccagcatcctcctcttcctccaccgtgtcgtagatgtgtttaagcactacttcgaggaactggaagaggagtcgctcagagataacttcgtcgttgtgtatgagttgctggatgagatgatggatttcgggtacccacaatacacggaggcgaagatcctaagtgagttcatcaagacagatgcgtacaggatggaggtcacacagcgtccacccatggccgtgacaaatgctgtgtcatggaggagcgaggggatccgttacaagaagaatgaagtcttcttggatgtagtagagagtgttaacattctagttaacagcaatgggcagattgtgagatcagatgtggttggggcactgaagatgcgaacatatttgagtggaatgcctgagtgcaaactcggcttgaatgatagggttcttttggaggctcaaggcagagcaactaaaggaaaagcgatagaccttgatgatatcaaatttcatcagtgtgtacgtttagctagattcgagaatgatagaactatatcgttcatacctcctgatggatcttttgatctaatgacatacaggcttagcactcaggtaaaacctcttatctgggtcgaagcacagattgagaaacattctagaagccgtatagaactcatggtgaaggcaaggagtcagttcaaggaaagaagcacagcaacaaatgttgaaattgaagtgcctgttccttcagatgccacaaacccaaatataagaacttcaatgggttctgctgcatatgctcctgagagagatgcaatggtctggaaagtaaaatcattccctggtggcaaggaatacatgtgcagagcagaatttagtcttcctagcataacagcggaagaaggggccccagaaaagaaggcaccaatacgagtgaaatttgagataccatatttcaccgtatcaggtattcaggtccgttatctgaagataattgaaaagagtggttaccaggcactcccctgggttagatatatcacgatggctggcgaatatgagctgagacttatatgagttttctcttttctggctgatggaagacatttatgaagctgcaagatacatatttgctcgagacagcaaccgtatgacatttgaatgttagcctggacgtcttctgccgaccacacaaggttttccccctgggggcttgttcatcttgttaggctcaccttaccttggttattgttgaaacaattgtgccctttactgtaaatgtcgtcgtcttgtatccaggcaaaagaaaggaaacctaccgagacctattatgacatcaataatttcaacttttttttgtttcaatta

SEQ ID NO: 212740 - DNA, 555 bp, Zea Mays
ctgaggcaacctcctgcatactctacagtgtgtatgtgactaggaaaacagagatggcatgtttcaagatgttgaagaaattattagaaggcaaataaagatgtcagtacttccaagtgttcaacctttccatgccattgcttatcctattgatccattgcttgctttggaaataagcagtaaatatgcggcccactgttccttgattgcctctccttttgggctgccgccttttgtgcatccacctcctgttcctgtaaaagcagagggtaaacactgccgattaaagtaggatatgtgagtagtgattttggaaatcaccccctttcccatctcatgagatcagtatttggaatgcatgatcgtgccaatatcgaggtcttttgctatgcacacagtcaaaacgatggtactgagtggaggcagcgtattcagtctgaggcagaacattttgtcgatgtttctgtcatgacttccgataatatcgccaagcttatcaatcaagacaaaatacagattttgataaatcttaatggctacacaaaggattccggc

SEQ ID NO: 212741 - DNA, 3252 bp, Zea Mays
gttgaatccgaaacagacgagacggatgaagtgactgcaggggcaaatggggctgactgcagacgatttccgcttcgggaaatcctcctcccatgtcccgtttcctatccccttcttcgccaagcaatcctctccccctttcagaaaaaaaagtaatcctctccggagtccaagctccgaccagatccggacccccccccccccctccgaacaagctcgggcatgcccagcagctgatgaggtcgctccgcggggtcctcatcccgctcgtcctcctcgcggggctcgccttccgcgtggacgacggcggcgccgcgctcctcccgctcccgccacccgcgcttcccgcttccccgtcccgcctcgcgctccccggaggcactccgaaggatgatggggcggcggcttcgcgctccacggaggtcgtcacggcgggggtgcgctccaccgagatcgtcgccccagtggggcccaagaagcagagcctccgggagctccttgtccggccgcagcctgcacgtcacgagccgtctagcttggttagcggcgaggcgaaagccgaaaccagatctgtgctccagttttacgacaatggcacgattcagcttgtggacaagctgtctcaatctcctctgtgggagattgccacagggcctccactctcagaccatattactaccactgagtctggtccgaattacctcatttatcctttcaatgggaacgagaacatgaatgggaatagtactgaactttgggaggtttataatgggaacagcgtgaggctcccatggaaattggaggaattcgttgccaggagcccatatattcgggattctgttgttactatcggatcaaaagtttcaactgtttttgtagttgatgctgatagtggtgagattatttacaggcatagtatcccatctgcgttaaaggaattggaaggaccaggggttgaaggagcaccatccaagctaaatgtccgtactagtgatgacagtgataatatcatagtgcttgtgagaactgactattctctcagtgcatcagaccttggcaatcatttatttaactggacaagaacttctttcactgcaaactactatgtgaaatacaagcaccctgacatgcttgatcagtcatcttgcctgcaaggagacattccatgcattagaactgagggtttgccacttgctttacctgatttaaattcagctaatgtaattgtcttgaaagatggtaccccttttgtttctatgcatggttctgatgctttggaaccagttcaaaccccaaggaagctaccaaacactgctgggaagtcaaatatcctattggatgattctcaaaatcaaactcatgatgttgctcgatctcatgccatctctgccgatcctgaagctaccctaaaccccactaggaacacttctggatggctattccctttgtttcccatatttttggtcactggttatctgttgagcttgatatctgcaagcaagtcatgcaggcagtttatgattcaacttattgagccattcacgcacaacaagaaaacggtggacattagaggcaggtcggagggaactcccaaaaaaagaaaaacacggaagaaggatggacttgtcaatagctctgagaccttgacagcatctgacaaggagtgcagtgatactggtgggtcaactgaggcaccaatgaaaaattctgcgctaacagatgcccttggtggtcgtcagattggtaaggtatatgtctccaataaagaaattggcagagggagcaatggcacaattgtttttgaaggatcttatgatggtcgtcaagttgccgtgaaacgtctgctgcgttcccacaatgacatagccgaaaaggagactcgaaatcttattatatcggatcatgatcctaatattgttagactctacggttgtgaccatgacagtgattttgtttatatctcccttgagaggtgccactgcagcttggctgacctaatccaaaaacagtcatatttgtcttctggagagtctatttctaacaatgaggtcagtatgagcatcaactcaaagatttcaaatgttaagggaatagacgtggagttgtggacgcaggatgggcttccttcagcacaactcctgaagctgatgagagatgtggttgctggccttgtgcatttgcataacttgggaattattcatcgtgatttgaagcctcagaatgtcttaataagcgcagaaggacctattagagcaaagctttctgatatgggtatcagtaagcacctgcaagatgacatgacttctgttagccatcatggtacaggaattggaagctctggctggcaagcacccgaacagcttcgtcatggtcgtcaaactcgtgcaatggatctttttagtttgggctgccttattttctattgtatcactaaaggcaagcatccgtttggtgaatactatgaacgggatacaaacattgtaaacaatcgctttgatctctttgtggtggactacataccagaagcagtacatcttatatctcaactgttacaaccaaacccagagacaagggataccagtgacagaattgagaaaaccagtgaaacggacctcataaacgcactggaaagcataggaccagtggcgtttggtgggaaatggggagagaaactggatgctgctttagttacagacatgggtcgttatagaaaatataactttgagtctactcgtgatcttctgaggtatatcagaaataaatcgggtcattacagagaactttcaaatgatctcaagggcatacttgggtcattgccagagggatttgatcactattttgctagccgatttccaaagttgctaattgaggtgtacaaggtcttgtgggtgcactgcaaggacgaagaagctttcagtaaacatttcaatggaagctccttatagctggagaggattgccttttcctactgtaaatactaaccctgatgtagaagttgtatgtacatttgatatgtataccatattacccgttttatagaataaagagagctcagtctgtacattatgtagcatattactgtgttgcctataaatccaagctttactgttgaatggtgaacaatggtaacacaatctgctggatggaaaccagtggtatgtataatacccactttgtaagaaaagtctaaaaagaaaaattatattactttgtatctgtatgtgttatttatgtttatcatttcatgtgaac

SEQ ID NO: 212742 - DNA, 3546 bp, Zea Mays
gctctcctgagtggagactggagactggagttcacaactgttttcgctgtttctctctcccgtagcccagtttacctcgcctagggcgaccaccgccgccgccctacgccagctgcccaggtcttgggcggaccctttgccggcgacgagcacccaccacaccagatcaaactctagatattgccactctacgtcccagcatcctatgaccacatggtttagacagtgctgtccaggtggatgatgaattgtggtgcccaaacggaggcacgtggcacgcctcttgaagataggcactggttggaaacagattttgttggcgctccaagagttcatacttatgtactttcctttctcaaatcataacaaatcttaggcagttcaagcttagctgaatgtcaacttgcctccacgtgcaagatcccagaaacattgctatgtctcgtccgcttgattttgctgtgcttaaatacaaaaaccaaaagcttgcggaacaactggaagtccacaaatttgagttctgtgctcttgagagtagatttaatgatctaaaagagaaacaaaggacacataataagacacttgttctagtcaaaagttattgggagcgactcatagcagatctgggtatagtttctgtttgcaaaaatgaatcttcacgttcaagctgcagtacagggaacaacaatatacgaaaggaaacagactttttaaatggacttttggaggctggtgccacagaaagttcaggttctcccaattgccaactaggaaatgacgtctcttcagaacaatcaacaacaattgatattctgcagaagctattccttccatcaagtggtccatggcatgtgaataacgagtttgtttctgctgctctcatgaagttgccagaaaatgaacacagcaggcaattgcacaatgctaccagcgatgtgttatccaagcttcatgtggtgatgcgtacagtagataatcttcacttgaaacacaggcagttagcagcgaactatcaaaaacaaagagattcgagtgcctggaacagagctgaacagaaacgtctgaaagaggagttgactagtgttgttgccaagttggaaggaagcaaacaaaaactggcagtactgaaagcacagggagacaataaacaagcaacaccgatcctggttcctacgctgggaaacaaaaatatgactgcagaaaaggtgagagataaacaaacagaactgcaagatcttgaagctactcacaaggagttaatggaattgatttcaaagcgtctggaggaaattagaaggctgcatacagagagaattgaaattttgaacaagttagcaacttttcagaatatactaacggatttcaaaagcattcactcttccaaagcttttcaacttgtcaatgaccaacttcagaagtcacaagcagaactggatgatcaccaaacgttgttagagaaattacaggttgagatggatacctttgtttggcgagaaaggcaatttaatcaaaaagttgatttggctgaaatcccccagaaggtttctgcatactgtgtgtctagaattgctgaccttgaaaaggatgtccagaaactgtgtaatgaaaagaatatgcttgtgctgaaacttgaagaggcttcgagagaacctggtcggaaccaggttatctcagagtttaaagctctggtgtcatcactaccgagggaaatgggtgccgtgcaaagtgaactgtccaaacacaaggatgcttccttacagttgcattctttgcgagcagaagttcattcactttctagtatccaaaccagaaaggaacaagaaattgaagaaatgtcatttagatctgcccatgctggatctgatataagccaacttcaatctctggtccgtgagctgagggaaaatacacaggagcttaagctatttgtggagttgtataagcatgagtccactgattccagctgatggaatcgagagatagggaactcgctgaatgggctcgagttcacattctcaaatattctcttagtgaaagtaaattagagcaacgtgtaatttcagccaatgaagctgaagcaatctctcagcagaggttggcaactgctgaagctgagattgctgaattagggcagaagctagaaacttctaggagagatctagtgaaacaatctgatatactgaagtctaaacatgaagaatgtgaagcgtatgttgtggagatcgagagcattggccatgcctatgaagatataatgtcacaaaatcaacaattgctacagcagattattgaaagagatgatcataataccaagcttttcatggagggtgttaaatcaaaacagtcacacgatgctttgcatttggaggtgcgctcgttgcaaagaaatttgcagcatgcaagtactttgatggatttgtgcaaccagaaaactatccgcctagaggaccagctaagaggttggtcagagcggttgaggagactgtcagaggatggaatgcagcagtctatttcattgggcaattatcaaaaaaagctgtctggtatgcatggagaagctccaaagctcaggcagtcaatggatgttctacaagcgaaggctgggagcaatcggctggaaattgctgagctgcttatagaactagagaatgagaggtttggtaaaaagagactagaggatgatcttgatctaatgtcaagtaaagctaattctctaagagagaagacagataattcagcagttcttcagaaacttctccatgaggccaaggagtacaggggaatattgaagtgtggtatttgtcatgataggcagaaagaggttgtgattgccaaatgctaccatctcttctgcagtcagtgcatacagaagccacttgggagccgtcagaagaggtgtccatcttgtggactaagcttcggtgttaatgatgtgaaacctatctacatatgaaacagaaggttggcgcctgtgtcgcagcaccaaaacaaaactgcttggcgcttactaatttccggtatatggtaggcggccatggtaattcagtcggtgatgtagcataagattatgtagcatttaagttgctacatgtgattgctggtacccgctggcatatatgatgctggtgttacctcaagcgccttttgtaaagtctgcttgccttgcccaatctggtagaatagcctgacatcgtcaaccattagttccttttaggagaaaaaaatatccaacaaatgaggattgatgcttcctgcaatagtgagcaatgtacaatatatagctttagtcagtttcattgttgtagctgacagtaagaatgtagttttcttttctttttaatataccggttatccagtttgtatgtttctggagtttgccaattctgtttatcaaaaaaaggagatttagtcatttctaaccatttttttcttgtcacgatatccaaaattaccacattatatttaatatagaagatatagttatttcagtatatagtatcatatcttgtttcatcattcaacaaaacaattaaatgctagatgtat

SEQ ID NO: 212743 - DNA, 1255 bp, Zea Mays
gcaaaggtctcggctgtttaaagcttttcatggagggtgttaaatcaaaacagtcacacgatgctttgcatttggaggtgcgctcgttgcaaagaaatttgcagcatgcaagtactttgatggatttgtgcaaccagaaaactatccgcctagaggaccagctaagaggttggtcagagcggttgaggagactgtcagaggatggaatgcagcagtctatttcattgggcaattatcaaaaaaagctgtctggtatgcatggagaagctccaaagctcaggcagtcaatggatgttctacaagcgaaggctgggagcaatcggctggaaattgctgagctgcttatagaactagagaatgagaggtttggtaaaaagagactagaggatgatcttgatctaatgtcaagtaaagctaattctctaagagagaagacagataattcagcagttcttcagaaacttctccatgaggccaaggagtacaggggaatattgaagtgtggtatttgtcatgataggcagaaagaggttgtgattgccaaatgctaccatctcttctgcagtcagtgcatacagaagccacttgggagccgtcagaagaggtgtccatcttgtggactaagcttcggtgttaatgatgtgaaacctatctacatatgaaacagaaggttggcgcctgtgtcgcagcaccaaaacaaaactgcttggcgcttactaatttccggtatatggtaggcggccatggtaattcagtcggtgatgtagcataagattatgtagcatttaagttgctacatgtgattgctggtacccgctggcatatatgatgctggtgttacctcaagcgccttttgtaaagtctgcttgccttgcccaatctggtagaatagcctgacatcgtcaaccattagttccttttaggagaaaaaaatatccaacaaatgaggattgatgcttcctgcaatagtgagcaatgtacaatatatagctttagtcagtttcattgttgtagctgacagtaagaatgtagttttcttttctttttaatataccggttatccagtttgtatgtttctggagtttgccaattctgtttatcaaaaaaaggagatttagtcatttctaaccatttttttcttgtcacgatatccaaaattaccacattatatttaatatagaagatatagttatttcagtatatagtatcatatcttgtttcatcattcaacaaaacaattaaatgctagatgtat

SEQ ID NO: 212744 - DNA, 631 bp, Zea Mays
tttggtcaggtctcagtcatacagattgcatcagataagatagctagccttcatttaaaaaaaactgtatgaagatgacccaaaagcattggatagctgcttgaggcatattatgtgtccatctaagatactaaagctggcgaaggctatgatattcaatgtgatctcatcaacaaagcaatcgtatggagaattggaatgttttcagtcctattaaatgccacttgatttgcagaagctgttcaaaggggttactggtggcctctctggattgtcaaagaatgtcacgtgccatgaaacactgccaagaaatattaggagctggtttgaaaaaggcccaacgtaatagcaactgggagcaacagccactaacccaaaatcagtgtcgccttccatcaatcgtggcatcaccgaagccagaaatatagaagacgcggaaaagtggagcgtcagggaatcttaagaaaggagaggtcaccgttccttctctcgtgcctttctttttcgttacttctaattttctttccctgtctttgcatgtaagtatcgaaccttttgttgttgcctgttgcaatcttgcatgatcatattcgctcctggttgcaagtatcgagtgttggtcggggcagcc

SEQ ID NO: 212745 - DNA, 570 bp, Zea Mays
cactgccactgccaccgtcgcgtcgtctcagcagcacatgagcgcgcataccttctacgccatgttcaccgtctggggagtctgcttcttcgcgtccatgaaggatcccttctacgacagcgagacgtacaggagccagggtggcgacgggaccgtgcactggtactacgacaggcaagaggacctggaggcgtctgcgagggaggagctgctgcgggaggagctgctcgaggagattgagcagagggttgggggcctcagggagctggaggaagcgagcaaggaggagcagctcacaaagtgatcacgcgggcgaatgggctactcatcagctctctatctgagcttcgttagcaaataagttcagacttctctttactgccatgctcaagtctgtatatggccaaaacccaaaacgattgatcaactgcgctactgcagtgcaatagcaggatacgtatagttttcttttcaagggaaacaggaggggagtgcagtgcacccccgcccatactgcatgttattaataaaagaaagttatttacagaatcaggacaggctctacaggat

SEQ ID NO: 212746 - DNA, 1383 bp, Zea Mays
ggcccccatcactagcagacgcccactctgtaacggtccagctggagggtggcgcgcaggacgtaacccgagagcgggcggggcacaacgatgtgatatttttaaccaagccagaaattcgccccccgaggggatcagacctgagacctgaagtggatctggtactagcgcttcatttaaaagtagtggaattttatggccgctgctaatgataatatcgttctttttccaagctgccgatacaatattgaaggaaataatatttatagatgcttctaagaaattgaagtgtggctcggttgatctttttgttgtcaattcatatggctctgcttatcaagccctttttatgtgtatcttgctgcctttcctgtcaaagttatggggagttccattccatgtgttaccaacctacataaaagatggtgcagcctgctttttaaatatgggatcaatatctggttgtgaaggggcaccacttctaccactactatttgtgttggttaacatgggattcaatatatcattactaaacctactaaagatctcctcagcagtcatatcttccttggcttctacattctcagttccgctgtccatctacgctttcactctgccactgccgtatatcggtgcggcgtcatctctgccacctggctttgttgcgggtgcagcggtactcaccaccggcttactactatacagcctaccacaggcacaacattatgggaattctttccacaacaagaatgatgactagtcagcattcatttcttcattggtttataatcacccttcactccaagatggtgcgccatctgggttcgaaaggttggagcagaagttctcctgagggccaccagactgttgtatgttgtatgaaacatatcatatatatatacccaccaataaaggtcggagaagagcatggacagtggttagacgggaagaaaaccagggagaagagcaggagcatcatcaccacagggacgaagagaagaaacagcggtggtggcggaaggggtggcagcaccaacggcaggcacaggaggatcactgtcgccgccagcaacatcatcagtactctcttgctcatcgccgccgccctgcgctcgctgtgatggaacttgcttgtgccaacccccaatggctgcccggctccagtctttttctaggctttcatgtgaggaagttgtactatgtgtgagagaaagaaaatgttagttgcccccgatgaaggaactggcaaggtatatgtacatggccagcttgaatcagcaggccagatggggtgttttggcatgtgtgactgctggactgggcatgttcgatccttttctgctttccagttccagtacagagactgcactgactggtcggggg

SEQ ID NO: 212747 - DNA, 1825 bp, Zea Mays
ctttcaatcacaccatcaatttcagtttcagtgaagccttattcaatttcacccaggaaatctgctatgttgatgaagtcttctggttgtacagagaaaacagtgaactctgggtttcccaacctgtctttaaaggcttgccacaggagggattctttgtctctgtgatatgtagttgtctatttctcgatcctgtatcttcgatatcgagcgggcattgtcaccgatgagatgctgtctctaccacagaaaccttttctagctgtaggactcttagaggcctttggagcagcagcagggatggcagctggagtgtcatttgttttgtttttgttggagtagctgttctttctggagcttcaataccaatactgtcacagacctatcttgtctggcagcttcttctatctgctatattcttgaagaggcgttatagaattaatgagatagcaggatgttttctagtggcaattggtgtcataataactgtagcaagtggatctggtactagcgcttcatttaaaagtagtggaattttatggccgctgctaatgataatatcgttctttttccaagctgccgatacaatattgaaggaaataatatttatagatgcttctaagaaattgaagtgtggctcggttgatctttttgttgtcaattcatatggctctgcttatcaagccctttttatgtgtatcttgctgcctttcctgtcaaagttatggggagttccattccatgtgttaccaacctacataaaagatggtgcagcctgctttttaaatatgggatcaatatctggttgtgaaggggcaccacttctaccactactatttgtgttggttaacatgggattcaatatatcattactaaacctactaaagatctcctcagcagtcatatcttccttggcttctacattctcagttccgctgtccatctacgctttcactctgccactgccgtatatcggtgcggcgtcatctctgccacctggctttgttgcgggtgcagcggtactcaccaccggcttactactatacagcctaccacaggcacaacattatgggaattctttccacaacaagaatgatgactagtcagcattcatttcttcattggtttataatcacccttcactccaagatggtgcgccatctgggttcgaaaggttggagcagaagttctcctgagggccaccagactgttgtatgttgtatgaaacatatcatatatatatacccaccaataaaggtgaggaaatatcatatggatatactgggaataaagagcgagaggatgtataaccgaacaagtacctggccgtcatacattgttgtttactgagtgaaggtcggagaagagcatggacagtggttagacgggaagaaaaccagggagaagagcaggagcatcatcaccacagggacgaagagaagaaacagcggtggtggcggaaggggtggcagcaccaacggcaggcacaggaggatcactgtcgccgccagcaacatcatcagtactctcttgctcatcgccgccgccctgcgctcgctgtgatggaacttgcttgtgccaacccccaatggctgcccggctccagtctttttctaggctttcatgtgaggaagttgtactatgtgtgagagaaagaaaatgttagttgcccccgatgaaggaactggcaaggtatatgtacatggccagcttgaatcagcaggccagatggggtgttttggcatgtgtgactgctggactgggcatgttcgatccttttctgctttccagttccagtacagagactgcactgactggtcggggg

SEQ ID NO: 212748 - DNA, 2850 bp, Zea Mays
atttaagaagactgatctttgtctcaaaatcagagatgaaatgattataaagatgaatcagagcatcgcctgcctggatgaaaagaaacacacacacacacacaaagcgatcagtgcagtggtgaagacagtataagggcaaccaaactgttgataaaaaggtcttgaagtatatgtggaatttggcaacatatatgtggtgaccatgatgcaattgcagtgtgataactgaaagtttattcaccaaggaagaaaagtacctattagcacaacgttgattaataagactatatgtaatttgtgcttgaagggaagtcattccatattgcataatatgtattaataacaattaagtccaacgaactatgattctgtaccaacacaagtgagctagtttatgtaagaaacaatttccaccgactattagagttagaaaccaaagttgtgagcacaagcaaccagtatgtattcacaataggcatttatttctcaagcccaagagataaattaaagatacatcacattacaacagctatgacatgtttacacctagaaaatgtagtaggtgtgtagacaatcaaaactatagctagttagacaagagtatctgttatgtacgagtagtaaactaaagaaatttaactgtaggagtgtagtagaattgtaggaacataatacgcaggattcaaactattggtatgcacgcttagacactatcgcatgatgatgacctctcaacataattcacacacgcaaacacctcacccatttgaggttaccatctactctgcgcgctgcagcgcacagtattgaacttaaaagctaacggtcacaagtaaaaaggagccaggtagccctaaactgatcaagccgcacgctgtacgccagaatacaaccgactagggtcggtaaacgaaacgaaacatcattaatgatggaatcatgcggacctggacgacggcgagggcgaggaactgctccagcttgagggctggtttggtgaccggggatcccaagcggaagaaatccttttgctattcaaaattgaattgcaagggaattcctcccccatggatcccctagggatccctaatcaccaaatcagcccagggtgagctggtgccatagctttcgctggtacaggtcggcgagcgccgcgtaccattccgcgagctccggctgggtcgcgccctgcgcctccaggaactccaacgccgctgccatcgacagccaaagtcccccttttctttcgtcccggccaagaagacgagcacgggaagaaccgaagcacgaatgcacgacggaacgatctgctcggtcgcggtcgggctcgcaggcttcgcagcttctcaccgagcctgtatacacttgtatacttagaaggcccaacaccacccataaggcccacaagaggctgtagcgaagttggaatggatcactagtagagtagcaccagaaaggagtactccaccagaaagatagacacgtccgccgtctccgctccggttttcgctgtctcgctgccgtcctaggtttggagccaggtcaccggcgctaggagggcgtgaaatcgagtcgacggtcggcactcggcactcacgcgttctccacctactgctggcgctcctgtgaggcgacgccggaccggccaccccgcatgcgaacagcgcacggaccggccaccggtgtgacccctccatccaaggcttcagctccagaccgagccgccccgccaatcgccgtccgccgaaccgcctaggaatttgttttcctcatctaaagttactgcattgtattccatagaaatggctatggggttgattaatgctaatcctataatccatgagaaaaaagaaagacgcatccgacaggcaccagagaccacagatgaaaatgcggtagagtccatagaccagctggaaatatttgatcacattagagatataaaggatccagagcacccatactcactggaacagcttaatgtggtgactgaagactcaattgaactcaatgatgaaagcaatcatgtcagggttattttcaccccaacagtggagcactgcagtatggcaactattattggcctttgcatacgtgtgaaacttgtacggagtctccctccttattacaaggtggacataagggttgcccctggatcacacgcaactgaagctgctgtgaataagcaactgaatgacaaagaacgtgttgcggctgcattggaaaacccaaacctactggacatggttgaagagtgcttatcaccaacattcgattgaggtctcagttattgcacatctgggagccatggtgtttcatgttcagaagccacacaagcttattgccataggaattcactcctgaatattatatttgagggccatggtgtttcatgtgcatgattttttttgtcctccgtccctttgagttaatacaattgttatctttttggacatttgttggtgcttgtgacctccctgggcaaagggacatgtaatcagatcttgtgtagtagctttcagagcgtttccagtgccacgccattttgtggctgtgtacccccagtcaactgaacttgaccgtttcgcatgaagacgatacacttgcagcagcagcgcccaccaatgaacgcaatatactttcggtttcagtagcatgcaagcggaaagacgcaacagccttcaggcacagactgccagtaggaatagggacgaaaacggatcggtatcggaaccggtgtggtgtattatcgaccgtttcctttgtttatcggtttttgtcgaaaattaccggatttgtgtctcagaatttttcagaattgtgttttgaatcttttcagaatttttc

SEQ ID NO: 212749 - DNA, 1146 bp, Zea Mays
cctacaagtgctggcacaacagcacacatggttgtctcctcctttcaaagaaacggaatttgttttcctcatctaaagttactgcattgtattccatagaaatggctatggggttgattaatgctaatcctataatccatgagaaaaaagaaagacgcatccgacaggcaccagagaccacagatgaaaatgcggtagagtccatagaccagctggaaatatttgatcacattagagatataaaggatccagagcacccatactcactggaacagcttaatgtggtgactgaagactcaattgaactcaatgatgaaagcaatcatgtcagggttattttcaccccaacagtggagcactgcagtatggcaactattattggcctttgcatacgtgtgaaacttgtacggagtctccctccttattacaaggtggacataagggttgcccctggatcacacgcaactgaagctgctgtgaataagcaactgaatgacaaagaacgtgttgcggctgcattggaaaacccaaacctactggacatggttgaagagtgcttatcaccaacattcgattgaggtctcagttattgcacatctgggagccatggtgtttcatgttcagaagccacacaagcttattgccataggaattcactcctgaatattatatttgagggccatggtgtttcatgtgcatgattttttttgtcctccgtccctttgagttaatacaattgttatctttttggacatttgttggtgcttgtgacctccctgggcaaagggacatgtaatcagatcttgtgtagtagctttcagagcgtttccagtgccacgccattttgtggctgtgtacccccagtcaactgaacttgaccgtttcgcatgaagacgatacacttgcagcagcagcgcccaccaatgaacgcaatatactttcggtttcagtagcatgcaagcggaaagacgcaacagccttcaggcacagactgccagtaggaatagggacgaaaacggatcggtatcggaaccggtgtggtgtattatcgaccgtttcctttgtttatcggtttttgtcgaaaattaccggatttgtgtctcagaatttttcagaattgtgttttgaatcttttcagaatttttc

SEQ ID NO: 212750 - DNA, 864 bp, Zea Mays
cccactttccgtccttttcctctccactcgcacgttaacgctacacactcccgtttacgtgcacacctccaaaccctcatcacgatccggctccaaggtctcgagatgaagtcgagggcgaggtccggcggtggcgactccaggctctcggtgaggaagaccaaggttgagaaggacccaaacaagcccaagaggcctccgaccgcgttcttcgtcttcatggaggagttcaggaaggactacaaggagaagcaccccaatgtgaaacaagtctcagtgattggcaaggctggtggtgacatgtggaagtccttgtctgatgccgagaaggctccctacgtatctaaggccgagaagctgaaggttgagtacacaaagaagatggacgcctataacaacaagcagtctggaggaggacccacattgtctggtgattctgacaagtccaagtccgaggtcaacgacggggacgaggaggtcaaagcaaaccctcctggtgatgagtgatggatgacgggtgaaactctgggctgcccaagtgcttgcagtcagcagggaaatctcatcgtcgttgggcctaaccgggctttgctgctccgtagcgtctggaagctgtctgtcttttgagatgctgtagactagtagtgcctgctctgagttagtaattgaaagtgttgtccctgaagtgatgctgtttagttggtagtgtgttcgcttcttcggcacttatacttacccccaagcatcaacgctgcctgttttaaatctcaataggtgctgttttaaatctcagatctcaatatatgactactgatcgctgaatagatttcatgctctcttgattgactgcatctctcccaagtt

SEQ ID NO: 212751 - DNA, 774 bp, Zea Mays
cccactttccgtccttttcctctccactcgcacgttaacgctacacactcccgtttacgtgcacacctccaaaccctcatcacgatccggctccaaggtctcgagatgaagtcgagggcgaggtccggcggtggcgactccaggctctcggtgaggaagaccaaggttgagaaggacccaaacaagcccaagaggcctccgaccgcgttcttcgtcttcatggaggagttcaggaaggactacaaggagaagcaccccaatgtgaaacaagtctcagtgattggcaaggctggtggtgacatgtggaagtccttgtctgatgccgagaaggctccctacgtatctaaggccgagaagctgaaggttgagtacacaaagaagatggacgcctataacaacaagcagggtgatgagtgatggatgacgggtgaaactctgggctgcccaagtgcttgcagtcagcagggaaatctcatcgtcgttgggcctaaccgggctttgctgctccgtagcgtctggaagctgtctgtcttttgagatgctgtagactagtagtgcctgctctgagttagtaattgaaagtgttgtccctgaagtgatgctgtttagttggtagtgtgttcgcttcttcggcacttatacttacccccaagcatcaacgctgcctgttttaaatctcaataggtgctgttttaaatctcagatctcaatatatgactactgatcgctgaatagatttcatgctctcttgattgactgcatctctcccaagtt

SEQ ID NO: 212752 - DNA, 778 bp, Zea Mays
cccactttccgtccttttcctctccactcgcacgttaacgctacacactcccgtttacgtgcacacctccaaaccctcatcacgatccggctccaaggtctcgagatgaagtcgagggcgaggtccggcggtggcgactccaggctctcggtgaggaagaccaaggttgagaaggacccaaacaagcccaagaggcctccgaccgcgttcttcgtcttcatggaggagttcaggaaggactacaaggagaagcaccccaatgtgaaacaagtctcagtgattggcaaggctggtggtgacatgtggaagtccttgtctgatgccgagaaggctccctacgtatctaaggccgagaagctgaaggttgagtacacaaagaagatggacgcctataacaacaagcagtctggaggaggacccacattgtctggtgattctgacaagtccaagtccgaggtcaacgacggggacgaggagggtgatgagtgatggatgacgggtgaaactctgggctgcccaagtgcttgcagtcagcagggaaatctcatcgtcgttgggcctaaccgggctttgctgctccgtagcgtctggaagctgtctgtcttttgagatgctgtagactagtagtgcctgctctgagttagtaattgaaagtgttgtccctgaagtgatgctgtttagttggtagtgtgttcgcttcttcggcacttatacttacccccaagcatcaacgctgcctgttttaaatctcaataggttgctctacgcccagcctggg

SEQ ID NO: 212753 - DNA, 5034 bp, Zea Mays
cgacaccaaaacccccctgctaggctgctcgcctgctcccaattcccacctccattgcttcaaacgcggcgagatcggaggccaaagccgcggccaaacaaggctgtctggggtctcaaaccgaaggcccaagcggcgcgcctcgacaccccggctcccctccgcccaatcgcctcccggcccccgcgcagcgtggcgcgttaggtctccgccgcctacctctgtatgcaacaagaagctgccagcatccactccaccacctgccctctatcaccgtcattgtctactgcacggcaggatcttgatgaagacaagtgatatactttgatgttagaatcctccacaagattaataaccaatccctcttcggtagttcattagaatggagtgcaacaaggaagaagcttcaagagctaaggatttagctttggtaaagctgcaagaagcagactatgctggtgctaaaaggattgccctcaaggctcaaaagcttttctctggccttgaaaatatttctcagctgttaactgtttgtgaagttcactgctgtgctgctattaagatcaacggggagactgactggtatagtgtccttcaagtagaaacaactgcagatgacatattactcaaaaaacagtaccgcaaacttgctctcttactccatccagataagaacaagtttgtgggtgctgaagctgcctttaagctaattggagaagctcacatgatactgacagacaaagtaaaacgttcacgtcatgactcaaaaaggaacccagttattccaaaatctgcaccaaagaagcgtggacgaccatcaaaggaaactgattatgttgctaagagggccaataaggaaaatactgatgctgtatattcaactttctggaccatttgcaccacttgtggaaccaaataccagtacccatatagtttgttgatgaaagttctcttgtgccaggtctgctcaaagagtttctttgcttatgatttgtctaagaaaccgtttgtcagagtggatgcatcaaatccatggagtggaattgggatgcgacacaaaatgtttcccaaccaacaacacaattaccagagtgttcctactcagcaaaatcctgtcactggtcgtcaaactcctgtccccgaccagaaacagcaacctcggaatgtctctggtaagcaaactccaggcattaaccagcaacaacgatcacagaaattccctttcagttcaaggccaaagaatgtggtaaattctcatccatggggtggatttggtaggcaacaggaaatgtgtcctctgagtcaacccacacatgtatctgaccaaaaaccctactatcaaagggcccctggccagcaaaaccctgtcaatggtcatcaaactcttgtcactgaccatcaacagcattctctgaatacccagcaacaatctacaaaccccccttgcaatccaggatcaaagaatgtagtgaattctcaaggggcagccttccagaatagtaatgcaactgcaaacagtaaccttacggatgaagctggggcttgtaatagagaaaagattacaaggccatcattcaatgatgaagatagaactaaatcacaggttgcaaattctgataaagttcatctagtaaacaagcaaatgaagggaaacaaggtagctacaggatccagtcatcctgttgccataaatggtagccaagttgctaggaaagatgttcttactgccgcatgtgcagataaaacatctgggcagcatccttgtatagcaagccagcagagaaatagtgtcattgttgaagatgggtctgatggttgtggaaaggttagtgatcatcttcctaactcttcgacaaagaaaaggataagaaaagaccattcttcctatactgctggcaaaagtgatcatacaacagaaaatgaagttgctgaagcaaacagccaacacaaatatagtattccaagcaaagagaagataacaaatgaaaaagaagtgatcagtggattaaatcttgatgtgttgcaaggaacaaaaagaaaacaacaaacaagttctggaagtggaagtgatgctgctgctaaatctgtaaaccatagtattccctgcaatgttacagtttcatgtccagatccagacttctacgactttgagaaaaatagggatgcagatcgattcacagttgatcagatatgggcagtttatgatgatcttgaaggcatgccaagatactatgctcgaattaagcaggtctactctccaaacttcatgttgcagttcacatggctagagtatgatcctttgtgtgatgctgagaaggaatggtcttctaaggagctgcctgttgcttgtggaaatttcagagttggaagaacactcttgactgaagacactaagatgttttctcatgttgtctcttggacaaaaggaaggaagaggaacagatatgagatttatcctaagaaaggcgaagtctgggcacttttcaggggatgggacatcaactgggtttcagattccgacgatcataggcaccatgattatgatattgttgaaatcacctcagactttgctatgggtttaggcacttatgtgattcccttggtaaagatcaaaggttttgtcagcttatttgttcgatcaagcagtgaagcaccatttctgatacctagtggcaacacccttagtttctcgcacagcatccctttccacaggttggtggaaaatggcaggcaacatatcccaaccggtgctcttgagctggacactgcatcactaccttctgatttggagaaagcgtttactcctgtgaacctcgacaacagttttatgagcaccggaagtggtagcactccatgcaatgtttcatctactagctcctgcgaagtgccggttggaaagaccgaacagactcaggatggtactggtacaggtgtgaaggatggagtcgagaagctgaatcagaatacaaaggtcgaacaagacaacggctcagaagcttcaacgattgatgactgtggcgatgggtggaacgacagctctccgccaggatctccagctgggtttcattaccctgacacggagttttgcagcttcactagcctgagatcattcgacaagttcaagaaagggcaagtttgggcactgtactgcgacaccgacaagttcccaaagtactacggtttggtaaagagcgtcgattcagaagactgcacagtccacataaggtggctggagcactgtccgcgcgaacaagtggaggagcacctggcacaagacggcctgtccattggctgtgggttattcgaagtcagcaggcagagtgagacctacgactgcacagaagtcttctctcacagtgtggaggtgacgggtaaagggaaaagatatgagatccttccgtgtgctggccaggtgtgggctgtatacaaggactggagccgcacatggagcttcgaagattacagtagatgcgagtatcttctggtcgaggtcatggaggtttctgatggtgatataacagtgtcgtgccttactaaagcggagggctttagcactgtgttcatgcaagagcagaacggtaaatccaggagaatagcaaggagtgacttgactatgttctctcatcaggttcctgcctaccgcttgacagacgaaactggcgatctttgtggttactgggagcttgatcctgcgtctttaccggaagttttgctggtcaggaagaccaagtgaaacattgttgagctgatagagaggggttttggcactgtgaaaagtgaagttatgcgctggtgacaaggctgtggtactggattgttgtttatttttggctagttgtaccttgtttcgtgtaaacaggctagtccattagtttgctacctgatgccactatggcaagccttttgctggctcggtctcgctttaggctacgtttcatcatctcacctgtttgtctttgctacgtccattgtggacatttttggtgggtataccagttggtcgcggctgtcgttcgcagcttactagtgtttgcacatggcacgccacctcttcccaccatctcgcttaaaagccgagacagtaattaagcagtcaatcgaccccaacatcacacatcctaatggcggtggcggtggacgcggtggcggctctcttctcgctggtcatggccgtcggggcgccgctgttcgactcgcaggtcgtgctcccgctcagcctctacccggcgccgctggtggacgtgtaccggtggttcgtcgccgagttcgacaactacatcgtggccgaccggccgccgttcttccgcggcctcgtctggctcgacctcgccttcctctggccggtcagcctcgccaacctctacggcatcctcgcgcgccgacgctggtccgccaccacctccctcatggccggtgtccacatgctcacctacctgtccgcaatgtttggggagatgctgggttcagggagagcaacgccgaagctgctcgggttgtacgttctgttccttgtctttgctgtagcttcagttgcgcgtggcctctgctcccgctcagcacaggctacaccggcggcaggtccatcgcctgtacttgctgctccgaagaagagggtttagatacctgatcagggcatgtttgagagtcttgcattgggtccaaaacctctgaaaattacacaatgttcaaaagtttccacgacatggactggattttgctatttgaatggcggtcgacgtgctaaagacatgtgcctggtttgagacgccaagtagaatgagatatggcagtcttccctcttcacggtgatgtagtagtcagaataatcgtagtaggtgttggacaccaaaatgagcggacggtccggcccatgggcccggacggtccgcgtgtcccgagattagattgactcggatgtttatccttatctcgtgcgtggttatccatctaatcacgtgggagtttgttggctatctcttaggaaaaggtccagacctcctcccctataaatataaaggggtacggctgattgag

SEQ ID NO: 212754 - DNA, 1630 bp, Zea Mays
  misc_feature (1630)..(1630): n is a, c, g, or t
gtccaaacaacgtttttcataagccgttcggccgtggagctggagccagcagcggcagaaccacgctaaaatctcgcccaaatcatccccgccccagcaatggcgacctccttcggtttcggcagctccgcgaccgcgggctccacggcctcctcccccttctcctccaccccatcagccttctccttctcccagccggcgtctgcctcctcccctgcccccgcctttggctcctccctcttctcctcatcctccgccgccgcttcttctgctccaacttttgggtcctccctgttcagggcctcgtccgccgccgccgcacccgcctcctctcccgctttcggattcggatccaccttctcgttcggtcagtccatggcggcggcctcatcggccgcgtccgcgccatcccttttcggtgcaacgcccgcatcctccgctggaacaacccttagcttattcggcgctgctacctccgccgcaagcagccctgggttcttcggcgccacctccactgccgcaagcagccccggcctcttcggtgcgtccgccactggctctgcggcaacctccccgagtctgttcggtggcacctcgggcctattcggcgggacttcctccgcagcgaccaccccgagcccattcggggccacctcttccacggcggcgacagttagtccgttcggcgccgcctcttctgctgcgtccactccaagcctcttctctggaggggccacgggatttagctttggctcgtcggcgtccggttccaccactaccacggccgccgccccggcaccatcatttggcttctcgttcaactcggggccggccgcgtcaagcactgcatccacgccgacatcagcaccggctttagggtttggcggcgccactggctcgtcgctgttcgggtccaccacctctgcgcccctcttcagtaccaccaccgcttcttctccagcgtctgctgcgaccaccacgccatcctttgggttctcttcttcgccagcaacaaccgcttccgccccatcgtttggctttacaccatcatcaggaagcgcgacgaccgcgaacacggctccttctttgttttcatcatccgccaccacactaaccacaccggcgtcctcgtcctccactggcttctccttggccacttcgcaggctgcacctgctccctcattgttctctaccagtgcaatagttgcgccatcatcatcagcagctgcagctactgccactaccaccactgtcacaagtgcttctacatctgcaggcatgacaaccacggctcctttgactggaacaacggggtttccaaattttaatcttcaaacaactaccccagcttctacctcatctcccacactggcatttggtgtttctactactgctgctagctcatcagccaccagcaccacaactcaagcaacttcctcagctgttcaagtcagcagcacaggtccgactactactacatctatcactccagcagcatcccaagcacctaagctaccatcagaaattgttggcaaaaatgttgaggagattattagggactggaacaatgagcttcaagaccgtactgcaaaattcaggaaacatgccaccgcaatagctgaatgggatn

SEQ ID NO: 212755 - DNA, 2054 bp, Zea Mays
  misc_feature (2054)..(2054): n is a, c, g, or t
gcagaaccacgctaaaatctcgcccaaatcatccccgccccagcaatggcgacctccttcggtttcggcagctccgcgaccgcgggctccacggcctcctcccccttctcctccaccccatcagccttctccttctcccagccggcgtctgcctcctcccctgcccccgcctttggctcctccctcttctcctcatcctccgccgccgcttcttctgctccaacttttgggtcctccctgttcagggcctcgtccgccgccgccgcacccgcctcctctcccgctttcggattcggatccaccttctcgttcggtcagtccatggcggcggcctcatcggccgcgtccgcgccatcccttttcggtgcaacgcccgcatcctccgctggaacaacccttagcttattcggcgctgctacctccgccgcaagcagccctgggttcttcggcgccacctccactgccgcaagcagccccggcctcttcggtgcgtccgccactggctctgcggcaacctccccgagtctgttcggtggcacctcgggcctattcggcgggacttcctccgcagcgaccaccccgagcccattcggggccacctcttccacggcggcgacagttagtccgttcggcgccgcctcttctgctgcgtccactccaagcctcttctctggaggggccacgggatttagctttggctcgtcggcgtccggttccaccactaccacggccgccgccccggcaccatcatttggcttctcgttcaactcggggccggccgcgtcaagcactgcatccacgccgacatcagcaccggctttagggtttggcggcgccactggctcgtcgctgttcgggtccaccacctctgcgcccctcttcagtaccaccaccgcttcttctccagcgtctgctgcgaccaccacgccatcctttgggttctcttcttcgccagcaacaaccgcttccgccccatcgtttggctttacaccatcatcaggaagcgcgacgaccgcgaacacggctccttctttgttttcatcatccgccaccacactaaccacaccggcgtcctcgtcctccactggcttctccttggccacttcgcaggctgcacctgctccctcattgttctctaccagtgcaataggtagctcgtctgtcactacgcctggattttcctttggttcatcttcggcagcttctacaccaactttagcctctgtgtttgcaactggttcctccactgtgccatcagcggctgcagcttctgcagcatctgggtcgtcgttcccagctgtttctaccagtggttttagttttgcagttgcgccatcatcatcagcagctgcagctactgccactaccaccactgtcacaagtgcttctacatctgcaggcatgacaaccacggctcctttgactggaacaacggggtttccaaattttaatcttcaaacaactaccccagcttctacctcatctcccacactggcatttggtgagcttacatggttattcaccatctgcagttcttcaattttatgtcttcaatgagacgatgactgaggttcagcggtattttaccatgcctacgtgtctggtttgaaccaattattatgcttctggatttggtcccaatgtcatcattgttacagcatcatattcacacacgaagttacagcctccagtttgtagaacataataacatctcaaatgaatctacatcattgcttcaggtcccaacattattgtaccttcactatactaaccattatacttgtatgtttttcttatactaggtgtttctactactgctgctagctcatcagccaccagcaccacaactcaagcaacttcctcagctgttcaagtcagcagcacaggtccgactactactacatctatcactccagcagcatcccaagcacctaagctaccatcagaaattgttggcaaaaatgttgaggagattattagggactggaacaatgagcttcaagaccgtactgcaaaattcaggaaacatgccaccgcaatagctgaatgggatn

SEQ ID NO: 212756 - DNA, 329 bp, Zea Mays
  misc_feature (329)..(329): n is a, c, g, or t
gtgagcttacatggttattcaccatctgcagttcttcaattttatgtcttcaatgagacgatgactgaggttcagcggtgtttctactactgctgctagctcatcagccaccagcaccacaactcaagcaacttcctcagctgttcaagtcagcagcacaggtccgactactactacatctatcactccagcagcatcccaagcacctaagctaccatcagaaattgttggcaaaaatgttgaggagattattagggactggaacaatgagcttcaagaccgtactgcaaaattcaggaaacatgccaccgcaatagctgaatgggatn

SEQ ID NO: 212757 - DNA, 1990 bp, Zea Mays
atcgagctgtcccctccctgtgctctactgctcttgcgccttgctagcttgcttgcttccctgctccctccctcctcctcctcgtcgcctcttctctggttcttcctggtgtttgccggagcgaggctaggcgcaaggggagggagctgcgctcagccagagctcatcggcgctacgcaagcgcgctgcctggtgtgctgcattgccgaactatcaggggaaaacactgaaataatggaaatcagcttattgcataatgaatctgatgcaggaagcaccagtttgctaccgctgccattgttgtcatatggtccaagatcaatggttccaatacaagtaccaccatcatcagactttgagagtatcctgtcaccagagccaatctacagtgatcttcagttgaaagagatgaactacaatgcagcagcaatggatgaaagcactgagttccttcacttgattcttagtggcaatgatgaaggatacaatagcacaactgaattacaagtttgggatgttgtggacttctatgtctcagaaaacttttctgctctccaatttgatagtttgatgggttttacaaatgaagttagtacttcctacaatgattgtatgaatttagttgatatggtagagcggcccgtggctcgtctgtctctagatgatacaccaaaacccagtaacagtgatgatgcggttccggcagacaatgtcacaatggaccctgatgaaacatccttataccttcagacaaaaccaacagattcagaaacagaaagtagttctgccgcaggagatgttgaaactgaatatctagatctaaagctactttctagatgtatgcctgatttaatggatgttgactcgcccaattgcttatcgaaaacaccagtgaaaaaaaagcatgtgactcttgtgcttgatttggacgagactctggtacattcaacattggatcactgcgacaatgctgattttaccctagaagttttctttaatatgaaaaatcacacagtgtatgtgagaaaaaggccttacctgaaaatgtttcttgagaaggttgctcagatgtttgaggttgtcattttcacagctagtcagagagtctatgctgagcaacttatagataaacttgaccctgatggaaaatatatctcacggcgtatttatcgtgaatcttgtgtattctctgacggttgctatacaaaggacctgacaattctggggatcgacttggcaaaagttgcaatagttgacaatactccacaggtacaatccctttccaatatgtaaaaactattctgatggacgcatttcccttgtcacttttatcttgatctctggtaagtctagtactctagtctagcactatatactgtgatatcttggccttcaggcatgtagctatttccttctgaactagaaggtggcaagacctgaagtaccttttcatcgtagccttttttgccatcttaaattatttacatactatatatattcattattttttgttaattagttgaagcatttctttatctaggttttccagttgcaagtggataacggcataccgattaagagctggtttgatgacccctcagatcaggaactgatcgagttgctcccgttcttggagagcctcgtggattcagaggacgtgaggccaataatttcaaagacctttcatgacaaacttgagcagaattagtttgaggcgacagatgtatcatccagtgaacctgtcgctgaagttagcttcgctccacatggtgcaggccatcattcttgggaagttagatataggatgaaaaatcacaatttctgttatgttagctgttacaaatagcaagcataaactgcggtcgttgtctcgtcgatgaaaatggcttgtatatgtatgtccctttgggcttccgtgtcacggatcattgtacagagacgaacattagtgctgaataaagtgatctgagtgcaattttgctcatgagga

SEQ ID NO: 212758 - DNA, 2420 bp, Zea Mays
ctggtagtctggtcacacccttcggatccttgttcgcttccggcttccctcgttctctgcgtccgcccctgccgggccttgtcttctcccccaaatcaatccctcgcccacggacccaaccaaatcctcctccacctcctccatctccagccccgtccctacccagctcgtgtaacctcccgatgtccgggggcggaggcggcgcaggcgcgggctcgtcgtccggcggcggcggcggaggtggagggggcggcagggagggcgactgggactgcggcagctgcggcaaccggaactacgccttccgctcgctctgcaaccgttgcaagcagccgcgcctcctcgtcgaccctaacaccccgcgcgactccaagtggctaccccgtgccggggactggatctgcaccggtaacacctcttctgccgcgctacccttcattattaccccagctctgaatcacctacacttctcatgtttctacgccgtctcttcatgtagatgcagccctcatccattccctatgtatcgcattgatagtttagtgaaactagcatttcttctcctccttgttcatcttttgtgttggttttagccttcttacttgaatctagtacgttgggtgttacaggcctggtaaatactgtagccttcttagctagacttttttctctattaatgcagagaagatgttaataaggcaagttagactcgaaaaagtgtaaataaaggaagtagaaacttcatttaaactaatagaggggagtctaaaaattattttgaccactcctccttgagcatgtgtaaataaagtagaaacttcatttgaccaccccttcagcttctatgcaagccaggatagtcatgctcttcgatctagattttttttaaaatttttttgcactgcatgttctgactcctgtcctggaagtatcttttggatgatttttgttagtgcttcaatcttgctactatctgctagaaatattttgacgattccttttgtttattttgttcatttaatgctgctatatgtagataagattagaaagaattaccaatgagtgtgctgagtaatgactagtgtgcgtggtgtctattcctctctatgggtttgtccgggatggctggtcatcgtggtggtgggtgtgcgtgtccttcggtgcgttttgctgcctgctgtgctggttggtttatgcggcaaatggatgaataggttgcagtaacaataattatgcatccagaaagaactgcaaaaagtgtggcctatccaaggaggaagcagcaatgccagcattgcaaatggcagggatggctatgccagcttatgcaacttatatcgcaagactacagagccttgctgcttctgcttctgcatataagatgaactttgggatggctgccaactcacctttgcagcagcaactacttgcaaatgcaaactggtcctatgggatggctggtagatatgggatgcagtcttctggttggccacttggcaacagcagcccaaatcagtttccaggtgttccaaaggattggcgtaatggagactggctctgcagctgtggatttcataattattcatctcgtactcagtgcaaagagtgtggtgcacctataccatcaggcattccctccacaacaatgaaagctacgacatctgatgcctcttccacattaggaactaagcggttagcctcagaggagctggcaaacgactgtgataataaaaggctaaatccaggaaatgacaattatccactttcaacagcaggtgcaaataatttgtttttgggtattgagcaaggagctggaagcagcaatggccaggctgctttttcgaaatttgactatgggagctcaatgtcattaccatctgggcagggaatgtctggtcttatcgtaaaaggggcaaaatggcgcgacggggactggttgtgcaacaactgcaacaaccacaactacgcatctcgtgcgttttgcaacaggtgcaaaactcagaaagaatctgcagttcaccctggtgtgctatagcttgcttttgctggttcatattgttggactcgtttgttgcagggtcgtgcgtatggttgtggaaaacactattttgcagctgcaatggttagagatttgaaatatgagggaaaatatgagatgagcctcatgctgttgtgcatcatcgatcagaccactataagtaggactggaaatggatgtctggagatccgaattattcgtatttgctgaaaccgttaatatggatatccgtatctttattcgatttcaatatggatgtcaaatgtatacattcgaatttgatttataatacttttctctatccgattctatatttgtattcgaaaaaaccatgaaacatcttatactatccgtattcgtgaaaaaatatgtttaatgaaac

SEQ ID NO: 212759 - DNA, 575 bp, Zea Mays
ccagtctgtgcatgtcccttctctcgttcttgctcccagattaagaagttacaaagttattgattcccaaataactggagagaatcacaaattggtagcactatgaaggtcaagattcttcagtggcatgcagtggcttcttggacgtgggatgcacaggatgagacatgtggcatatgcaggatggcttttgatggctgctgtcctgacttgggtcaattctcaaacatccacacccctttgccccatgtgccgtagagagtggcagtttaagggctaaggtactatggacatctagaactgcaccaagcgactctcagttctcagagaagactgatgtttttctggtacttctgtgatgctttattttaactactacatattgttttccgtacttagtataaatcctgatgtcagcgcctgatcctgtgtatgcttccaagcttgtagtggaacaaatgaaattattgcttttcttagggctgatttcctaatcttatcccatattggtttgttcttattgtttatcttctgaaggattacaagaagtctagtatcagagctaggcaattgat

SEQ ID NO: 212760 - DNA, 2708 bp, Zea Mays
cccgccgtgctgctgttccgttccgttccgttccgttcatctcctccttataatcctcctcctccgcccgtcgcctgccgcaccgcacccgccccggcctcctccgcagtcccatgagccaggccgcgcccgtggcgaaccctgctcgcgccgcgcctgcccattccccctctgccgccggtgcccggagtgcagatccgtctgaccgcgccgccgccgctctcggatatcgctttatccttcgtataattgtattgtcaaactggcacccaccggaatcatatagcctggataaccagcaagctgctctccgtctcctctcatcagtgataaatccaagattctgccagtaaagatgccgatctgtagctgtgaagaaactatccatgagttcgagatgttaacacgcgatgctgggcgtgtacagaaggatacactgaaaaagatcctcgagttgaatgctgatgctgaatatctgaacaagttcggcctcaatggcaggactgatgtagagagctacaaatcctgcatcccgctgtgtgtgcacagtgatcttgagccatacatccataagattgctgatggtgatagctccccactcctcactgggaagcccgtcacctccctttccctcagttctggtacaacgcagggaaggcctaagttcttgccgtttactgatgaattgcttgagaccacacttcaaatattccagacttcatatgcatttaggaaccgtgagtatccaattggaagaggaaaagccttgcagtttatctatggtagcaagcaagtggtaacaaaaggcggcatccttgccacaactgcaacaacaaacttgtaccggagggcacgatacaaggaggggatgaaggatatccagtctcaatgctgcagccctgatgaagttgtttttggctctgacttccaccagtccttgtattgtcacttgctctgtggtctaatatactctgatgaggtccatcaggtgttctcgacattcgctcacagcttagtccatgcatttcaaacatttgaggaggtttgggaagatctctgtgctgacataagagatggtgtcctctcagagaaagttacagtgccatcggttcgtgaagccgtgacaaaaatcctcaagcccaatcctgagctcgctgactcgatctataagaagtgtacgggcctgagcaactggtacggtgtaatcccagcactctggccaaacgcaaagtatgtgtacggtatcatgacagggtccatggaaccgtatttaaagaaactgaggcactatgctgggcacttgcctctgataagcgcagattacggcgcatctgaaggatgggttggtgctaatataaaccccacacttccacctgaacaggtgacatacgctgttctccctcagaccggttattttgagttcattcctttggaggtggagaatagtgcctcctccattcactacttagaatcagaaccagttggcctgactgaagttgaggttggcaaaacctacgaagtcgtgataactaccttcggaggtctataccgctaccggctaggagatatcgtgaaggtaacgggcttccacaacgcaacaccggagctccggttcatctgccgcagaagcctagtcctgagcatcaacatcgacaagaacaccgagcaagacctccagctggccgtcgaggaggcagcgaagctcctggacgcggagaagctggagatcgtcgatttcaccagcttcgtggagaagtcaagcgaccccggtcgctacgtcatcttctgggagctgagctccgacgcgagcgaggacgtcctgcgaggctgcgcgaactgcctggacctagccttcgtcgatgctgggtatgtgggctcgaggaagatcagagccatcggcccgctggagctgcggattctgaagaggggaaccttcaaggagatcctggatcacttcctgagcctcggtggcgccgtgagccagttcaagacgcctcggttcgtcaacccgttgaacgtcaaggttctgcagatactcagtaggaacaccaccagaagctacttcagtaccgcctatgggctctgataaataagaaacgctgctagtagttccatccatgtaattatatttatataaaaaaatattgcttcactgttctgttctagtctccaggtaaaagaaaacaatctactcatcctagtcctgctggcgccctgctagaatgtctgtaaatccatatgcaagcaaatgcattcagtctctgcctgtgttctgatctttgtgcatagcaagcaaatgcattcacagtctccactccagactccagagtagtagtacgtacacaaatactgtcactgggtattagtgctaatcttttttacttgtcctgacatcagattcagttctacacacatagaaacggacagaagatacatgaaactgaatacgtaaataatcaagcacatatagaacgtcgtggctgcaagagaagatcacaggctgtagttgacgtcgatgaagctgaggatctggtgcacggcgccggcgatgtcctccgccgagtaccttgcctcgccgacgatctatcacacacacatattcaattccagtccagatgaagcgcgcgcgctactgaagatatatataactaaatcttgatgaattacttttacgttgaaggagtagaggacggtctgctcgatggtgg

SEQ ID NO: 212761 - DNA, 1498 bp, Zea Mays
cccgccccggcctcctccgcagtcccatgagccaggccgcgcccgtggcgaaccctgctcgcgccgcgcctgcccattccccctctgccgccggtgcccggagtgcagatccgtctgaccgcgccgccgccgctctcggatatcgctttatccttcgtataattgtattgtcaaactggcacccaccggaatcatatagcctggataaccagcaagctgctctccgtctcctctcatcagtatgtatccagcttttaaaggtgataaatccaagattctgccagtaaagatgccgatctgtagctgtgaagaaactatccatgagttcgagatgttaacacgcgatgctgggcgtgtacagaaggatacactgaaaaagatcctcgagttgaatgctgatgctgaatatctgaacaagttcggcctcaatggcaggactgatgtagagagctacaaatcctgcatcccgctgtgtgtgcacagtgatcttgagccatacatccataagattgctgatggtgatagctccccactcctcactgggaagcccgtcacctccctttccctcagttctggtacaacgcagggaaggcctaagttcttgccgtttactgatgaattgcttgagaccacacttcaaatattccagacttcatatgcatttaggaaccgtgagtatccaattggaagaggaaaagccttgcagtttatctatggtagcaagcaagtggtaacaaaaggcggcatccttgccacaactgcaacaacaaacttgtaccggagggcacgatacaaggaggggatgaaggatatccagtctcaatgctgcagccctgatgaagttgtttttggctctgacttccaccagtccttgtattgtcacttgctctgtggtctaatatactctgatgaggtccatcaggtgttctcgacattcgctcacagcttagtccatgcatttcaaacatttgaggaggtttgggaagatctctgtgctgacataagagatggtgtcctctcagagaaagttacagtgccatcggttcgtgaagccgtgacaaaaatcctcaagcccaatcctgagctcgctgactcgatctataagaagtgtacgggcctgagcaactggtacggtgtaatcccagcactctggccaaacgcaaagtatgtgtacggtatcatgacagggtccatggaaccgtatttaaagaaactgaggcactatgctgggcacttgcctctgataagcgcagattacggcgcatctgaaggatgggttggtgctaatataaaccccacacttccacctgaacaggtgacatacgctgttctccctcagaccggttattttgagttcattcctttggaggtggagaatagtgcctcctccattcactacttagaatcagaaccagttggcctgactgaagttgaggttggcaaaacctacgaagtcgtgataactaccttcggagaaagcgcacagttggggtgcata

SEQ ID NO: 212762 - DNA, 2525 bp, Zea Mays
ctcgtttctggctgcttcttctgtttcgtcgctgctgtgaggtgactgtacgcaatcaaattcaaacccttcttcctgtgggctgctcatggcgcccgccgaaactcatccctcccaatttcaatctatgctacaggctactggtgataaatccaagattctgccagtaaagatgccgatctgtagctgtgaagaaactatccatgagttcgagatgttaacacgcgatgctgggcgtgtacagaaggatacactgaaaaagatcctcgagttgaatgctgatgctgaatatctgaacaagttcggcctcaatggcaggactgatgtagagagctacaaatcctgcatcccgctgtgtgtgcacagtgatcttgagccatacatccataagattgctgatggtgatagctccccactcctcactgggaagcccgtcacctccctttccctcagttctggtacaacgcagggaaggcctaagttcttgccgtttactgatgaattgcttgagaccacacttcaaatattccagacttcatatgcatttaggaaccgtgagtatccaattggaagaggaaaagccttgcagtttatctatggtagcaagcaagtggtaacaaaaggcggcatccttgccacaactgcaacaacaaacttgtaccggagggcacgatacaaggaggggatgaaggatatccagtctcaatgctgcagccctgatgaagttgtttttggctctgacttccaccagtccttgtattgtcacttgctctgtggtctaatatactctgatgaggtccatcaggtgttctcgacattcgctcacagcttagtccatgcatttcaaacatttgaggaggtttgggaagatctctgtgctgacataagagatggtgtcctctcagagaaagttacagtgccatcggttcgtgaagccgtgacaaaaatcctcaagcccaatcctgagctcgctgactcgatctataagaagtgtacgggcctgagcaactggtacggtgtaatcccagcactctggccaaacgcaaagtatgtgtacggtatcatgacagggtccatggaaccgtatttaaagaaactgaggcactatgctgggcacttgcctctgataagcgcagattacggcgcatctgaaggatgggttggtgctaatataaaccccacacttccacctgaacaggtgacatacgctgttctccctcagaccggttattttgagttcattcctttggaggtggagaatagtgcctcctccattcactacttagaatcagaaccagttggcctgactgaagttgaggttggcaaaacctacgaagtcgtgataactaccttcggaggtctataccgctaccggctaggagatatcgtgaaggtaacgggcttccacaacgcaacaccggagctccggttcatctgccgcagaagcctagtcctgagcatcaacatcgacaagaacaccgagcaagacctccagctggccgtcgaggaggcagcgaagctcctggacgcggagaagctggagatcgtcgatttcaccagcttcgtggagaagtcaagcgaccccggtcgctacgtcatcttctgggagctgagctccgacgcgagcgaggacgtcctgcgaggctgcgcgaactgcctggacctagccttcgtcgatgctgggtatgtgggctcgaggaagatcagagccatcggcccgctggagctgcggattctgaagaggggaaccttcaaggagatcctggatcacttcctgagcctcggtggcgccgtgagccagttcaagacgcctcggttcgtcaacccgttgaacgtcaaggttctgcagatactcagtaggaacaccaccagaagctacttcagtaccgcctatgggctctgataaataagaaacgctgctagtagttccatccatgtaattatatttatataaaaaaatattgcttcactgttctgttctagtctccaggtaaaagaaaacaatctactcatcctagtcctgctggcgccctgctagaatgtctgtaaatccatatgcaagcaaatgcattcagtctctgcctgtgttctgatctttgtgcatagcaagcaaatgcattcacagtctccactccagactccagagtagtagtacgtacacaaatactgtcactgggtattagtgctaatcttttttacttgtcctgacatcagattcagttctacacacatagaaacggacagaagatacatgaaactgaatacgtaaataatcaagcacatatagaacgtcgtggctgcaagagaagatcacaggctgtagttgacgtcgatgaagctgaggatctggtgcacggcgccggcgatgtcctccgccgagtaccttgcctcgccgacgatctatcacacacacatattcaattccagtccagatgaagcgcgcgcgctactgaagatatatataactaaatcttgatgaattacttttacgttgaaggagtagaggacggtctgctcgatggtgg

SEQ ID NO: 212763 - DNA, 2442 bp, Zea Mays
tagctagtaccaggtgcagcgagccgtgcggcaattactctgcgcgttcctccgtccatggtgataaatccaagattctgccagtaaagatgccgatctgtagctgtgaagaaactatccatgagttcgagatgttaacacgcgatgctgggcgtgtacagaaggatacactgaaaaagatcctcgagttgaatgctgatgctgaatatctgaacaagttcggcctcaatggcaggactgatgtagagagctacaaatcctgcatcccgctgtgtgtgcacagtgatcttgagccatacatccataagattgctgatggtgatagctccccactcctcactgggaagcccgtcacctccctttccctcagttctggtacaacgcagggaaggcctaagttcttgccgtttactgatgaattgcttgagaccacacttcaaatattccagacttcatatgcatttaggaaccgtgagtatccaattggaagaggaaaagccttgcagtttatctatggtagcaagcaagtggtaacaaaaggcggcatccttgccacaactgcaacaacaaacttgtaccggagggcacgatacaaggaggggatgaaggatatccagtctcaatgctgcagccctgatgaagttgtttttggctctgacttccaccagtccttgtattgtcacttgctctgtggtctaatatactctgatgaggtccatcaggtgttctcgacattcgctcacagcttagtccatgcatttcaaacatttgaggaggtttgggaagatctctgtgctgacataagagatggtgtcctctcagagaaagttacagtgccatcggttcgtgaagccgtgacaaaaatcctcaagcccaatcctgagctcgctgactcgatctataagaagtgtacgggcctgagcaactggtacggtgtaatcccagcactctggccaaacgcaaagtatgtgtacggtatcatgacagggtccatggaaccgtatttaaagaaactgaggcactatgctgggcacttgcctctgataagcgcagattacggcgcatctgaaggatgggttggtgctaatataaaccccacacttccacctgaacaggtgacatacgctgttctccctcagaccggttattttgagttcattcctttggaggtggagaatagtgcctcctccattcactacttagaatcagaaccagttggcctgactgaagttgaggttggcaaaacctacgaagtcgtgataactaccttcggaggtctataccgctaccggctaggagatatcgtgaaggtaacgggcttccacaacgcaacaccggagctccggttcatctgccgcagaagcctagtcctgagcatcaacatcgacaagaacaccgagcaagacctccagctggccgtcgaggaggcagcgaagctcctggacgcggagaagctggagatcgtcgatttcaccagcttcgtggagaagtcaagcgaccccggtcgctacgtcatcttctgggagctgagctccgacgcgagcgaggacgtcctgcgaggctgcgcgaactgcctggacctagccttcgtcgatgctgggtatgtgggctcgaggaagatcagagccatcggcccgctggagctgcggattctgaagaggggaaccttcaaggagatcctggatcacttcctgagcctcggtggcgccgtgagccagttcaagacgcctcggttcgtcaacccgttgaacgtcaaggttctgcagatactcagtaggaacaccaccagaagctacttcagtaccgcctatgggctctgataaataagaaacgctgctagtagttccatccatgtaattatatttatataaaaaaatattgcttcactgttctgttctagtctccaggtaaaagaaaacaatctactcatcctagtcctgctggcgccctgctagaatgtctgtaaatccatatgcaagcaaatgcattcagtctctgcctgtgttctgatctttgtgcatagcaagcaaatgcattcacagtctccactccagactccagagtagtagtacgtacacaaatactgtcactgggtattagtgctaatcttttttacttgtcctgacatcagattcagttctacacacatagaaacggacagaagatacatgaaactgaatacgtaaataatcaagcacatatagaacgtcgtggctgcaagagaagatcacaggctgtagttgacgtcgatgaagctgaggatctggtgcacggcgccggcgatgtcctccgccgagtaccttgcctcgccgacgatctatcacacacacatattcaattccagtccagatgaagcgcgcgcgctactgaagatatatataactaaatcttgatgaattacttttacgttgaaggagtagaggacggtctgctcgatggtgg

SEQ ID NO: 212764 - DNA, 3731 bp, Zea Mays
cgccccacctcctctccctgtaaagatttcgttcgttcctcttccgggttcctgatctcggtctcggtccccgattcgacctgtggagtctttcctgcaatctgtagcagtagcacgttgcctcgggaggagtttgtgcgttcctccagaggagccgagtccgtcagtggtcgcttgccactagcgcgaatcacgtccgggttgcgtcctccactccgtgccaatctaattccgggcgcccggggaaggattcgggacggaaggcactggtttctgtgcttccttggattccacggtgaaaccagcctgcgtggtccgcgccggctcccaccgcattccggcgagtcccgagtaacctcgctgtgggggggatggtgtcgcaggctcccatggcaggggcgggcgcgggcgcgggcgccaacctcaccgcggcgctgtgcaggaagagcaaccgcgtcgcgcgggtgctcgcgtacgcgctgctcgagtgggtcctcatcgcgctgcttctcgccgacggcgtcttctcctacctcatatcccggttcgccgccttcttcgggctcgcgccgccgtgcgcgctctgctcccgcctcggcgtcgacagcctcttcgagacccacccccgccaccgaggcgtcggcgccgagcccctgcgccgcttgctgtgcgacgtgcacgccgccgagctgtcgcgcgtcgggtactgcagcgcgcaccgccggctcgcggacgccggggacatgtgcgaggattgcgccgccgcggcggcggcggcgcccgggaaggcgttgctgtcatggatgggccagagcgagctcggcgagcgggacctcgcctgcgcctgctgcggcgtcgcgctcgagagtggcttctactcgccaccgttcttgctcaccgcgtcggcgccccgtggctcagattgtgggcacaaggaagaggaagaggcagccaggccaaatggagacgtggtcttcgtctccgaggaaggtcctgtgatcgagcttttcgacgagaagccatttgtggagggtgactcaatcggcgtcttggcttgtggtgccgaagttgttgccaatgttgagcggctggtgcctcttgaatcaattgactcgttgcccgtcgccatggccaccatgttatctcaatccggtgttgaaggaaaggaagcagttgatcatgatgatgtaaggcagaataacgtggatatggagcacacagttagtaccgatgaggagacaattgtcatgacatctgatgatgacaaggttgatgatgtggttgatcggctgattgatgaacatattgcagccgtagtctttgtgccagcttgtatagaatctacgcctaacgatgggataaatgcaggcaaaacggtggaggcctttgcctttgctgatcatcagtctgctgaggatgacagtggattgaaagataaggatcagaaaatatctgatatatctgaggatgagcaagccgaacaggctactccacaacaggaattgtgtgctatgccgacaaatcctagtgaccatgaaattgttgagaggttagacagaagtattgacttggagcattttccacaggctaagtcaaagcataaaatgaactctatgccagtggaagcttctgagcatgtcactgtaactcagattgaggagaagcaggttcagcaagctgaggtaactcaggagttggattcactaccaatatgttctagggagcaagctgaggtaactcaggctgggttggaacaagattgtggctctgtgccaattgattctggggaacatggttgcctgacttcatatgctcatactgatgttgagcaagctgaggtgaagcagaaagtcacttctgtaacaagagatgttctcgattatgcagcgggcacttttaatgttaacacaaacacatggaaagaagatattgaagaggatccaactgaagctgctctaacggccatatatcaaatttcttacgaacctttgacaaacttagacaagttctctccggatcatagtgtctccgaagaagacagacagcttaatgcgctgactcatatcgaagatatatgtgattcacaggaaccgctggattctaaagcagctgtttctgatgctaaatctgtagattcaggtgttgctactttgtctactgatcttgaaagcacggaattggtgaatgccgatcaactaaaatctgctttggcttccacacgcaagtcattgaacaccctatattttgaacttgaaaatgagaggaacgctgctgctatagctgctgatgaaaccatggcgatgataaaccgcttgcaagaacagaaagctgcaatgcagatggaggcgatccaataccagcggcttatggaggaacagtcagagtatgaccaagaagcactggagaggctgaacgaactagttgtgaagagagagaaggagaagcaagatctggagagagagctcgagctgtaccgccacaaggttcatctctacgaaataaaggtgaggaaaatgtccaggcacaaggctgatgaccagaacggatcgtcgtcaacttcatcgagcgccgaggatagtgacgacctttcacaaagcttctatgaaggtgatgaatcttcccacggtcttaatggaagcaacgggagtattcccacagatgtcgtgctacaagaaactgccagacatctcgttatcatcgatggctctttagctgattttgaggaagagaggctctccatactggaacagcttaaagtgctagaggataagctttttgatctcgatgatgacgatgaatccgatagcaggaagcatttcccagaagaaaaccacttcagcggtgcctcgaacggtttctctgacgacgatagctgctctaaactccgtgacaaaagaagagttgtaacctacagaggaaaggaactccttccgttgttcgacgatgctacgactgtggaagctggaaatgtccccaatggtgacgaggcacatcatccagcagaggctacactggacctcgctagagagcgacataagcttgtgatcgccaacgaaatcgatcaagtgaatgagaggctacaggcccttgaggcagacagggagtacataaaacagtgcgtgagggccttgaaaaggggaggcgaagggttcgatcttctccaggagatattgcagcatcttcgggacctaagaaggatcgagcagcgcggaaggaactctggggagctttcgcctcattacctacatctttacacggactgaagatcagctgcaaagtctcgtgcccaatattgcttgaagatggaaaccataggacaatgataaggggaaaaaaggattgtcgactaataactagcattgtcattggagaggtttcgttgttggttcccggagaggagaaaggagctcctcctggaacagtcacagtctgttcggaaacgccatccggaaggcagatcgcggagcaagtctgtctgcattccaaggtccagggttagtgagctgcccgggtccatgggggtgtgcttgtgggttgtggcggcaatcatggccctgtgcaagcttttaaaagaattcatttatcctgaaaacatgccgatgccagctttgctgccggatacggatagagtgggcttcactagtttttttatatatttcttttttccctcctaaattcttttcctgtaaatcctctagctgtatgtaatgtgctttgggcttctggaatga

SEQ ID NO: 212765 - DNA, 936 bp, Zea Mays
cgtctttgttctcccacgaacttcattgacgaaggcgaaaagagaagaatcagctccatttctctcgtttgggaggaggaggaggcgcgcgccggtgcccgaccgtcgaccagccgctacgacgcggcaccaggatagggacattttcatcgaggcttgtcacactcgatactgttgagatatttactactcatgaatggtttgccaagccaacagtggctttccggtgcaatggagcaaacaaaacatatctgccagatgtaacggaggcgcacacgccatatacctttaagggtgaagaatcatggcagagcttccagaaaagaaatgcaagcgatgtggtttgtatgaggagggcacatttaagcctgatgctgtctttgatgaatgggagatgtgttcgagtgatttcaagggcggaaaatacacccgctttaaggaaggccagttcaatgcaacattcctatgcccaaactgcactgcctctactggacatggaaaccctagaccaagcgaagatttggaaactaagaagacatctattgctgtcatcataatagctagtgttctcgcttcagtccttgtcgtcactgccttgttcgggggcttcaagtattggcagaagaagaagagggagcgagaccaggtgcggttcctcaagctctttgaagagggagatgaccttgaagatgagctgggccttagtaatgaattctaaaatagtgcgtacagtcttacttccgatgttttcagatgtagtttccacgtatgatgtatagaatgtgtgtttttggtgacctcctagtagcttttgcagagggagtgaatcttgcaacagtttgcacaagccccgtaacgtacatatataaaagtgcaaaaatgaatggattcacgtatagccttcaattcttcatcgaatgcttcacgtttcccttt

SEQ ID NO: 212766 - DNA, 946 bp, Zea Mays
cgtctttgttctcccacgaacttcattgacgaaggcgaaaagagaagaatcagctccatttctctcgtttgggaggaggaggaggcgcgcgccggtgcccgaccgtcgaccagccgctacgacgcggcaccaggatagggacattttcatcgaggcttgtcacactcgatactgttgagatatttactactcatgaatggtttgccaagccaacagtggctttccggtgcaatggagcaaacaaaacatatctgccagatgtaacggaggcgcacacgccatatacctttaagggtgaagaatcatggcagcccttaacagagcttccagaaaagaaatgcaagcgatgtggtttgtatgaggagggcacatttaagcctgatgctgtctttgatgaatgggagatgtgttcgagtgatttcaagggcggaaaatacacccgctttaaggaaggccagttcaatgcaacattcctatgcccaaactgcactgcctctactggacatggaaaccctagaccaagcgaagatttggaaactaagaagacatctattgctgtcatcataatagctagtgttctcgcttcagtccttgtcgtcactgccttgttcgggggcttcaagtattggcagaagaagaagagggagcgagaccaggtgcggttcctcaagctctttgaagagggagatgaccttgaagatgagctgggccttagtaatgaattctaaaatagtgcgtacagtcttacttccgatgttttcagatgtagtttccacgtatgatgtatagaatgtgtgtttttggtgacctcctagtagcttttgcagagggagtgaatcttgcaacagtttgcacaagccccgtaacgtacatatataaaagtgcaaaaatgaatggattcacgtatagccttcaattcttcatcgaatgcttcacgtttcccttt

SEQ ID NO: 212767 - DNA, 1077 bp, Zea Mays
cgtctttgttctcccacgaacttcattgacgaaggcgaaaagagaagaatcagctccatttctctcgtttgggaggaggaggaggcgcgcgccggtgcccgaccgtcgaccagccgctacgacgcggcaccaggataggtgctcctgagctacgaacccacaccccacggccaaactgttgcgtgcgccccggccttagcatgaggtggccgctggcgatctcgactcgccgccgccccctccttttcgtccttctcatcgccctctacacgattcctaggacattttcatcgaggcttgtcacactcgatactgttgagatatttactactcatgaatggtttgccaagccaacagtggctttccggtgcaatggagcaaacaaaacatatctgccagatgtaacggaggcgcacacgccatatacctttaagggtgaagaatcatggcagagcttccagaaaagaaatgcaagcgatgtggtttgtatgaggagggcacatttaagcctgatgctgtctttgatgaatgggagatgtgttcgagtgatttcaagggcggaaaatacacccgctttaaggaaggccagttcaatgcaacattcctatgcccaaactgcactgcctctactggacatggaaaccctagaccaagcgaagatttggaaactaagaagacatctattgctgtcatcataatagctagtgttctcgcttcagtccttgtcgtcactgccttgttcgggggcttcaagtattggcagaagaagaagagggagcgagaccaggtgcggttcctcaagctctttgaagagggagatgaccttgaagatgagctgggccttagtaatgaattctaaaatagtgcgtacagtcttacttccgatgttttcagatgtagtttccacgtatgatgtatagaatgtgtgtttttggtgacctcctagtagcttttgcagagggagtgaatcttgcaacagtttgcacaagccccgtaacgtacatatataaaagtgcaaaaatgaatggattcacgtatagccttcaattcttcatcgaatgcttcacgtttcccttt

SEQ ID NO: 212768 - DNA, 835 bp, Zea Mays
cttacacagatcaaagagttgtggcctggacattttcatcgaggcttgtcacactcgatactgttgagatatttactactcatgaatggtttgccaagccaacagtggctttccggtgcaatggagcaaacaaaacatatctgccagatgtaacggaggcgcacacgccatatacctttaagggtgaagaatcatggcagcccttaacagagcttccagaaaagaaatgcaagcgatgtggtttgtatgaggagggcacatttaagcctgatgctgtctttgatgaatgggagatgtgttcgagtgatttcaagggcggaaaatacacccgctttaaggaaggccagttcaatgcaacattcctatgcccaaactgcactgcctctactggacatggaaaccctagaccaagcgaagatttggaaactaagaagacatctattgctgtcatcataatagctagtgttctcgcttcagtccttgtcgtcactgccttgttcgggggcttcaagtattggcagaagaagaagagggagcgagaccaggtgcggttcctcaagctctttgaagagggagatgaccttgaagatgagctgggccttagtaatgaattctaaaatagtgcgtacagtcttacttccgatgttttcagatgtagtttccacgtatgatgtatagaatgtgtgtttttggtgacctcctagtagcttttgcagagggagtgaatcttgcaacagtttgcacaagccccgtaacgtacatatataaaagtgcaaaaatgaatggattcacgtatagccttcaattcttcatcgaatgcttcacgtttcccttt

SEQ ID NO: 212769 - DNA, 471 bp, Zea Mays
ctgcgcgtcgtcgttttacacctctggacatggaaaccctagaccaagcgaagatttggaaactaagaagacatctattgctgtcatcataatagctagtgttctcgcttcagtccttgtcgtcactgccttgttcgggggcttcaagtattggcagaagaagaagagggagcgagaccaggtgcggttcctcaagctctttgaagagggagatgaccttgaagatgagctgggccttagtaatgaattctaaaatagtgcgtacagtcttacttccgatgttttcagatgtagtttccacgtatgatgtatagaatgtgtgtttttggtgacctcctagtagcttttgcagagggagtgaatcttgcaacagtttgcacaagccccgtaacgtacatatataaaagtgcaaaaatgaatggattcacgtatagccttcaattcttcatcgaatgcttcacgtttcccttt

SEQ ID NO: 212770 - DNA, 2199 bp, Zea Mays
gatcccatcattgctaatcgtcaggtctgataggcaacccaataatggcagaagtcctatcaggatctcatgaacaccgtctaagctctgccttagatggacactacgacgagaagaggaaatccaatgtggaatacacagaggacgagaagaaagccgtgatcgcggctctgaaaaagaaggctttgagcgcctcacagaagtttaggcattccatgaagagggggaggaagagcagcaaggtgatgtccatctcgattctggatgagcgtgaacctgaggaggtgcaggctgtggatgccttccgccagcttcttgtacttgaagagctgctaccatcgcagcatgatgactaccacatgatgctaagatttctcaaggcaagaaagtttgatatcgagaaggcaaagcaaatgtggtctgatatgctgaagtggagaaaggagttcggtgcagataccattctcgaggaattcgaattcgaagaagctgataaggtggcagaatgctaccctcaaggttaccatggggttgataaggaaggcaggcctgtctactttgaacggcttggacagatcgatgtgaataggctaatgcaggtcactacaatggatcgctttgtcaagaaccatgtcaaggagttcgagaagaactttgctgttaagttcccagcttgctcaatcgccgcgaagcaccatattgaccagagcacaacaattcttgacgtgcaaggagtggggatgaagcaattcagtaaagctgcaagggagctcattggcatgcttcagaagattgatggtgacaattatccagaaccctgtgccgcatgttcatcatcaatgcaggccagggattccggcttctatggggcaccgtcaagagctttcttgacccaaagaccactgcaaagattcatgttctgggtaacaagtatcagagcaagcttctcgaggtgattgatgctagtgagttgccagaaatttttggtggaacctgccgatgtgaaggtggttgcatgaaggctgacaaaggcccttggaaggaccccgaaatcatgaagatggttcaaagtggtgatgggaggtgtggatcactcggtacggcctctttcgaggctccggagaaaatgatttgtgaagacgacacgtatcctaagaaacaagctttgtttgatggggaaacacaattagctggagacgagcattctcagtcacagaaaatttcccgtggccggattgaacatcctcacgtgtcacctcttcacgaggaacttatccccacttcaattcatacccctggatcaccctattcttgtgatgtcccgatggttgaagaggccatagacgccatctgcaagagccacggaacaccaccagatgagaagattgccatcaccaaagctattataaatgtatcgaatggatccaagcccccactctttgctggcatcatagcacttgtgatgagcatcgcaacgatggtccgtctgacccgcagcatgatgcctgggaaggttctcggtgctgccataggtggagctaccctctcagaaggtaaatcaaaagtacaagagcgccagcggtccaagctatcagaagaggctgtggaggaagctgaagacgccgtctctgcaaagcgcctctcggagcttgaggagaaggtcattgcactcctgacaaaacccgcatcaatgcctgctgataaggaggaggttctgcaggctgctgtctcccgcgttagtgcactggaagaggagcttgcagctacaaagaagaccttgcaggagactcttgagcgtcagttggagatcgttgcatacattgagaagaagaagaaaagcaagcgtttctttcgttggtagaagcaaacagcagtgaattgttcacgcccacgagaaaaaaggttttgcgtgtgatggaagcgagctggtgcttgcgtatgccagcaagctgcgattctgagtgtaacacataaggatgttctttcattcttcttttttgttcccttgttgcatcaaattgtgccttaaccacgtcgatgtgctgccaaattgtcaatccctgatacggtcaatcatggatggaccgactgcaatataaatatattataccacaaaatagcgcgacctttgctacgaacgtgttctgtatgtctctcttttttaaattcctactttctacatcttagattcaattccat

SEQ ID NO: 212771 - DNA, 1179 bp, Zea Mays
ggagtgcgagcgaggccgatgtgacgcggctacagtgcgtgcgggggagacgacgacaccggccaaggcaagcagaagcgagccctgatccaagctagccaaagcgagctaattaagctacctccgaggtcgtcctgtggtggacgccctcagcagctagagccgtctccttccgcccggcggcacggtcgtcggccgctatacggacagtgggtagtgagtggttcatcgatcgggttgctcatggggaggccgaggtggtgggccaagcggtggaagaggagctccgggtccgcgcggacgctcggcgtcgcggcggtggtcgcgctcgtcgtccccctctgcttcgtcgccagcagcagccgtctcccggggacactgggtggcggcgccctcgcttcagggaccatggcagcggcagcaggagcccatcatcccggcgatcaggcggcggcgactcatggggagctgttctacatcgcacgacgacgacgccggcggctcgcgggaggcggcttggggtcgcacccgccacggtgcgcctccaaatgcggacgctgcgacccttgctacccggtgtccgtgcccctgcccgtgccgcggggggttctggacttggtcaccccggagtcggagtactacccggaggcgtggcggtgcaggtgccgggaccagctctacatgccgtgacggaggccggccggagatcgatccaagtaggtgtggagatcgttggccgggaccagctccacatgcgctagagcttggagatgatagcgcgacgacgctcgatggagatggcagcacgacaacgcgcactagaaatgggggcgcgatggggctcgctagaggcagcgctaggcgactacggccgcacggggccttagtcgtagggttacggttgaataggatagtgtacatctagatcgcaataggaaaggggaacaggtgtctacgtggcagtgtgagtagcccacgtgtcatatataaagatggcaacagagactcgttacctattatcccgcaggtaattactccattaggggacatgtttgatcacaattatatacctgcgagtcttttaatgggagaaaaagaggactcaacgggtagaacgggtacgtgtacgtactcgttaaactcgtacatgtgtacctatgggtatacaaaaacctggaa

SEQ ID NO: 212772 - DNA, 1267 bp, Zea Mays
tggggattaagatgattctgagcctcgtgaacaattacgacagctttggagggaggaagcagtacgtgcagtgggcgagggagcgggggcagaccattgaccggtgacttggttcgctgccggcaacgagaagatgcagctcaccgccacctccacgctcgaagctcctcccgaaccggccgcatcgccgccatggcagccgccgctcctgcaagctccgtgaaggaagtgctgccgtctcccctgacctccgcctccgagccccctccccttttcgatggcaccaccaggttgtacgtggcctatctttgcccgttcgcgcagcgcgcttggattgctagaaactacaagggtctgcaggacaagattaagatagttgccatcgatctcgctgacaggccagcgtggtacaaggagaaggtttatccagaaaacaaggtgccttctctagagcacgacaaccaggtgaaaggagagagcttggatttggttaagtacattgacagcaacttcgaaggtccatcgttgctccccgaggatcatgcaaagcagcagttcgctgaggagctgctcggatacactgacgcattcaacaaagcattttactcatgtttagtcgacagggaagatgtgtctgaggaagccgttgctgccttggacaaaatagaagacgccctggggaaattcaacgatggcccgttcttccttggtcagttcagtctggtggacgttgcgtatgtaccgttcatcgagaggtttcagatactctattccaatataaagaactatgacgtcacaaagggcagacccaaccttcagaaattcatcgaggaagtgaacaagatcgatgcgtacacacagactaaactggacccgcagtttttgcttgagcaaacaaagaagcggcttgggattgcttaaagcctgtgaccaaggacgagactttcgccagaagcaccagcgtagtagatcggagctcgttttagtcggttgtgtgcttggatattacatctggtcttcaataaggcatggccttctgtaatggctgtgcttctgaaaataaataaactagttgtccaggtattatatttgctttggtgacgtgtcgatgtcactgtatatatatgaatgggtcggaaagaatgatgatgtgcagtgtgttctgtgcaaatgttgccgagatgaaggatcagtgtccatgtagacattcatgtattgctcatatcgtgacacggcgcatgaaaggtttcggcccctaccacgctca

SEQ ID NO: 212773 - DNA, 1943 bp, Zea Mays
gtcccctcgattttttgtcatcacgccgccaccaaaatatgctccgatcttcaccttacctccgcgtgcatctaaacactagagaaaatgaggagctagtggcattggtctggagacatcaagagtcttcgccctgagaggagcccatgtggtcatcgctgctagaaacacagaggctgcatcagaagcaagaaagaccatcatggagaagaacccaacggcacgtattgatgttctgaagctagacctcagctccctcaagtctgtcagggcttttgtggaccagttcaactcgatgaaactccctctaaacatcctgataaataatgcaggcgtcatgttctgcccttttcaactgtctaaagacggggtcgagatgcagttcgcgacaaatcatctaggacactttctgcttaccaatctcctccttgataccatgaaggccactgccaagtctacgggcattgagggccgcattgtgaacctgtcatcagtcgcccaccaccatacgtatccgaagggaattgacttcgataacctcaacgatgagaaaatatacaacgacaaaatggcttatggacagtctaagctggcgaacttgctgcatgcgaaggagctctctagaaggctgaaggaagaaggagcaaacatcacagttaacagtgtccatcctggattgatcatgaccaatttgatgaggcactcctttgttctcatgaaggtgcttcaggttgccacttacatactgtggaagaatgtaccccagggagctgcgactacttgctacgtaggactgagccctcaactcaagggagtgacaggaaagtactttgctgactgcaacgtggagaagacgagcaaactggcgaggagcgaggagttggcgaagcagctctgggacttcagcgaggagctgatcaagtctgcgaagtgagagccgaaagagctggatcagagaaaatgttgtggtcctgcttggcatctagtggtacaagtgatgactgattagtatatagcacggaggaggaacctgggcgatggctggacctcatggtgttcaggaataaaatctgcttgctttcgtacattaattagtccggtgtggcaaacatcaatttgtagtgctgtcaatatctgttcaatatacgtgcagctcagttctgacttgaaaaatgcagagtcgtgtttgcctgaaacatgtcgtttcaaccagtgtttgattctttttcgttatttggttcagcatccgaattgtgagtacagctcttcttgttacattgtgggcatctctactattttgcaacagaaactgcaagccaagatccaagattcgtatcatcacactataatatgtagaccacaaaattcctgcttttcatgtatgtaaattgtgaacagatcgagaataatcacacagcctgagcctacacttgttctagaaaaacctccggcgaagttggctcgtcgtcgtgatcatcctcccacaccccaaaggccgtggtgaaccagacggcggcggtcaccacgacgacggcgaacactaggggcacgacgacgtcgggctttgcccgtccgagcatgccgacaggcacgcagacgacgtcccacggcggcccgtcgagcggcaggccgacgctgaacccgtcgccggcgccgctggagcccggacacgcccgggagagcggcgccccgggcccgacggcccagacgaaggcgaactccggcgcgaacgccgccacggccacggccgtggtggccaccgccgtccacgcggccgcgtagagcagcagcgcgcggcgcgcgaaggagagggaggggaagctggggaacgccataggggggtgtgtgcccgcccgaccggttgcgaggatcgttggagagctcggttcacgcgcgcggtgcgaggtttattagcggagcgggcggggagcggctagtgctgc

SEQ ID NO: 212774 - DNA, 1918 bp, Zea Mays
atgctttgtagtcaccaacattttgcacagcccggcatttatcccttggctactttagtactttgaggagctagtggcattggtctggagacatcaagagtcttcgccctgagaggagcccatgtggtcatcgctgctagaaacacagaggctgcatcagaagcaagaaagaccatcatggagaagaacccaacggcacgtattgatgttctgaagctagacctcagctccctcaagtctgtcagggcttttgtggaccagttcaactcgatgaaactccctctaaacatcctgataaataatgcaggcgtcatgttctgcccttttcaactgtctaaagacggggtcgagatgcagttcgcgacaaatcatctaggacactttctgcttaccaatctcctccttgataccatgaaggccactgccaagtctacgggcattgagggccgcattgtgaacctgtcatcagtcgcccaccaccatacgtatccgaagggaattgacttcgataacctcaacgatgagaaaatatacaacgacaaaatggcttatggacagtctaagctggcgaacttgctgcatgcgaaggagctctctagaaggctgaaggaagaaggagcaaacatcacagttaacagtgtccatcctggattgatcatgaccaatttgatgaggcactcctttgttctcatgaaggtgcttcaggttgccacttacatactgtggaagaatgtaccccagggagctgcgactacttgctacgtaggactgagccctcaactcaagggagtgacaggaaagtactttgctgactgcaacgtggagaagacgagcaaactggcgaggagcgaggagttggcgaagcagctctgggacttcagcgaggagctgatcaagtctgcgaagtgagagccgaaagagctggatcagagaaaatgttgtggtcctgcttggcatctagtggtacaagtgatgactgattagtatatagcacggaggaggaacctgggcgatggctggacctcatggtgttcaggaataaaatctgcttgctttcgtacattaattagtccggtgtggcaaacatcaatttgtagtgctgtcaatatctgttcaatatacgtgcagctcagttctgacttgaaaaatgcagagtcgtgtttgcctgaaacatgtcgtttcaaccagtgtttgattctttttcgttatttggttcagcatccgaattgtgagtacagctcttcttgttacattgtgggcatctctactattttgcaacagaaactgcaagccaagatccaagattcgtatcatcacactataatatgtagaccacaaaattcctgcttttcatgtatgtaaattgtgaacagatcgagaataatcacacagcctgagcctacacttgttctagaaaaacctccggcgaagttggctcgtcgtcgtgatcatcctcccacaccccaaaggccgtggtgaaccagacggcggcggtcaccacgacgacggcgaacactaggggcacgacgacgtcgggctttgcccgtccgagcatgccgacaggcacgcagacgacgtcccacggcggcccgtcgagcggcaggccgacgctgaacccgtcgccggcgccgctggagcccggacacgcccgggagagcggcgccccgggcccgacggcccagacgaaggcgaactccggcgcgaacgccgccacggccacggccgtggtggccaccgccgtccacgcggccgcgtagagcagcagcgcgcggcgcgcgaaggagagggaggggaagctggggaacgccataggggggtgtgtgcccgcccgaccggttgcgaggatcgttggagagctcggttcacgcgcgcggtgcgaggtttattagcggagcgggcggggagcggctagtgctgc

SEQ ID NO: 212775 - DNA, 1691 bp, Zea Mays
ttttcagctcactacaagctgcccttgatattatcagaagaaaaaaaagaatgtgaaaaatagggacaccacatcattgccatccgcatttcgtcctcatgttcttgttatcttgtagctccacatccaccatcccactctccctattcttcttctcttcaagtgccactcccatccaccacaaggcttggcttggtgggaagaagacaaacgccggcacgcgcacgcagacacgatggcgatctgcagcgcgcacactaccacctccctgcgctccccatgcacgaccgtctcgaacgcaggtctgaggcagaagcaagtcatcttcgtcaccagcaacaggaggagcggcggcggcaggaggcacggaggggcaaggagcttccaggtctcgtgctccgtcgacaagccggtggtgattggcctggcggcagactcagggtgcggcaagagcaccttcatgcgccggctcaccagcgtcttcggtggcgccgcggagccgcccaagggcgggaacccggactccaacacgctcatcagtgacaccacgacagtgatatgcctcgacgactaccattccctggacaggaacggcaggaaggagaaaggtgtgaccgccctcgaccctagggccaacaactttgatctcatgtatgagcaggtgaaggcgatcaaggaaggccaggcagtcgagaagcccatctacaaccatgtcactggcctcctcgaccctccggagcttatcgcgccaccaaagattttcgtcattgaaggtctgcacccaatgttcgatgagcgagtgagggacctcttagatttcagtatctacttggacatcagtgatgaagttaagtttgcatggaaaatccagagcgtgggcacagccttgaaagcatcaaggccagtatcgaggccaggaaaccagattttgatgcctttattgatccgcagaagcagtatgctgatgctgtgattgaagttctgccgacccagttgattcccgacgacaacgaaggaaaggtgctgcgtgttaagctcatcatgaaagaaggggtgaagaacttcaacccggtttatctctttgacgaaggatcgaccatcagctgggtgccttgtggaagaaagctcacatgctcttaccctggcatcaaattttcctatggcccggacacttacttcggaaacgaggtatctgttctggagatggatgggcaattcgacagactagatgagctcatctacgtggagagccatctaagcaacctttcaaccaagttctacggagaggtgacacaacaaatgctaaagcatgcagacttcccaggtagcaacaacgggacaggtctcttccagaccatcattggactgaagattagagacctctatgaacagattgttgctgagagggctggtgtaccagcggaagcagcaaaagtttaacgatctatgcattcagatgtcctaaaactacagctctccgaactcaatgggagtaacaaccttcgcatctgttgggatatatggcgagctaggaggtatagaaatgtcattgcagaactcaggaaaacgtgcaatggaatttcttgaaatccctcttgaagagagtgagaactcgatagatcaagaatcaccacacgttgtattaatcgtatggtataatatttatacatgtacaggatgagctatgcata

SEQ ID NO: 212776 - DNA, 1153 bp, Zea Mays
cgaggaaaatccgtcgttggaaagtgaggaaagccttcgaggtgtgcgtgtgcctaccgttcagaacatgtcgtcggggggtgcaacaatcagaacccaaggaataacaagtgatcctgcaccgaacagggataatcccaacgagtcgttgctggtgggatcgtccactgtgcatgtggaggaaatgatgctagacaccactgtcactgtgcagacggatacaaggagctcaggtgccttttctgggttcgttgagctagacgacgtttcaacggagagtatcaagatctcagctccgctgttcctacgcccgttcggtccgagagcaatcgtccagcacaagggttccccgctccagctcatctgtccaggtctggaagtcctctgggtcaacacaaaggggttcccaaacagcccacatcgaccaaaggtgggcataaaggtcgacatacctgagaaccttagtaaggtactagggttttgcgacgatctagcgcagagctcgtcgtcgtcgccaggaccaggagcaatatgcagtaattccagatggaaatccctgattgagagagacgcggatcggcgtccaacggtctggctgaagattcctacctttggcagtggcgacaccgcagcctgccggacacatgtatacgaaaaggagtgcgacggtgtcgttccaaggcttgtttccgaaagggtcgatccatcggaactggcctcgatgcttcaagggaacaaggtggtggatgcgttcgtctcggtggaaacattcgaccactaccaaagcgctggcattcggttggttgccaataggctggatgtgcacttcaaaaggcaacagcaggcctagctagttccttatggtgctctccggtcaggccgaggctggattgaaggggattgacccatccaattctcctgtgattctcttgttaccgaatcgatccaggactatataaataagtaagtttatgtcgtctccgtatgtgcttgcaaaacttccgaccatattttatatgtgttcagacttcttatttgatgacgctagctaggagaatgctaccgttactatcgacatggcatttttttgtttgtagtcgacgatgtcaaacatctttgcagacttcactccaaattccatggccgacgagac

SEQ ID NO: 212777 - DNA, 1549 bp, Zea Mays
cgcactgcggtgcggtggtggcgtcatgcgaacaccttgcaggaggagattgtgttcctggacgtggagacgtcaaccccgccgtgcgtgctcctcgagttcggtgccgtagtcgtgtgctcgcgcaggctcgtggacgtctcctccttcgccacgctcgtgcggcccgcgaacctcgacgcgctcccggacccgaccgcgcggagcaacggcatcacgcgcggcaccctcgctgacgcgccgccgttccgcgacgtcgccgacatggtctacgacgtcctgcacgggagggtgtgggcagggcacaacatcgtgcacttcgattccatgataatcatggacgcgttcgccgagattgggcgaccccctcctcaacccaaggccatgatcgacacccttccgttgcttacccagtgtttcgggccgagagcaggggacatgaagctggcaagcttggcaaactattttggtctagggaagcaaaggcacaggagcctggatgatgtgaaaatgaatattgacgttttcaagaactgtgctacagtcctgttcctggaggaaagccttcgaggtgtgcgtgtgcctaccgttcagaacatgtcgtcggggggtgcaacaatcagaacccaaggaataacaagtgatcctgcaccgaacagggataatcccaacgagtcgttgctggtgggatcgtccactgtgcatgtggaggaaatgatgctagacaccactgtcactgtgcagacggatacaaggagctcaggtgccttttctgggttcgttgagctagacgacgtttcaacggagagtatcaagatctcagctccgctgttcctacgcccgttcggtccgagagcaatcgtccagcacaagggttccccgctccagctcatctgtccaggtctggaagtcctctgggtcaacacaaaggggttcccaaacagcccacatcgaccaaaggtgggcataaaggtcgacatacctgagaaccttagtaaggtactagggttttgcgacgatctagcgcagagctcgtcgtcgtcgccaggaccaggagcaatatgcagtaattccagatggaaatccctgattgagagagacgcggatcggcgtccaacggtctggctgaagattcctacctttggcagtggcgacaccgcagcctgccggacacatgtatacgaaaaggagtgcgacggtgtcgttccaaggcttgtttccgaaagggtcgatccatcggaactggcctcgatgcttcaagggaacaaggtggtggatgcgttcgtctcggtggaaacattcgaccactaccaaagcgctggcattcggttggttgccaataggctggatgtgcacttcaaaaggcaacagcaggcctagctagttccttatggtgctctccggtcaggccgaggctggattgaaggggattgacccatccaattctcctgtgattctcttgttaccgaatcgatccaggactatataaataatcgacgatgtcaaacatctttgcagacttcactccaaattccatggccgacgagac

SEQ ID NO: 212778 - DNA, 1587 bp, Zea Mays
ccttgcgtcacccgaagcggcgaagtacttgttatcgtcgtcgtcgagctccctacgtcctttcgttgcgtgcgacgctgcccagagccgagcccacgtcgtcgactccacgacaccgagattcctctgtccgcgcacttgttcctgctcgcggtgcgcctgccactctgcccgtcaacattgttatttgactcaccggaattcgtcgtgccgcatcgtcgacggagaccctctccctccactctacgtcttgctgctgttccaagtagaggtgctgtgtcagtcgggctacccccagcctgggtggatgtttctgaagagatatctgcaaacatgcagagggcaaggacaaaaatgacggagttggctaaggcacatgccaaagccttgatgccgtcctttggcgatggcagagacgaccagcgagcaattgaggttctcacacatgagataacagacttgctgaaaaggtccgagaagaggctgcagaagctgtccatgaaagatttgtcagaggattcaaatgtccgaaagaatgtccagcgttcccttgctacagacctgcaaaacctgtcaatggagttccggaaaaagcagtcatcatatttaaagcagcttcgccaacaaaaagagggtcaggatggtgttgatttggaaatgaatatgaacgggacaaagtctacatttgaagacgatgagtttgatgatgtgggtttcactgagattcagatgtcaaaacttaagaaaagcgaagcattcactagagaaagggagagagaaattgagcaggttgttgaatcagtcaacgaacttgcacagattatgaaggatctttcagttcttgtgattgatcagggaaccatcatcgatcggatagactacaacatacagaacgttgcagcttcagttgaggaaggttacaaacaattgcaaaaggctgagaggacccagaagaaagggggcatggtgatgtgtgccactgtccttgtcattctgatcttcatcatgatagtccttctgattttgaagaccattttctgacatacttagctatctcattttaatggttgatgaatggtggccaagcacacaccacgctcatctattcatgtgagtgaggattgcaccatgcctgcatatcaagaacgccacaaattcatttgaatagcggcgatacgactcactgatctgaagatggaaccatcttgagtcttggccacaatttttgcatcgttgcagatgtagacatgccctattcatacaggactcttaattttagagagagaaaaatctgaagaggattgtttgacacgtttcaccttccagtttgccttggagcaaccgggttaggctggctgtgtatgcctctgtatagagtgagttgtatcatacatcagggtatcggaaatcagaaagtaggttcagttcctgtgtcatctcttttctgctttatgttgtctgcccttctattttgagctagctttgaagtggcatttcattgtaccatatcctaacaattgttctgacaactttcgcccgggtagtcggatatgcaatgagattttgtgctagtgtggcgaaagggcc

SEQ ID NO: 212779 - DNA, 1549 bp, Zea Mays
agaaactctaccaaaccaaactgcaccaaattctccggtccccgcctcagcgcctccgccatcgacatcccacccgcccgtcccctcgcggctcgcgcccgacggcccgaggcatggcgacgcggaaccgcacgccgctctaccgcaagtaccgcgacgcgctgcggcacgtccgcgcaccggccggggcgacgtcgtcgtcctgcgggggcgggggagggtcggtgatcgagatggcctcgctgctgcgctccgaccggccctacgcgcccctcagcatcgaagacccctccgcctccagagggcaaggacaaaaatgacggagttggctaaggcacatgccaaagccttgatgccgtcctttggcgatggcagagacgaccagcgagcaattgaggttctcacacatgagataacagacttgctgaaaaggtccgagaagaggctgcagaagctgtccatgaaagatttgtcagaggattcaaatgtccgaaagaatgtccagcgttcccttgctacagacctgcaaaacctgtcaatggagttccggaaaaagcagtcatcatatttaaagcagcttcgccaacaaaaagagggtcaggatggtgttgatttggaaatgaatatgaacgggacaaagtctacatttgaagacgatgagtttgatgatgtgggtttcactgagattcagatgtcaaaacttaagaaaagcgaagcattcactagagaaagggagagagaaattgagcaggttgttgaatcagtcaacgaacttgcacagattatgaaggatctttcagttcttgtgattgatcagggaaccatcatcgatcggatagactacaacatacagaacgttgcagcttcagttgaggaaggttacaaacaattgcaaaaggctgagaggacccagaagaaagggggcatggtgatgtgtgccactgtccttgtcattctgatcttcatcatgatagtccttctgattttgaagaccattttctgacatacttagctatctcattttaatggttgatgaatggtggccaagcacacaccacgctcatctattcatgtgagtgaggattgcaccatgcctgcatatcaagaacgccacaaattcatttgaatagcggcgatacgactcactgatctgaagatggaaccatcttgagtcttggccacaatttttgcatcgttgcagatgtagacatgccctattcatacaggactcttaattttagagagagaaaaatctgaagaggattgtttgacacgtttcaccttccagtttgccttggagcaaccgggttaggctggctgtgtatgcctctgtatagagtgagttgtatcatacatcagggtatcggaaatcagaaagtaggttcagttcctgtgtcatctcttttctgctttatgttgtctgcccttctattttgagctagctttgaagtggcatttcattgtaccatatcctaacaattgttctgacaactttcgcccgggtagtcggatatgcaatgagattttgtgctagtgtggcgaaagggcc

SEQ ID NO: 212780 - DNA, 901 bp, Zea Mays
ctttcaaccagttcctggtggccagggtttcactgagattcagatgtcaaaacttaagaaaagcgaagcattcactagagaaagggagagagaaattgagcaggttgttgaatcagtcaacgaacttgcacagattatgaaggatctttcagttcttgtgattgatcagggaaccatcatcgatcggatagactacaacatacagaacgttgcagcttcagttgaggaaggttacaaacaattgcaaaaggctgagaggacccagaagaaagggggcatggtgatgtgtgccactgtccttgtcattctgatcttcatcatgatagtccttctgattttgaagaccattttctgacatacttagctatctcattttaatggttgatgaatggtggccaagcacacaccacgctcatctattcatgtgagtgaggattgcaccatgcctgcatatcaagaacgccacaaattcatttgaatagcggcgatacgactcactgatctgaagatggaaccatcttgagtcttggccacaatttttgcatcgttgcagatgtagacatgccctattcatacaggactcttaattttagagagagaaaaatctgaagaggattgtttgacacgtttcaccttccagtttgccttggagcaaccgggttaggctggctgtgtatgcctctgtatagagtgagttgtatcatacatcagggtatcggaaatcagaaagtaggttcagttcctgtgtcatctcttttctgctttatgttgtctgcccttctattttgagctagctttgaagtggcatttcattgtaccatatcctaacaattgttctgacaactttcgcccgggtagtcggatatgcaatgagattttgtgctagtgtggcgaaagggcc

SEQ ID NO: 212781 - DNA, 2357 bp, Zea Mays
ctgccacacccgccgcttatcatgcgctggcgaaggcgattgagcgagttcagcggctaatagattttcagttttatttccgggagaatgcggggtggcggcggggcttcctggctttcgtttcgcggcgtggtggtggaggaagaagaggcggtggtttcggcgccggaaaagccaatgcggcgggggcggcggaggtggggagcggaggtggacgacggctactcgccgagctccacgggcggcggcgggagcagctgctgcgattccttcggctgcgactcgcctttggccgggttcgtgcgcccagatggtgacccagacacagatctggagacagatgggttggccacttccacctccagtgcctttaccgagcggcaggacgacgaagcggaagaggcgctgtacggggtgaaggaagaggagtgggctcagatacaagaaccagccaagaatccggcattccgtgccaccccagaatgccacaaacagcggtaccggacggatgctgctgttcttttgcatggtaggaaggggtcgaaacagcggccggcctcacttgacctcggtagccctgggttccatggagccacgttttctccaagtttcgtgattggtggtgtggggttgatgaacaaaggacttggagcatcagtcatcaggtcagacgtgtttcatagtcctgggacgccgaactatccgcgccaccgtgcatcagtgttagggtgccataaagggtggagctctgagagagttccacatccttctaaaggaaataggcggtacccaggcagcagcatggcatttccttacagcaatgggaggacattgccctcgaaatgggaggatgcagagaggtggatcttcagtcccaattccagcgacgcgcttggaagaactacggttgctcatgctcggcgaccgaagtctaaaagtggccccctggggcctccaggaagacttggtggacagtattcatctgtttcttcagtgtcattgcttgataatgggagagctggacctattacagcaaattcaccttttgcggctggagtactaatgccggaacatgtttgtgaaggaaaaagtacaaatggaacctattcaagtagaccaattggtaacgaaatcaacattggaagaggagtcaaaatttgtccactgaatggtgggtctcatcctgttcgaacttccagagttcgccagcgattagattatgcagtcgaatcatctgtttcattgcctagcacgcaagaatctgtccaagacgagcaggttgaaatcacagaagattcagcttctactattgcttctataatttctagaaaagatgctgcaacccagaccagtccagagctaagtaggtcctcttcacccaacactagaccaacatttaatggttccttgtcaacagaacaagtgaaagagaaggggagctgtttgtcagatcttgatatcagggatgttcagatggatgatcgagtgactttgactaggtggtcaaagaaaaatgtaacacggtcgtctaacaagaattcaacaaacataatagagtggagcgaaaagacagtggaatcaaaatcttcgtcctggggctttgccaaagcgaagtgcatttctaagattgatagagaggacacagaaattactgcatgggagaatattgaaaaagcaaaagctgatgcagcaattcagaagttagtgattaagttagagaagaaaaggtcatcttcgcttgataagattttgaacaccctcaaatctgctcaaaggaaatcccaggtgatgcatgagcatgagcgtgatgcagtaacagcaaaccaagatggaaaaggctctaggaaggcaaaaaagagagcacaactcagcaagaatggccaaatcagttcactgagtggctgcttcacttgccatgctttctgatacatgaatcaggatccgacaaattccttcgcattccatgcaccaccttcatgttccccacatcaaaatctgggtgaagttcggagatccatcacatatcagtacataatatgatgatcccacagctggagattagacagagatctttcgaagatgctagctgcaggctccagctgctatgatagggacaatgccaaggggacaaataaaatgcagcacgaaggaaaggaggaacagtactgcgtacaccccatgtgcccgggtcgatgcctcctttatcattgtgctctgccttgtagctaggcactgtgaggctctgattgcaatcttgttgccaaagctgtatggatcatactaagagcaattccattgcacccaagggacagcaaaatcttgaggtcgggacggtgaggaggacgtgatggggcgtg

SEQ ID NO: 212782 - DNA, 2196 bp, Zea Mays
gcgagaatccccacgcgccccgtcccaccccacagtccaatatggccgcttcatccagatccaggccgctctccaagctctccccttcccacctcgtccccctcgacctctccacatcctggtgctgcacgccccacggtctcggcggccacgccccacactcctcgtcctcgtcctcctcctcgcacccctcctccccggcccgcgccgccgcccatcacatggacccgccgcccaccagctctaccgtggcctcctcctacgccactccgccccagccttcctacgcgccctcctaccctaccagctacaccaagttcaactccgcgctcaacgcggggttgctcaatcccatgtccccgccgccgctgccacttgacaagacgcgctccagccccacactcttcgacatgatggccaacgagcaggactaccacccccgcaccgccgccggcatccactccatccccgccccgccccagccgcaccagctcccgcccgcgcgctccatggacaggcagatgctgctccaggaccgcatcgccgacctcatcggcagctgtagccccgggaaccagttcaacgacgccgactcctccgacgtccgcctcaccctcagctccaaggacggcctctccgtcacgctctgcgttcaccgccacatactcgtcgcgcacagcaggttcttcgccgccaaactgtccgaccgctggtccaagcagcagcgaacgctgccgcacatcgtcgagatctccgactgcgacgacgtcgaggtgtacgccgagacgctgcggctcatgtactgcaaggatctccgccggaggctgatgcgggaggatgtgaacaaggtccttggcatcctgaaggtccgcagccattgtattcgatgccggggtgttgtcttgcttggagtacttggaggctgcgccttgggctgaggacgatgatgagaaggtggctacattgttgacgcagctgcatcttgagaactccggggctggggaggtgcttaaaagggtgtcactggaattggccccttcggcattggttgaagaggcagatgaaggaggcagctgcaacggtggcaattccagtggtggtgaggaggtattgctgaggctcctgcaagtcgttctggaagggaaggacgaaaaggcaaggagggagatgaaggggctagtgtccaaaatgctcagggagaacagcacatcccgtggtggagcaattggtggcgaccttcgcaaggaatcgctctattctgcgtgcaatggatgcttgtccctgctgtgcgagcaatttgtgagggcttcagagggtgatcactcagaggtggcgcggatcgcaaggcaggctgacaacctgcattggatgcttgacatccttgttgagcgccagatcgcggaggatttcttgaggacatgggcaacgcagactgagttagcggcgatgcatcgtaaagtgccagcgatacaccgctacgaagtgagccgagtgacggcaagactctttgttggggttggcaagggtcagatcttggtgtccaaggaggcccgttgccagctcttgagcacctggctagagcccttttacgaggacttcggatggatgcggcgagcatgcaaggggcttgaccggcatttgatcgaggatggactggcaaacacaatcctgacgctgcctcttgcaactcagcaggagatccttctggcatggtttaatcggttcctcaactctggggaggattgcccaaacattcagagagggtttgaggtgtggtggcggcgggcattctggaaaaggaactctgagccagaaccaccatcccgtttgaggattactgcgatctgcgagaactcttgatgacgacggttcatattcgacatggaatgtggcggatgttgtgatataattattgattttctgtgatatgtagtagtgtctagctgtttctcagtttttttttgttatgtctgattaggcagttagccaattacacatgtcatcttgatcctgtttcaatgcaatgtataccaggtacaatgtactactatgccgcaaccattttgattcgaagtgaagtagagtgactatttgtggtttgctatatagcataagcaaacaatggaaggattcagacacatctggagtttggaaatggttgcacatctggggtttggaaatggttgtcctgaggcc

SEQ ID NO: 212783 - DNA, 2490 bp, Zea Mays
gcgctagcagcagcagagatcgaccggccatcgccgttttataaaaagagagtccagcggtagccgtcgctgacggacgcccccctcccagacctccgcccggatctcgccgcctctcccgcccctgctcgcgagccgccgtcgacagccaccgccatgggcacggccaacggccagcagccggcagagggcgctccctctgacaagctccgccacgtcgagtccatgtcggagctgccctccggcgccggcaagatctcggggatcaacgccgtcgtgctcggggagtcgctcgccgccgaggagaacgacctcatcgtccccagccccgagttctctgccagcgccctcgtctcttctccgaaacagtatcgcgagatgtatgagaggtccattaaggacccggccgggttctggtcggagattgccgagaccttttactggaaggagaagtggaaccccgccgaggtctgctcggagaacctcgatgtcaccaagggacccgtccagatcaactggttcaagggagggaaaaccaacatatgttacaacgctgttgaccgcaacatcgagtctggcaatggcgacaaggttgcaatgtactgggagggtaatgagcccggtcaggatgggaagcttacctattccgagctcctggagaaggtttgccagcttgcaaattacttgaagagccttggtgtcggcaagggtgatgctgttattatatacctaccaatgttgctggagcttcccattgccatgcttgcctgtgcccgcattggtgccgttcactcggttgtgtttgctggcttctcagcagattcgctagctcaaaggattgtcgattgcaagcctaagcttgtcatcacgtgcaatgctgtgaagcggggagtcaagcccatctttctcaaagatatagtggatgcagctttggttgaaagtgagaagaatggagtctctgtaggtctctgtttgacgtatgaaaaccagtcagccatgaagagggaaaacacaaaatggcaagcagaaagggatgtttggtggcaggacgttgtcacaaaatttccaaccaaatgtgatgtggagtgggtggatgcagaggatccattgttccttttgtacacaagtggcagcacagggaagccaaagggtgtactgcatacttctgggggctacatggtgtacactgcaacaacatttaagtacgcatttgactacaagccaactgacatatactggtgcactgcagactgtggctggattactggacatagttatgtaacatatggtcctctcctgaatggtgctacggttctcgtttttgaagggacgccgaactaccctgattcgggccgatgctgggatattgtggacaagtacaatgtgacaatattttatactgccccaactcttgttcgttcactcatgcgtgatggcactgagtatgttacacgttactctcgaaagtctctccgagtcctgggaagtgttgatggttctacaatactgttggggattcccggtgccctatatcagacacctggtggcaaactgaaactggcggtttcatgatcacccctttgcctggcgcctggcctcaaaaaccaggttctgcaacctttcctttctttggtgttcagccggtcattgttgacgagaaagggcaagagattgaaggggaatgtagtggatatctttgcataaagaaatcatggcctggggctttccggactctgtatggagatcatgagagatacgagaccacgtacttcaaaccatttgctgggtactatttcactggtgatggttgcagcagagacaaagatggttaccactggctgactggaagagtagatgatgtcatcaatgtcagtggacaccgaatcggcacagcagaggttgagtcagctttagtgtcacatccacagtgtgcagaggctgctgttgttggtgttgagcatgaggtcaaaggtcaaggaatttatgcttttgtaactttggtggatggtgttccgtatagtgaggaactacgaaaaagcctcataatgacagtgcgcaaccagattggggcatttgcagctcctgacaagatccactgggcaccgggacttcctaaaacccggagtggcaagatcatgcgaaggattttgcgcaagattgctgcacggcaactggatgaacttggggacataagcaccctcgctgaacctgctgtagttgaccagcttatttcgctcagcaattgttaggttgcaacgtaattggatggtggatacatccttgagcgcatgttgcgtttgtctgtaatatgagtagaaggtgcatttcaatatcgagaactcaagtgggacgtggtgacatgttgtcgatgtttccttttaaacttttgtatcagatatcaagataggtccatcagaatgtattattgattgacacagacaaatatatcaataaaattgttaatttttcatttggtttcgtttggataaa

SEQ ID NO: 212784 - DNA, 1092 bp, Zea Mays
gtttgacacagtctatctgcaaaagtgtaataacccagatctgggtgctattgctaggagggcttggattgggtgctttgttagatgtgtgggcaggacatgattttcctattgtgttttatcttgctgtgggtggctccttactttcttacatatattcagcaccacctctcaagctcaagcagaatggatggattgggaacttcgctctgggtgcgagttacatcagcttgccctggtgggctggccaggcgttatttggaactcttacaccagatatcattgtcttgactactttgtacagcatagctgggctagggattgctattgtaaatgatttcaagagtattgaaggggataggactctggggcttcagtcacttcctgttgcttttgggatggaaactgcaaaatggatttgtgttggagcaattgatatcactcaattatctgttgcaggttacctattgagcaccggtaagctgtattatgccctggtgttgcttgggctaacaattcctcaggtgttctttcagttccagtacttcctgaaggaccctgtgaagtatgatgtcaaatatcaggcaagcgcacaaccattcttcgtactgggcctactggtgacagcactggcaaccagccattaatgaaggcaaacttaaacagaacgagcaaccgttctgataccgaagaggcacgtctggtgaccattaataagctagctgcttgtgtgcagggtaggaagagaacgtctttttacttgtagaacacagatcgattttgtaagggttatgtggtgggaggaaaagttagcaatagcactggatgttgttgtagtaggatctgtagttgcacggtaagatcgttacttcgccattgttagcggttgaactggcaatgctttgaacaaacagttttgtgtatcggccgtattgttgtatgatcaaccctggaagattgtacaacctccgttctgagtatttgcacctcgttctcgagtatttgtatttttcgtctgttagcacgtggataccatgtatgttgttcgacaacaattagttgtctactggactggtgcactagatccattat

SEQ ID NO: 212785 - DNA, 1044 bp, Zea Mays
gtttgacacagtctatctgcaaaagtgtaataacccagatctgggtgctattgctaggagggcttggattgggtgctttgttagatgtgtgggcaggacatgattttcctattgtgttttatcttgctgtgggtggctccttactttcttacatatattcagcaccacctctcaagctcaagcagaatggatggattgggaacttcgctctgggtgcgagttacatcagcttgccctggtgggctggccaggcgttatttggaactcttacaccagatatcattgtcttgactactttgtacagcatagctgggctagggattgctattgtaaatgatttcaagagtattgaaggggataggactctggggcttcagtcacttcctgttgcttttgggatggaaactgcaaaatggatttgtgttggagcaattgatatcactcaattatctgttgcaggttacctattgagcaccggtaagctgtattatgccctggtgttgcttgggctaacaattcctcaggtgttctttcaggcaagcgcacaaccattcttcgtactgggcctactggtgacagcactggcaaccagccattaatgaaggcaaacttaaacagaacgagcaaccgttctgataccgaagaggcacgtctggtgaccattaataagctagctgcttgtgtgcagggtaggaagagaacgtctttttacttgtagaacacagatcgattttgtaagggttatgtggtgggaggaaaagttagcaatagcactggatgttgttgtagtaggatctgtagttgcacggtaagatcgttacttcgccattgttagcggttgaactggcaatgctttgaacaaacagttttgtgtatcggccgtattgttgtatgatcaaccctggaagattgtacaacctccgttctgagtatttgcacctcgttctcgagtatttgtatttttcgtctgttagcacgtggataccatgtatgttgttcgacaacaattagttgtctactggactggtgcactagatccattat

SEQ ID NO: 212786 - DNA, 602 bp, Zea Mays
cttatgtctaacactgcatgtctgaaacatgaacaacgtagcggagttccagtacttcctgaaggaccctgtgaagtatgatgtcaaatatcaggcaagcgcacaaccattcttcgtactgggcctactggtgacagcactggcaaccagccattaatgaaggcaaacttaaacagaacgagcaaccgttctgataccgaagaggcacgtctggtgaccattaataagctagctgcttgtgtgcagggtaggaagagaacgtctttttacttgtagaacacagatcgattttgtaagggttatgtggtgggaggaaaagttagcaatagcactggatgttgttgtagtaggatctgtagttgcacggtaagatcgttacttcgccattgttagcggttgaactggcaatgctttgaacaaacagttttgtgtatcggccgtattgttgtatgatcaaccctggaagattgtacaacctccgttctgagtatttgcacctcgttctcgagtatttgtatttttcgtctgttagcacgtggataccatgtatgttgttcgacaacaattagttgtctactggactggtgcactagatccattat

SEQ ID NO: 212787 - DNA, 1517 bp, Zea Mays
gcattccccaccgacaaactctaacaccgatctgagagagggtgcgcagctagcaacaggaagacaccatcgttcttagccgtcgccagcctcgctgcatcgaccatagctgccctagcgcagatcttcaccaacgaacctgatggcgactggatctgcatcctccaacacgcctgcgctttctactgacggatcaaaaccttgataaaggtaaagcttctcgcccttgaaggtcttgtcaccatattccatgacgtgagagcctgcaccatagctattgaagtctgaagtacgcttcttcacctgtgcacaatgctgtgactaagtacaagtttataaagcgatcaaatgaaatgcctagaagtacgatgaatgcatcaaggactgtgataaggctgtggagaggggaagagaacttcgtgctgatttcaagatgatctcaagggcactgacaagaaaaggaacagctctagtcaagcttgctaagacctctaaggattttgatattgccatcgagacctaccagaaggctctaactgagcatcggaacccagacactcttaaaaagttgaatgaggctgagagagcgaaaaaagagttggagcaacaagagtactatgatccaaaattagcagatgaggagagagagaaaggcaacgagttcttcaaggagcaaaaatacccagaagcaataaaacactacacggaggctctcaagagaaacccaaaggatcctagggtttacagcaatagggctgcctgctacaccaagttaggagccatgcctgaaggtcttaaagatgcagagaagtgtcttgaactagaccccaccttcactaaagggtacacaaggaaaggtgcaattcaattcttcatgaaagaatatgacaaggccatggaaacctatcaggctggcctgaagcatgacccgaaaaaccaggaactgcttgatggtgttaggaggtgcattgaacaaattaacaaggctaacagaggtgaaataagtcaggatgaattgcaagaaagacagaacaaagctatgcaagacccagagatccagaacattcttaccgaccctatcatgagacaggtgctaaatgatttccaggagaacccaagggcggcccaggagcacctgaagaaccctggagttatgcaaaagattcagaagcttgtaagtgctgggatagtccaaatgagatgatcaggcacacgatgcgattgtacctgcttgttcgtcccttgtgcttggctttgttagttaacgtgccctttaacaagcagcgacggcaaaagaatgaggggctaatcttttttcccaattggattgtaagtgcagttaacattggattattcatgtttgtggcagagtctgagtataggcgccgtcttgctttattgatgctggactttgcgtgcttgtgggtgggggttggttccctagctaaagtttagttcatgtcccattaaatatttgaatataatatatatttaattaggtttcataaaattttctc

SEQ ID NO: 212788 - DNA, 1188 bp, Zea Mays
gtttggatgtttgttatccttaaaaaggaactgacgagctaacagttctgctgctttcgcactggttaaaacaagaattctactgacatgacaacattggcaaccacttacataatacctgtggacttgaacacatttctttttaagatggagctggatattggtgccttggctaaagtcgtaggagataatgcgacttcagaattttttttaaatgcttcgaaagcacgtcatattgcaattgactctattttgtggaactctgagatggaacagtggcttgactattggcttcctggtgatgcagactgtcaggaagtacacgaatggaagcctaactcacagaaccgcaacatatttgcttccaacttcgttccgctgtggctaaatgcataccattccgagtcatggcgagcctcaaggcatctggattacttcatgccgcagggatagcaacttccctgacaaacacgagccaacaatgggatttcccgaatggatgggccccactgcagcatcttatagctgaggggctgctgcattctggatcagaggccaaaaaactagctgaggacattgctacgaggtgggtgagaacgaactacgccgcttacaaagcaacgggtgcgatgcatgagaagtacgatgttgaggcttgtggagaatctggaggcggtggagaatacaagccccagactggttttggctggtccaatggcgtggtgttgtcattcttggaagaattcgggtggccagagggcaaggaaatagcttgttgagcggcgaagcgctcacgacagggtggatctggtcttgccggagagcaatctggttaggcatcgttcatgtcacacatgtctagctacgagagtggcgcattgccttctgcagttcgtcaagtgcgtttgtgtgttcttgtttgcttttagttgcgactaggctgtagatccttcttgtatcacaacaatatatgtactgctactgtaccggccccggcctcttgtttaatctgaaatgctcattgtatatcctcttacgaaacgcaaacacgtgctttggcacgttcgtcgtcgaaaagagaagagaatataccattttgctctcttgaatacaaaatcagtgcatcgttctagatctcgcccacagggcgtggactggcagactgttggccccttttctgttcaaata

SEQ ID NO: 212789 - DNA, 1918 bp, Zea Mays
cttctcctgcctgatccgcccccgctcgcttggtttcatcgccgctttgctccttactactatatttaagttttggacgaaatggtagttctagatcacccaccggatcacgtacaataatccgtggttttttttccattggggtttgggaggggcaaattgatgaatccaggtcctgtcgtcctgacatggagttcgatagtacgtgttcttctcccgttagttgtcgctgctgcggtcccacataggattgctggtgagcaaaatgtacgacacggcaaagactattgtgcttaaccttgtatacctgttggaaaaatatggtttcgttccaaatggtgcaagatcctactacactaaccgaagccaaccaccacttttgagctccatggttttagaaatatacagggcaactggtgatgtggagtttgttaggacagtattccactctctgcttaaagagcatagcttctggatgtcagagattcataatgttgctatagcagacaatcatggtcgggtccataatttatctcggtatcaggccaggtggaacaaacctaggcctgaaagtgcgacaattgatgaggaactggcttcgaagttgaattctatggcagctaaggaaaaactgtactgcgaaattgcttcaacggcagaatcgggatgggatttcagctctcgatggatgaggtttggatgtttgttatccttaaaaaggaactgacgagctaacagttctgctgctttcgcactggttaaaacaagaattctactgacatgacaacattggcaaccacttacataatacctgtggacttgaacacatttctttttaagatggagctggatattggtgccttggctaaagtcgtaggagataatgcgacttcagaattttttttaaatgcttcgaaagcacgtcatattgcaattgactctattttgtggaactctgagatggaacagtggcttgactattggcttcctggtgatgcagactgtcaggaagtacacgaatggaagcctaactcacagaaccgcaacatatttgcttccaacttcgttccgctgtggctaaatgcataccattccgaattcgtacgctttgctgatgaggcaaaatcaaacagagtcatggcgagcctcaaggcatctggattacttcatgccgcagggatagcaacttccctgacaaacacgagccaacaatgggatttcccgaatggatgggccccactgcagcatcttatagctgaggggctgctgcattctggatcagaggccaaaaaactagctgaggacattgctacgaggtgggtgagaacgaactacgccgcttacaaagcaacgggtgcgatgcatgagaagtacgatgttgaggcttgtggagaatctggaggcggtggagaatacaagccccagactggttttggctggtccaatggcgtggtgttgtcattcttggaagaattcgggtggccagagggcaaggaaatagcttgttgagcggcgaagcgctcacgacagggtggatctggtcttgccggagagcaatctggttaggcatcgttcatgtcacacatgtctagctacgagagtggcgcattgccttctgcagttcgtcaagtgcgtttgtgtgttcttgtttgcttttagttgcgactaggctgtagatccttcttgtatcacaacaatatatgtactgctactgtaccggccccggcctcttgtttaatctgaaatgctcattgtatatcctcttacgaaacgcaaacacgtgctttggcacgttcgtcgtcgaaaagagaagagaatataccattttgctctcttgaatacaaaatcagtgcatcgttctagatctcgcccacagggcgtggactggcagactgttggccccttttctgttcaaata

SEQ ID NO: 212790 - DNA, 2698 bp, Zea Mays
atccttattacgagtagaaggacaagtctggtgcagtggtgagacctgcctcactgagtcgccaggttgtggttcgaagcagcctcttgcatttgcagggaaagtcttgctttggttgatctcttctgcagaccccactcacgtgggagccttcggcactgggtctgccttttttatttagtgatctgcatatgtacactgcactcagcagaagaaagtacacttctgtcttgtagtaacataacatttgtaggttttggttagtcttcacccacgcatacatgatcaaccagcagcctggtttcttctttaggttgatgtcccaacagctgctgtttctgctttatccttattgagacatgacgattcattcatcagaaggccaacttgggatgtaggctggtcattggctgatgctaatcagaaacaggttgaaaatgacagcagatcttccctcgagtctaacaggaataattcatctttggagtcagtagactcattgatgttggccaagtctgccacaagaattgctattctaggaatttcaacctccaatttaaatgatgcaagacgtatcaatgtttcagtgatgcaacaacgaggggaccctttgcttatagtaggatctccatttggcctcatgtcacccttccatttcttcaacagtgtatcagttggtgctgttgcaaattgccttcctccatgcactgcaaggagctcattactgatggctgacatgcactgtctccctggcatggaaggcgctccagtgtttgaccaaaattcttgcctcgtggggctgctgatgaacccattaacacagaaaggcagcaatatagaagtccagctcgtgattacatgggatgcaatatgcacggaatggaacagcaaaaaactggaggaaattgaacgacccccaagaaaactacctaatgacaaaaatacagatagtaaatctatggaattacggcatgtatataactatgtgagggttttctcttctacggacaacaaaactaatcagcattgcatatcaccccgttcgctcagagaggctatatctgcagttgttcttgtcacggttggtgatacgtcttgggcttcaggtattgttctgaacaaaaggggtttagttctgacaaatgctcatctcttggaaccttggagatttggaagaacttcaccttcagatttacaagcctcgttcgctggagaacatctcaatgctggagaaaacaaatcattgcaaccacaacaaggcaaaatttccaatgaagatgctgtcaagcataaggtttcgtcatttaacttgggtttcaaaagagggaagagaatatctgttcgtttggaccatgaagagagacagatatggtgcaatgctagtgtggttttcatctcaaagggtccacttgatgttgcattgcttcaaatagaaaaggttccagttgaattaaatacaatcagaccagaatttgtttgtccaacagcagggtcgcctgtttatgttgttgggcatggcctttttggaccccgatcaggcctacactcttctctatactcgggggttgtgtcaaaggttgtccaaatcccagcaaatcaactttctcatctggcccgtgctgaggctgacaatatggacataccagtaatgcttcagacaacagcagcagttcatccaggagccagtggcggcgttcttgttaatacacatgggctaatggttgggataataacaagtaatgctaagcatggtggtggaagcacaatacctcatctgaatttcagcatcccctgcaaattactggttgcagtcttcgagtattcagcaaatggaaacctcgtggttttggagcagttggacaaaccaaatgaagtgctctcatcagtttgggcattggcaccatcatcatccccatttgtcaggagctccccagaaaaaggcaaagaggaaaaggtcttggagttctctaagtttcttagtgacaagcaacaagctctgaaatctaacgtagatctgaaggaactatttaggtacaagactcccagcaaaatatagagtgcgtccactagaattcatacaaggaaaatgtttgttcccagaattttgtatgagacgtttgatcccagaaatccccagtacaaaatgagttatcagagcacagtgccttttttttacagatggttaaggcataagcatcttttcttcgagtgtcaggtagcgcgggctatatggcatactgttcaaatcgctacaatttttaccctccctctagtgtcgtgaatatgtttaggtcatagctagggggattggtaaagatttaaaattgttagctcttttaggggcagcagcagtttgttgggccatttgacattgcgtttcaaagaaaatatgtgacaaactctttacaggttcttcgtttggttattcactggctccgttcctaggttgtgctacagaagcctatctttcaggagttggttttggctacctgacaacgtttggagcaaatggtcaggttgttttttacctaggctcgcgggtggcaatctagtcttaggattgatttctactagagttattaggttgttagtcttctttagactgtgtgcatctagcgcgatgtagaagttttgttgtcaagaaagttgtgacttatggttatcttgatgcaataaattttctcttctcgaaaaaaat

SEQ ID NO: 212791 - DNA, 2689 bp, Zea Mays
atccaaacagctttcaaggagaagcgtacagtccctgctatacagctctcgtcggggtcttctcccccttcggcccttcccccctccctgcgcgccatggaggcccaggagatcgccgctgcagcgcgccacttctgcgccatggaccccaaggccgtgaagatgcgccgccacgcctttcattttcaccattcggggtcgaccacgctctcggcgtcggctctgctcctgccgcggggcgctttagcggagccgccgctacttctcgaccatatctgctcggcccacgggcacgcggcaggagacgtcgcgctcacggctgcttccctcgtcgagccgttcctggtcgcggagcagcgcaataactccggcgaggagcttcagccgaggttggttccggagacgcgtcttgatgtgtttgttgagtatgagttggggaatgctcaagatgggaagtctggacctccgcggtggcttccagctcgactgcttgccatggttgatgtcccaacagctgctgtttctgctttatccttattgagacatgacgattcattcatcagaaggccaacttgggatgtaggctggtcattggctgatgctaatcagaaacaggttgaaaatgacagcagatcttccctcgagtctaacaggaataattcatctttggagtcagtagactcattgatgttggccaagtctgccacaagaattgctattctaggaatttcaacctccaatttaaatgatgcaagacgtatcaatgtttcagtgatgcaacaacgaggggaccctttgcttatagtaggatctccatttggcctcatgtcacccttccatttcttcaacagtgtatcagttggtgctgttgcaaattgccttcctccatgcactgcaaggagctcattactgatggctgacatgcactgtctccctggcatggaaggcgctccagtgtttgaccaaaattcttgcctcgtggggctgctgatgaacccattaacacagaaaggcagcaatatagaagtccagctcgtgattacatgggatgcaatatgcacggaatggaacagcaaaaaactggaggaaattgaacgacccccaagaaaactacctaatgacaaaaatacagatagtaaatctatggaattacggcatgtatataactatgtgagggttttctcttctacggacaacaaaactaatcagcattgcatatcaccccgttcgctcagagaggctatatctgcagttgttcttgtcacggttggtgatacgtcttgggcttcaggtattgttctgaacaaaaggggtttagttctgacaaatgctcatctcttggaaccttggagatttggaagaacttcaccttcagatttacaagcctcgttcgctggagaacatctcaatgctggagaaaacaaatcattgcaaccacaacaaggcaaaatttccaatgaagatgctgtcaagcataaggtttcgtcatttaacttgggtttcaaaagagggaagagaatatctgttcgtttggaccatgaagagagacagatatggtgcaatgctagtgtggttttcatctcaaagggtccacttgatgttgcattgcttcaaatagaaaaggttccagttgaattaaatacaatcagaccagaatttgtttgtccaacagcagggtcgcctgtttatgttgttgggcatggcctttttggaccccgatcaggcctacactcttctctatactcgggggttgtgtcaaaggttgtccaaatcccagcaaatcaactttctcatctggcccgtgctgaggctgacaatatggacataccagtaatgcttcagacaacagcagcagttcatccaggagccagtggcggcgttcttgttaatacacatgggctaatggttgggataataacaagtaatgctaagcatggtggtggaagcacaatacctcatctgaatttcagcatcccctgcaaattactggttgcagtcttcgagtattcagcaaatggaaacctcgtggttttggagcagttggacaaaccaaatgaagtgctctcatcagtttgggcattggcaccatcatcatccccatttgtcaggagctccccagaaaaaggcaaagaggaaaaggtcttggagttctctaagtttcttagtgacaagcaacaagctctgaaatctaacgtagatctgaaggaactatttaggtacaagactcccagcaaaatatagagtgcgtccactagaattcatacaaggaaaatgtttgttcccagaattttgtatgagacgtttgatcccagaaatccccagtacaaaatgagttatcagagcacagtgccttttttttacagatggttaaggcataagcatcttttcttcgagtgtcaggttcttcgtttggttattcactggctccgttcctaggttgtgctacagaagcctatctttcaggagttggttttggctacctgacaacgtttggagcaaatggtcaggttgttttttacctaggctcgcgggtggcaatctagtcttaggattgatttctactagagttattaggttgttagtcttctttagactgtgtgcatctagcgcgatgtagaagttttgttgtcaagaaagttgtgacttatggttatcttgatgcaataaattttctcttctcgaaaaaaat

SEQ ID NO: 212792 - DNA, 591 bp, Zea Mays
gccaaatctcctttttggaaaggagacaccgacaaatccgaatccctgagagttcagaaaccgagccactgcggggcaagaataacagtggcaggagtgatgctcctgagcatgaagcgaggccaccacgacctaagagccgaactttttcgtccaaatgaaagaaaaagggcatattaggaggtatatggtagacgctgagacgcgcaatgtgggaagcaggaaatctcagcttcgatacatgacgacacagattgatggattttttttcgttcttggatgtgatgcttgacaatacatttttgtgttccttgacacatgtacagtggcgtgtggtagttgaagggtgtatagttgtattacttagttcctagttcgtaaaaaaaaacttcaaaagaagaatgcattcctaccaaaaaagggaaagggaaaaaagatgggcgtctgtggtggtcggttgcagcaactgttgtctggttgctatgaactccaaagtgcatgaagagatcaatgtaaccttggatgatgtttgtgtttgtttcgtttactcgtagaatataaaggggagatagaagaattggcttcactttc

SEQ ID NO: 212793 - DNA, 809 bp, Zea Mays
ttacaactcactgaagaagataaaggtaaacctggttgactggcttaaaatgatggttgccaacagacgttctgaacaagtggtggacccaaaccttgagagaaggccttcgacaaaggagctgaaacgtgcccttttgactgctctgaggtgtatcgatttgaatgctgagaagaggcctagcatggaccaggtggtccggatgttggattctaatgaactcataccgcaagaggaaaggagacaccgacaaatccgaatccctgagagttcagaaaccgagccactgcggggcaagaataacagtggcaggagtgatgctcctgagcatgaagcgaggccaccacgacctaagagccgaactttttcgtccaaatgaaagaaaaagggcatattaggaggtatatggtagacgctgagacgcgcaatgtgggaagcaggaaatctcagcttcgatacatgacgacacagattgatggattttttttcgttcttggatgtgatgcttgacaatacatttttgtgttccttgacacatgtacagtggcgtgtggtagttgaagggtgtatagttgtattacttagttcctagttcgtaaaaaaaaacttcaaaagaagaatgcattcctaccaaaaaagggaaagggaaaaaagatgggcgtctgtggtggtcggttgcagcaactgttgtctggttgctatgaactccaaagtgcatgaagagatcaatgtaaccttggatgatgtttgtgtttgtttcgtttactcgtagaatataaaggggagatagaagaattggcttcactttc

SEQ ID NO: 212794 - DNA, 2496 bp, Zea Mays
gagcacggcccggcacgaggccgcccgccagtgccagtgccagtgccggtccctccctctcttggctggtgctggcctggatcctccacgcgacgccgccgcggctcccttctcgtctcgtcgtccagtggtgggtggtggcggtggtggtggagtgcagatccgcgcatccgtacgtggattgccttccgtctttgcccattgctgttggccagtcggcgtggatttgagagctgcgtgtgtgtgtgtgcatccgtggtttggttacttctccggcactcaagatcgaagtcgcaggacttgtttgggttcaactgaactcccgtgtcctgcgccaggaccgccactgatgagacactcagatttaggatggctttcatccgccgccattgctgagcttctccagtaaagactggaatttttcgccgcgccaacctttaactgtatttcatgatacaaaaaaatgtcatcagactccagtctaaccgaatccctacatgagagaacaattgtctttggccttaaactttgggttgtgattgggatcgctgttggagcgtccctcttgggtattcttctcattcttctcatatgccttaccattcaaagttgtatcaagaggtcacgcaagccactcaatgaccgtcgactgcaccagatccctccagcgtacaaagatatcaaggaagtggggatggtagaccaatttcctgccaaagattttgttgtacatgatgggcttctactcactattcagaatgggcctgagcctgttgaaccagttgatagagatgcgattcagttggctcaggaggaaaagttgaaacaaagagaagagaccaatgtctctgcttcttttcccattatggatggctgcgagggaactcagattgtttctgtcgatgaacagtcttccacgcacgctactgttgactctgcaccattggcaggtttacctgaattttcttatcttggttggggccattggttcactctcagagatctagaccttgcaactgaccattttgcaaaggataatgtaattggtgagggtgggtatggtgttgtatatcgtggcagattatcaaatggcaccccagttgctgtcaagaaaatccttaacaatttaggacaggctgagagagaattcagagtggaagtcgaggcaattggccatgttcgtcacaagaatttggtccgccttttgggttactgtgttgagggtactcaaaggatgcttgtgtatgagtatgtgaataatggaaatcttgaaagttggctccatggggaattgtcccagtacagttctctcacttggttggctcgcatgaaaatccttctgggaactgcaaaggcgtgaccttgcttacttacatgaggcaattgaaccaaaagttgtgcaccgtgacatcaagtccagcaatatcttgattgacgatgagtttaatgccaaaatatcagactttggtttggccaagatgcttggtgctggtaaaagccatattgctacacgagttatgggtacctttggctatgttgcacctgaatatgctaacagtggacttctaaatgaaaagagtgatgtctatagctttggggttgttctgttggaagctattacaggtagagatccaattgattatgatcgccctacaaatgaggtaaacctggttgactggcttaaaatgatggttgccaacagacgttctgaacaagtggtggacccaaaccttgagagaaggccttcgacaaaggagctgaaacgtgcccttttgactgctctgaggtgtatcgatttgaatgctgagaagaggcctagcatggaccaggtggtccggatgttggattctaatgaactcataccgcaagagcatatctgtatctgatatgggatgatatgtcccctgcctggagtatcgagggaaaggagacaccgacaaatccgaatccctgagagttcagaaaccgagccactgcggggcaagaataacagtggcaggagtgatgctcctgagcatgaagcgaggccaccacgacctaagagccgaactttttcgtccaaatgaaagaaaaagggcatattaggaggtatatggtagacgctgagacgcgcaatgtgggaagcaggaaatctcagcttcgatacatgacgacacagattgatggattttttttcgttcttggatgtgatgcttgacaatacatttttgtgttccttgacacatgtacagtggcgtgtggtagttgaagggtgtatagttgtattacttagttcctagttcgtaaaaaaaaacttcaaaagaagaatgcattcctaccaaaaaagggaaagggaaaaaagatgggcgtctgtggtggtcggttgcagcaactgttgtctggttgctatgaactccaaagtgcatgaagagatcaatgtaaccttggatgatgtttgtgtttgtttcgtttactcgtagaatataaaggggagatagaagaattggcttcactttc

SEQ ID NO: 212795 - DNA, 2230 bp, Zea Mays
gagcacggcccggcacgaggccgcccgccagtgccagtgccagtgccggtccctccctctcttggctggtgctggcctggatcctccacgcgacgccgccgcggctcccttctcgtctcgtcgtccagtggtgggtggtggcggtggtggtggagtgcagatccgcgcatccgtacgtggattgccttccgtctttgcccattgctgttggccagtcggcgtggatttgagagctgcgtgtgtgtgtgtgcatccgtggtttggttacttctccggcactcaagatcgaagtcgcaggacttgtttgggttcaactgaactcccgtgtcctgcgccaggaccgccactgatgagacactcagatttaggatggctttcatccgccgccattgctgagcttctccagtaaagactggaatttttcgccgcgccaacctttaactgtatttcatgatacaaaaaaatgtcatcagactccagtctaaccgaatccctacatgagagaacaattgtctttggccttaaactttgggttgtgattgggatcgctgttggagcgtccctcttgggtattcttctcattcttctcatatgccttaccattcaaagttgtatcaagaggtcacgcaagccactcaatgaccgtcgactgcaccagatccctccagcgtacaaagatatcaaggaagtggggatggtagaccaatttcctgccaaagattttgttgtacatgatgggcttctactcactattcagaatgggcctgagcctgttgaaccagttgatagagatgcgattcagttggctcaggaggaaaagttgaaacaaagagaagagaccaatgtctctgcttcttttcccattatggatggctgcgagggaactcagattgtttctgtcgatgaacagtcttccacgcacgctactgttgactctgcaccattggcaggtttacctgaattttcttatcttggttggggccattggttcactctcagagatctagaccttgcaactgaccattttgcaaaggataatgtaattggtgagggtgggtatggtgttgtatatcgtggcagattatcaaatggcaccccagttgctgtcaagaaaatccttaacaattaggacaggctgagagagaattcagagtggaagtcgaggcaattggccatgttcgtcacaagaatttggtccgccttttgggttactgtgttgagggtactcaaaggatgcttgtgtatgagtatgtgaataatggaaatcttgaaagttggctccatggggaattgtcccagtacagttctctcacttggttggctcgcatgaaaatccttctgggaactgcaaaggcccttgcttacttacatgaggcaattgaaccaaaagttgtgcaccgtgacatcaagtccagcaatatcttgattgacgatgagtttaatgccaaaatatcagactttggtttggccaagatgcttggtgctggtaaaagccatattgctacacgagttatgggtacctttggctatgttgcacctgaatatgctaacagtggacttctaaatgaaaagagtgatgtctatagctttggggttgttctgttggaagctattacaggtagagatccaattgattatgatcgccctacaaatgaggaaaggagacaccgacaaatccgaatccctgagagttcagaaaccgagccactgcggggcaagaataacagtggcaggagtgatgctcctgagcatgaagcgaggccaccacgacctaagagccgaactttttcgtccaaatgaaagaaaaagggcatattaggaggtatatggtagacgctgagacgcgcaatgtgggaagcaggaaatctcagcttcgatacatgacgacacagattgatggattttttttcgttcttggatgtgatgcttgacaatacatttttgtgttccttgacacatgtacagtggcgtgtggtagttgaagggtgtatagttgtattacttagttcctagttcgtaaaaaaaaacttcaaaagaagaatgcattcctaccaaaaaagggaaagggaaaaaagatgggcgtctgtggtggtcggttgcagcaactgttgtctggttgctatgaactccaaagtgcatgaagagatcaatgtaaccttggatgatgtttgtgtttgtttcgtttactcgtagaatataaaggggagatagaagaattggcttcactttc

SEQ ID NO: 212796 - DNA, 2403 bp, Zea Mays
gagcacggcccggcacgaggccgcccgccagtgccagtgccagtgccggtccctccctctcttggctggtgctggcctggatcctccacgcgacgccgccgcggctcccttctcgtctcgtcgtccagtggtgggtggtggcggtggtggtggagtgcagatccgcgcatccgtacgtggattgccttccgtctttgcccattgctgttggccagtcggcgtggatttgagagctgcgtgtgtgtgtgtgcatccgtggtttggttacttctccggcactcaagatcgaagtcgcaggacttgtttgggttcaactgaactcccgtgtcctgcgccaggaccgccactgatgagacactcagatttaggatggctttcatccgccgccattgctgagcttctccagtaaagactggaatttttcgccgcgccaacctttaactgtatttcatgatacaaaaaaatgtcatcagactccagtctaaccgaatccctacatgagagaacaattgtctttggccttaaactttgggttgtgattgggatcgctgttggagcgtccctcttgggtattcttctcattcttctcatatgccttaccattcaaagttgtatcaagaggtcacgcaagccactcaatgaccgtcgactgcaccagatccctccagcgtacaaagatatcaaggaagtggggatggtagaccaatttcctgccaaagattttgttgtacatgatgggcttctactcactattcagaatgggcctgagcctgttgaaccagttgatagagatgcgattcagttggctcaggaggaaaagttgaaacaaagagaagagaccaatgtctctgcttcttttcccattatggatggctgcgagggaactcagattgtttctgtcgatgaacagtcttccacgcacgctactgttgactctgcaccattggcaggtttacctgaattttcttatcttggttggggccattggttcactctcagagatctagaccttgcaactgaccattttgcaaaggataatgtaattggtgagggtgggtatggtgttgtatatcgtggcagattatcaaatggcaccccagttgctgtcaagaaaatccttaacaatttaggacaggctgagagagaattcagagtggaagtcgaggcaattggccatgttcgtcacaagaatttggtccgccttttgggttactgtgttgagggtactcaaaggatgcttgtgtatgagtatgtgaataatggaaatcttgaaagttggctccatggggaattgtcccagtacagttctctcacttggttggctcgcatgaaaatccttctgggaactgcaaaggcccttgcttacttacatgaggcaattgaaccaaaagttgtgcaccgtgacatcaagtccagcaatatcttgattgacgatgagtttaatgccaaaatatcagactttggtttggccaagatgcttggtgctggtaaaagccatattgctacacgagttatgggtacctttggctatgttgcacctgaatatgctaacagtggacttctaaatgaaaagagtgatgtctatagctttggggttgttctgttggaagctattacaggtaaacctggttgactggcttaaaatgatggttgccaacagacgttctgaacaagtggtggacccaaaccttgagagaaggccttcgacaaaggagctgaaacgtgcccttttgactgctctgaggtgtatcgatttgaatgctgagaagaggcctagcatggaccaggtggtccggatgttggattctaatgaactcataccgcaagaggaaaggagacaccgacaaatccgaatccctgagagttcagaaaccgagccactgcggggcaagaataacagtggcaggagtgatgctcctgagcatgaagcgaggccaccacgacctaagagccgaactttttcgtccaaatgaaagaaaaagggcatattaggaggtatatggtagacgctgagacgcgcaatgtgggaagcaggaaatctcagcttcgatacatgacgacacagattgatggattttttttcgttcttggatgtgatgcttgacaatacatttttgtgttccttgacacatgtacagtggcgtgtggtagttgaagggtgtatagttgtattacttagttcctagttcgtaaaaaaaaacttcaaaagaagaatgcattcctaccaaaaaagggaaagggaaaaaagatgggcgtctgtggtggtcggttgcagcaactgttgtctggttgctatgaactccaaagtgcatgaagagatcaatgtaaccttggatgatgtttgtgtttgtttcgtttactcgtagaatataaaggggagatagaagaattggcttcactttc

SEQ ID NO: 212797 - DNA, 2452 bp, Zea Mays
gaaattccaaaacgagcacggcccggcacgaggccgcccgccagtgccagtgccagtgccggtccctccctctcttggctggtgctggcctggatcctccacgcgacgccgccgcggctcccttctcgtctcgtcgtccagtggtgggtggtggcggtggtggtggagtgcagatccgcgcatccgtacgtggattgccttccgtctttgcccattgctgttggccagtcggcgtggatttgagagctgcgtgtgtgtgtgtgcatccgtggtttggttacttctccggcactcaagatcgaagtcgcaggacttgtttgggttcaactgaactcccgtgtcctgcgccaggaccgccactgatgagacactcagatttaggatggctttcatccgccgccattgctgagcttctccagtaaagactggaatttttcgccgcgccaacctttaactgtatttcatgatacaaaaaaatgtcatcagactccagtctaaccgaatccctacatgagagaacaattgtctttggccttaaactttgggttgtgattgggatcgctgttggagcgtccctcttgggtattcttctcattcttctcatatgccttaccattcaaagttgtatcaagaggtcacgcaagccactcaatgaccgtcgactgcaccagatccctccagcgtacaaagatatcaaggaagtggggatggtagaccaatttcctgccaaagattttgttgtacatgatgggcttctactcactattcagaatgggcctgagcctgttgaaccagttgatagagatgcgattcagttggctcaggaggaaaagttgaaacaaagagaagagaccaatgtctctgcttcttttcccattatggatggctgcgagggaactcagattgtttctgtcgatgaacagtcttccacgcacgctactgttgactctgcaccattggcaggtttacctgaattttcttatcttggttggggccattggttcactctcagagatctagaccttgcaactgaccattttgcaaaggataatgtaattggtgagggtgggtatggtgttgtatatcgtggcagattatcaaatggcaccccagttgctgtcaagaaaatccttaacaatttaggacaggctgagagagaattcagagtggaagtcgaggcaattggccatgttcgtcacaagaatttggtccgccttttgggttactgtgttgagggtactcaaaggatgcttgtgtatgagtatgtgaataatggaaatcttgaaagttggctccatggggaattgtcccagtacagttctctcacttggttggctcgcatgaaaatccttctgggaactgcaaagccttgcttacttacatgaggcaattgaaccaaaagttgtgcaccgtgacatcaagtccagcaatatcttgattgacgatgagtttaatgccaaaatatcagactttggtttggccaagatgcttggtgctggtaaaagccatattgctacacgagttatgggtacctttggctatgttgcacctgaatatgctaacagtggacttctaaatgaaaagagtgatgtctatagctttggggttgttctgttggaagctattacaggtagagatccaattgattatgatcgccctacaaatgaggtaaacctggttgactggcttaaaatgatggttgccaacagacgttctgaacaagtggtggacccaaaccttgagagaaggccttcgacaaaggagctgaaacgtgcccttttgactgctctgaggtgtatcgatttgaatgctgagaagaggcctagcatggaccaggtggtccggatgttggattctaatgaactcataccgcaagaggaaaggagacaccgacaaatccgaatccctgagagttcagaaaccgagccactgcggggcaagaataacagtggcaggagtgatgctcctgagcatgaagcgaggccaccacgacctaagagccgaactttttcgtccaaatgaaagaaaaagggcatattaggaggtatatggtagacgctgagacgcgcaatgtgggaagcaggaaatctcagcttcgatacatgacgacacagattgatggattttttttcgttcttggatgtgatgcttgacaatacatttttgtgttccttgacacatgtacagtggcgtgtggtagttgaagggtgtatagttgtattacttagttcctagttcgtaaaaaaaaacttcaaaagaagaatgcattcctaccaaaaaagggaaagggaaaaaagatgggcgtctgtggtggtcggttgcagcaactgttgtctggttgctatgaactccaaagtgcatgaagagatcaatgtaaccttggatgatgtttgtgtttgtttcgtttactcgtagaatataaaggggagatagaagaattggcttcactttc

SEQ ID NO: 212798 - DNA, 2885 bp, Zea Mays
atccacacctgccccccgactgaccccggacggactatgggtttgcttccgcgtcggaaagcgtcactgcgtccgctttacttcacctttactgcggcgctacctacgtgacgcgaactgagccagagctcgctcacctggcactggcaggcacttccgcgcactggcagcagcagctccgtcggtctcccttccccgtcactcccccaggtctgccactccggcgcgcgtccggctgaaccagctacggccggcagtattgctgaggaagtaaagatgagtggacgtggccgtgaaaatttgtaaacgaagcaagtgcggtgcggcaggggagagggagagggggcgaccgaccgtcggaaggtggctgcgatcgacctgccaaccgcccccacgccgcgcacgcactgctgccccagcacacgcctctagaaattccaaaacgagcacggcccggcacgaggccgcccgccagtgccagtgccagtgccggtccctccctctcttggctggtgctggcctggatcctccacgcgacgccgccgcggctcccttctcgtctcgtcgtccagtggtgggtggtggcggtggtggtggagtgcagatccgcgcatccgtacgtggattgccttccgtctttgcccattgctgttggccagtcggcgtggatttgagagctgcgtgtgtgtgtgtgcatccgtggtttggttacttctccggcactcaagatcgaagtcgcaggacttgtttgggttcaactgaactcccgtgtcctgcgccaggaccgccactgatgagacactcagatttaggatggctttcatccgccgccattgctgagcttctccagtaaagactggaatttttcgccgcgccaacctttaactgtatttcatgatacaaaaaaatgtcatcagactccagtctaaccgaatccctacatgagagaacaattgtctttggccttaaactttgggttgtgattgggatcgctgttggagcgtccctcttgggtattcttctcattcttctcatatgccttaccattcaaagttgtatcaagaggtcacgcaagccactcaatgaccgtcgactgcaccagatccctccagcgtacaaagatatcaaggaagtggggatggtagaccaatttcctgccaaagattttgttgtacatgatgggcttctactcactattcagaatgggcctgagcctgttgaaccagttgatagagatgcgattcagttggctcaggaggaaaagttgaaacaaagagaagagaccaatgtctctgcttcttttcccattatggatggctgcgagggaactcagattgtttctgtcgatgaacagtcttccacgcacgctactgttgactctgcaccattggcaggtttacctgaattttcttatcttggttggggccattggttcactctcagagatctagaccttgcaactgaccattttgcaaaggataatgtaattggtgagggtgggtatggtgttgtatatcgtggcagattatcaaatggcaccccagttgctgtcaagaaaatccttaacaatttaggacaggctgagagagaattcagagtggaagtcgaggcaattggccatgttcgtcacaagaatttggtccgccttttgggttactgtgttgagggtactcaaaggatgcttgtgtatgagtatgtgaataatggaaatcttgaaagttggctccatggggaattgtcccagtacagttctctcacttggttggctcgcatgaaaatccttctgggaactgcaaaggcccttgcttacttacatgaggcaattgaaccaaaagttgtgcaccgtgacatcaagtccagcaatatcttgattgacgatgagtttaatgccaaaatatcagactttggtttggccaagatgcttggtgctggtaaaagccatattgctacacgagttatgggtacctttggctatgttgcacctgaatatgctaacagtggacttctaaatgaaaagagtgatgtctatagctttggggttgttctgttggaagctattacaggtagagatccaattgattatgatcgccctacaaatgaggtaaacctggttgactggcttaaaatgatggttgccaacagacgttctgaacaagtggtggacccaaaccttgagagaaggccttcgacaaaggagctgaaacgtgcccttttgactgctctgaggtgtatcgatttgaatgctgagaagaggcctagcatggaccaggtggtccggatgttggattctaatgaactcataccgcaagaggaaaggagacaccgacaaatccgaatccctgagagttcagaaaccgagccactgcggggcaagaataacagtggcaggagtgatgctcctgagcatgaagcgaggccaccacgacctaagagccgaactttttcgtccaaatgaaagaaaaagggcatattaggaggtatatggtagacgctgagacgcgcaatgtgggaagcaggaaatctcagcttcgatacatgacgacacagattgatggattttttttcgttcttggatgtgatgcttgacaatacatttttgtgttccttgacacatgtacagtggcgtgtggtagttgaagggtgtatagttgtattacttagttcctagttcgtaaaaaaaaacttcaaaagaagaatgcattcctaccaaaaaagggaaagggaaaaaagatgggcgtctgtggtggtcggttgcagcaactgttgtctggttgctatgaactccaaagtgcatgaagagatcaatgtaaccttggatgatgtttgtgtttgtttcgtttactcgtagaatataaaggggagatagaagaattggcttcactttc

SEQ ID NO: 212799 - DNA, 2715 bp, Zea Mays
tgacaaggcgccacaccaaaacacgccgcgggtggggcgacaccatccgctggcgtgggcacacgtgagcacggtgccccagcagccaccagatgaagcagcgcacctgtcgtcgacacgctgccgcacggtggtagaaaagcagttgaaacaccttccgtgaagatcaccaggaacaaccctgggaggtggcttcgagggacgagagcgtcgccgccgagctttttcgctttccaccttcacccaaccgtcgccatcctcttttttgttggggcaaaagacaggagacttggtagataacaaagcgtctttgaagaaatcccgctggacaggacaaccatcaatggaggaagcagggtagtcgtccctccatcgctgggctttggatcgactagtagccagagaaggggatggagtggtccccggcgccagggaaggaaggtgggtggccgccgggcttggagcagacaccggcgtggggctgagaggccggagagggagtggagggtgggggactgggggtgagacgacacatagtagatctaggagtcggtttagctagataaaagggagaagattatctaggagtcggttatcagtccttgtttagtcttatgccttcagtagttcaattactacgtctttgaaataagtgatgaaaactattgttgtgagggcctgagcttcctctaggacttagggcatgtacaacccagagactttggaacgggttttccaagtataatacgtgctacatccctaagcttttagatcataaatacaattaagatacaatatatataaagagtcgtgtagagacagtctgttcgcgaagagcctgcctcttgtatttttttttcaattaccacttggagacccctcaagagaccccgtattaaatggagttgtacatgcctagcgaggccacacggctcgattgatttgtttgttgtgttagaagccttgttgctgtttgcctgtaagcttattccggtactgatttgtgttttaggcgtcgagatataagtgtcacgggagcagggagtactgaaagaagatttttgtgactggttcaggaggaaatttgttcctaattgttgtgtagcttagatcttgtgtggaggtttcctatttagttgggataaaggatgttttctgtacttccatgatggtgtattcagcaacttgttgatcactatgctagcgagttccaacactggtttgtgctttaggtgttccgactcaatcaagcatgaatgatcaaggaggaggcgatctagttaatttaggagaaatttggtttataggcgtgaccttagatctaattggtcttctcggtcttttctgggacaaaggcaattttattgtttgattatttaatcagcagcttgatgcatcttatctgtcaatcactactcctttgaaaactgacggaacatgttgctccttttaggttaaggttgcaggcttttagcttgggattctgaaagatggggacctcttctggcgcgaatttccatcagcaacctcctccgacccaggggatgttgcctccaaggcatggtccacgcccctcagggttgcagacctcgctctcgctggcctcttcggagcaggttggctcgcctgacatgcaggagcctggttcaaactcggagccagggcatgattccgccactgagagcgccagttccaaagacacatggccagctgagccgaaccagagcaatggtggagtggctgccagtgatgttgtgagtaaggcggcggagaaggaggtggcaaatggtgtatccaagccgcaggttatccatggaccctcctcccgtatgagtgggatgcttctgcgggaggttgcacgggagagggttgatctggtcgctgagaagatgaagatgatgtcggatgagcacctagaggaggtcaagaatgagctcaggtcgattctggagggcactggaggttctcaccacatcgaggagttcttgtacttgcagaagcttgtccaggacaggcatgatttgacaccatccatgctttcagtggcacaccatgtgcagcttgagatccttgttgcaatcaagactgggatacaggcctttctgcaccccagtgttaccattccacacaatcgcttggtggaggtcttcttgtacaagaggtgccggaacattgcttgccagagtgctctccctgctgaggagtgcagatgcaacgtgtgcgctagcaggaatggcttttgcaacctgtgcatgtgtgtcatctgcaacaagtttgattttgaggtcaatacatgccgttggattggctgtgatttttgctctcactggacacatacagattgtgcaattcacaatggccagatcggaatgggacaatcagtgaaaagcagcattggtcatgctgaaatgctttttaggtgccgagcttgtcagaggacctcagagctgctgggttgggttaaggatgtcttccaacaatgcgctcctggttgggatagggatgctttgttacgcgagcttgagttcgtttgtaagatattccgtttaagtgaggatgcaaaagggagagtgttgttcaggaaatgtctagatctgattgaaaggctgaggaacactccagctgattccatcaatcctaggatgatactacaagcactccaagctttctgacttctgagtatattgatgggttgatgtactatggacatatctt

SEQ ID NO: 212800 - DNA, 1701 bp, Zea Mays
gccttttttccctgatcgcacattctcccgagagatttgcgagataatctacagaatgagcctagaaaggaccaacttctggaggtcattctggatttgggaagacgaccagaggcacgattccttggtgactccggtggccaatatctacgggacagtgagatctcacaaaaagagttggaggatgctcagaaggctgtaggagagtttggaggtgacaaccgtgcaggaattgaaggtactttacataggatatctgctataaggagtaggaaaggaatggttgttggtttgacctgtcgagtcggccgagctgttactgggcatgttgacatggtccgtgatctcctaaattacaaagaaagtatcctatttttgggaaggcctggggtcggcaagactactgttatgcgtgagattgcgcgtgttttagcagatgaatttcagaaaagagtgggcaggtaattgtggacacaagtaatgagattggtggggatggggatgttcctcatgctgcgattggtggagcaagaaggatgcaagtacctgaaccatcaatgcagcatagggtgatgattgaagcagttgaaaaccatatgcctgaggtggttattgtagatgagatcggaactgaagcagaagcacaagcttgtcgatcaattgcagaaaggggtgttatgcttattggcactgcccatggagaacgacttgcaaacatcattaagaacccaaccttatctgacttgattggaggtgtagaaactgttacccttggagacgatgaggctcgtgctcgacggagtcagaaaagtattctggagaggaaagctcctccaacattccctttccttatcgagatgagggagcggcattactgggtaacacatcggacagaaaggagcgtagatatgctactgcatggtaagaagccgctggttgaggttaggaaaagggatagcgagtttcaggttgtaattgaaagatgggcaacatatgatggcgatggactctgaacttgaaaccctgtcgtcataattgcttctatcaaagttcttaatttagtacttgatgtttctgtggacaagtgtgatctacactaccaagcctcttgttctgaggtcgtacgtggattgcatgggcgaacattcgactgacaagtgacaactatccgaagcctgttcttacactgaaggcagcccacgaagcaattttgacatttcagctactttttagcggtcgaaaattgatgtcaattctaatgtatatatattttcctgtaagagaaggaacctaatgtatgtcagtgcttctaaattgtatgagatgtgtacatatgcatatgcatatccttattgttgttaatatactcattcccccttttctttcttttttattttcccctttgatttttaaacattggtgaactgaggtcctctattttactatgtatgtgagtattcaatgttttctctaagtgttaatggtgcatgcaatattcttagttttacaaacgtttttttttataatcccaagttttttgctcttactcaacccccattacccccaaaggaaaaaaaaagtatgtttgagatgtcttggttttggatttaataattttttagctcattggccctgtaatttttgtacattgtctgacttgtttatatgttctctaattgttaactgcactatttttataag

SEQ ID NO: 212801 - DNA, 1970 bp, Zea Mays
gaaagggtaagcaaagcgttatccatcccgtccggacacgccaaccgctcgctcccttgcgcgcgactgcgctaccgccggcgccgccgcgtcggcattagcttgccgcgcgatggacatgtgtgccccacgccgcctgctcctcttctcactccccaccccgaagctctctccggagcatcctttgttcaggcaacggcgcaggggcaggacctggcccggcatcgctcgctgcgccactgaggttggcactggatggggaggcatcgtcgaggacgacctttctgagctcctgcagattctcccgagagatttgcgagataatctacagaatgagcctagaaaggaccaacttctggaggtcattctggatttgggaagacgaccagaggcacgattccttggtgactccggtggccaatatctacgggacagtgagatctcacaaaaagagttggaggatgctcagaaggctgtaggagagtttggaggtgacaaccgtgcaggaattgaaggtactttacataggatatctgctataaggagtaggaaaggaatggttgttggtttgacctgtcgagtcggccgagctgttactgggcatgttgacatggtccgtgatctcctaaattacaaagaaagtatcctatttttgggaaggcctggggtcggcaagactactgttatgcgtgagattgcgcgtgttttagcagatgaatttcagaaaagagtgggcaggtaattgtggacacaagtaatgagattggtggggatggggatgttcctcatgctgcgattggtggagcaagaaggatgcaagtacctgaaccatcaatgcagcatagggtgatgattgaagcagttgaaaaccatatgcctgaggtggttattgtagatgagatcggaactgaagcagaagcacaagcttgtcgatcaattgcagaaaggggtgttatgcttattggcactgcccatggagaacgacttgcaaacatcattaagaacccaaccttatctgacttgattggaggtgtagaaactgttacccttggagacgatgaggctcgtgctcgacggagtcagaaaagtattctggagaggaaagctcctccaacattccctttccttatcgagatgagggagcggcattactgggtaacacatcggacagaaaggagcgtagatatgctactgcatggtaagaagccgctggttgaggttaggaaaagggatagcgagtttcaggttgtaattgaaagatgggcaacatatgatggcgatggactctgaacttgaaaccctgtcgtcataattgcttctatcaaagttcttaatttagtacttgatgtttctgtggacaagtgtgatctacactaccaagcctcttgttctgagtggattgcatgggcgaacattcgactgacaagtgacaactatccgaagcctgttcttacactgaaggcagcccacgaagcaattttgacatttcagctactttttagcggtcgaaaattgatgtcaattctaatgtatatatattttcctgtaagagaaggaacctaatgtatgtcagtgcttctaaattgtatgagatgtgtacatatgcatatgcatatccttattgttgttaatatactcattcccccttttctttcttttttattttcccctttgatttttaaacattggtgaactgaggtcctctattttactatgtatgtgagtattcaatgttttctctaagtgttaatggtgcatgcaatattcttagttttacaaacgtttttttttataatcccaagttttttgctcttactcaacccccattacccccaaaggaaaaaaaaagtatgtttgagatgtcttggttttggatttaataattttttagctcattggccctgtaatttttgtacattgtctgacttgtttatatgttctctaattgttaactgcactatttttataag

SEQ ID NO: 212802 - DNA, 2897 bp, Zea Mays
agtttgttgaagcaattgggctcaggtttagttgtgggaagaaaaagggaccgcgcggagtggcgaaagggtaagcaaagcgttatccatcccgtccggacacgccaaccgctcgctcccttgcgcgcgactgcgctaccgccggcgccgccgcgtcggcattagcttgccgcgcgatggacatgtgtgccccacgccgcctgctcctcttctcactccccaccccgaagctctctccggagcatcctttgttcaggcaacggcgcaggggcaggacctggcccggcatcgctcgctgcgccactgaggttggcactggatggggaggcatcgtcgaggacgacctttctgagctcctgcagattctcccgagagatttgcgagataatctacagaatgagcctagaaaggaccaacttctggaggtcattctggatttgggaagacgaccagaggcacgattccttggtgactccggtggccaatatctacgggacagtgagatctcacaaaaagagttggaggatgctcagaaggctgtaggagagtttggaggtgacaaccgtgcaggaattgaaggtactttacataggatatctgctataaggagtaggaaaggaatggttgttggtttgacctgtcgagtcggccgagctgttactgggcatgttgacatggtccgtgatctcctaaattacaaagaaagtatcctatttttgggaaggcctggggtcggcaagactactgttatgcgtgagattgcgcgtgttttagcagatgaatttcagaaaagagtggtaattgtggacacaagtaatgagattggtggggatggggatgttcctcatgctgcgattggtggagcaagaaggatgcaagtacctgaaccatcaatgcagcatagggtgatgattgaagcagttgaaaaccatatgcctgaggtggttattgtagatgagatcggaactgaagcagaagcacaagcttgtcgatcaattgcagaaaggggtgttatgcttattggcactgcccatggagaacgacttgcaaacatcattaagaacccaaccttatctgacttgattggaggtgtagaaactgttacccttggagacgatgaggctcgtgctcgacggagtcagaaaagtattctggagaggaaagctcctccaacattccctttccttatcgagatgagggagcggcattactgggtaacacatcggacagaaaggagcgtagatatgctactgcatggtaagaagccgctggttgaggttaggaaaagggatagcgagtttcaggttgtaattgaaagatgggcaacatatgatggcgatggactctgaacttgaaaccctgtcgtcataattgcttctatcaaagttcttaatttagtacttgatgtttctgtggacaagtgtgatctacactaccaagcctcttgttctgaggtcgtacggtacagacttatcctaatccaaaaagtttacaatgttgttgttttcctggtgaaattactttgcccattttggtgagtatgcaatgcccaccgtgttggatcttctatgattgccaattttttaataccccgtttggatatagatcttggtgcacggaattggaaattggaatcaactttcctaaattctgttgttttcttgcacataagggtgtgtttgggagtgaggttttttcacagttttagaaaaatactacagtattctcaaatactgcaatattatatatagaatggtgtttggcaagctagctaaaatctttgttttttaaaactgaagtattgtaaataatgtagttgttttaaggtattctaagcttaggtctgaaccttagtttccaaaactgtagtattttaaactgtggtattgtcatgactaaaatatactatatattgtagtatttcaaaaactgtggtttacaaacactttgttcccaaacaaggtctaaaattgagatttagaatcagagaccaaattctttggtattggattataactggaagcttcctctcccaatataaagcatcaccccgctgtattgcgtggaattagacgacacaattctaaactctaatacagtgacatccaaacaatagaattggaattgtatctaatttcaatgctatgactgatttggtattgaaactagttcaattgctgccctccaatatcgacatccaaactgagcataactgaatttgtactttttgtggtggaaataggtcgtacctaatgtttgaagtttcactgttttttatttttggaggaaattatttctgacatggatggaaccttattacagtggattgcatgggcgaacattcgactgacaagtgacaactatccgaagcctgttcttacactgaaggcagcccacgaagcaattttgacatttcagctactttttagcggtcgaaaattgatgtcaattctaatgtatatatattttcctgtaagagaaggaacctaatgtatgtcagtgcttctaaattgtatgagatgtgtacatatgcatatgcatatccttattgttgttaatatactcattcccccttttctttcttttttattttcccctttgatttttaaacattggtgaactgaggtcctctattttactatgtatgtgagtattcaatgttttctctaagtgttaatggtgcatgcaatattcttagttttacaaacgtttttttttataatcccaagttttttgctcttactcaacccccattacccccaaaggaaaaaaaaagtatgtttgagatgtcttggttttggatttaataattttttagctcattggccctgtaatttttgtacattgtctgacttgtttatatgttctctaattgttaactgcactatttttataag

SEQ ID NO: 212803 - DNA, 1459 bp, Zea Mays
gtgcggccggggcaggctcgtgccggccggaagcggctcaaaacagcagcactgcactgcagcaggccggcgtccgaatccatcgtcatcaattcggcatttcttcccccgtacagcctaccaaccaactactacagcacagcacggagagagtcttgacctcggagcgagcgagagcgagagagagagctccacctcctgctcgtagctcctgctacgcggctgtatttatagcgagcgtcctggcctctcttctccctgctcgctcctagctggggtggggagggaagaagaggacaagcagcacgccaacgcgggagcataccgacagctccagggaacgattgaaggagtaggagaaagagaaagaacaagcgtgggatacagacaacgagaagaccgacgagccgcgacaccgccactgccaccccgctccgaagtcctagctcgtgctacaaaggaataaaccaaggccggcccatgtcttcatctagcggctgtaaccgcgggcgagcagtcctcccagtcactgcctccctcgttcccttcctgctcctcctcgtcgtcgtctcgtgccaggccgccctggtggtctccgcgacgcacacgcacgggcacggcggcgggaagcatgccggcgccgcgcgggcggccttccgtgccggggacgagcaggaggcgtacgcgaggatcatggcgcgcatggccaggatggacaaggactccaacatgacgatacagagccccgacggcgacgtcatccactgcgtgccggcgcacctgcagccggcgttcgaccaccccaggctgagagggcaggagcccgaggacgagcccgtggagaggcccatgtccaagggcggcgccgccgaggaggaggccggcgtgttcccgcaggcgtggagcgacggcggcagcaagcggtgcccggcggggacggtgccgatacggcggacggcggcgcgcgacgtgctgcgggccagctccgcgcgccggttcgggatgaaggcccgcggcggcggcagcagcagcagcaacgcccgccgcgactccaccagcagcggccatgagcacgcggtggggtacgtgacgggggaccagttctacggcgccaaggccagcctgaacgtgtggccggccaaggtggcgtcggcggcggagttcagcctgtcccagatctgggtcatctccggctccttcggcaacgacctcaacaccatcgaggccggatggcaggtgagccctgagctgtatggcgacagcagcccgaggttcttcacgtattggacgaccgatgcgtaccaggagactgggtgctacaacctgcactgctccggcttcgtccagacgaacagccggatcgccattggagccgccatctcgcctacctcggtctacaacggccggcagttcgacatcagcctgctcatatggaagactgacgtacgcgcgcgcgcgc

SEQ ID NO: 212804 - DNA, 1621 bp, Zea Mays
caagcagtgtgccctcccattcagatttcatcctcggcgtcgtctcctgtcctctccacgccaagcaacctccccaccccgccccaccctccatgctcgcctcgagatcttagcgggcagctccggagagcgccgacgagccccctgatccctcctcgccgccgccgccaaccgaccgggggaggagaggaggggaggggagcgatggagaccgccgactactccgggaagctcttcgtcggcggcatctcatgggagacggacgaggaccgcctccgcgagtacttcggccgcttcggtgaggtcactgaggccgtcatcatgcgggaccgcagcacgggccgcgctcgagggttcggtttcgtggtcttcgctgacgccacggtcgccgagcgcgtcaccatcgaaaaacacatgatcgacggccgaatggtggaggccaagaaggctgttcccagggatgaccacagtattgtgagcaagagcaacacaagcagcatagggtcacctgggccgggccgtaccagaaagatctttgttggaggtctgccctcaaatgttacagaggctgacttcagggggtattttgagcagttcggtgtcataactgatgtggttgtgatgtatgatcacaacacacagagaccgaggggctttggattcatcacctatgattcagaagatgctgtggacaaagccctgcacaagagctttcatgagctaaatggtaaaatggttgaggtcaagaaggctgttccaaaggagcagtctcctggacctgttgcacgctcacctgcaggagtggggcagaactatgctatgaacagggttcatagcttcttgaatgacttcaaccagggttacaatccgaaccctataggaggttatggcatgagggtggatggaaggtttggccagctttcaggtgcacgaaatgggctctcttcttttggcccaggttatgggatgggtatgaacgttgaaggtgggatgagtggaacttttggtgcaaactctggtttcatcagtaactccaatgggaggcaaatgggttcatacttcaatggaagttcgaatagattgagtagttctattgggtatcttggttatgactcaggatcgatgttgagttccatgtctaggaattttaatgcaggtgtaaactacccgatcaatcctacaaacatgagtgcttttgctgcccttggaaatgggggtggcgtcaattatatgggtctcccttctattgcccctgagttggcccagttgggcaacatttcaagccttgggtcagggaactttagccgtggagctggagttaataacttaagtttaccttctggctcctatgggaggagcaattcaactggtacaattggtgagcctttttctgcatcaggcaatgcatatgaagtgaacaacccagatacatatgggaacagctctatttatggtggcacatcctggaggttcccttcatctgaagttgacgtgccttctttcagtcatgatcttggaaatgttgatccgaatatgaaatcagacatatcagcaaattacatgggaaattattctgttagcaacaatcagccaagcagagtgacacgatgttttttttttg

SEQ ID NO: 212805 - DNA, 1742 bp, Zea Mays
tctaagcaccttccattgatcatggttcgggcagtttcttcagttacatctggagctgctaagttgcatgatttaagtgcacctatcttgactagtcaaacaaagtatctcgagctcctagctagatactatgttcgcaagggggagcgtattgctgctgccaggatgtttttaatattggcagagagacagtgctccaattctgaagaagttccaactcttgacaagaggtatgaatatctcagagatgcagtgcttcaggccaaaagcgcaggcatagaggctgattcgtctagaaaacctattgacagtagcacagtggatttgcttgaaggcaaacttaccgtgctacgcttccaaatgcaaatcaaacaagaattggagctcatgactgcacgggttgaaaatatttcgagcagttctgaatcccctagtggtctgttccctcgtgacaacattcttgctgatgcagaggctgctaaggctgctaaggataaggcaaaagaactatcattgaatctcaagagcatcactcaactgtataatgattatgctgttccatttgagctctgggaggtttgcctggaaatgctgagcttcgctaattactctggagatgctgatagcaaaattcttcgagaaatttgggctagactccttgatgaggcacttacaaaaggtggtgttgcagaagcatgttctgtagtgaaaagagtaggctcgaaacttgatcctgcagatggagcttgtttacctttagatataatatgccttcatcttgagaaggctgcattgattaagttcaggagaagaattagtcggtgatgatgatgttgcaagagctcttcttggtgcatgtaaaggtcttcctgaacctgtacttgctgtgtatgatcaactgttattgaacggtgcaataataccctcactaaatctgaagttgcgcttgctgcgatcagttcttgcgatcctccgtgagtgggggatatctgtcattgcacataggcttggcaccacaagtactggggcttcaatctttcttgatggaacattttcactgaaccaaacagggactgcgaatcaaggtgctcgagataaaataattagtttggctaacaggtacatgactgaggtgaggcgattaaaccttccacagaaccaaacggagaatgtctaccgtggtttccgtgaacttgaggagaaattactatctccttattaggcaattttcagttgttcttcaagattgtaaaagaagagtcgaaggctctggattcactgcagcatgatctctattgttctgtacatatatctgcaagaacccaaggcttctttaatcattattaattagaggttattcatgacggtgtgcagccttcttttatttgacttagagccagtatggattacagagctgttgttgtggaaattgtctagctgtcttcattacttcttaataatcttttggtagatgctgttgatcctgttttacctgaatttaggaaacagctagagaactcaggcaggactttccaccagaaatacaagttggttttcatgttggaaatcgaaatttagtatgtaccatgacattgtacagttcgttagtagattatttagagtgttgtaagccttgtagcttatgtttttgttggcatcaaggtatcattcctgtagctgaaaaataaacgttatattgtcagaaatatggaattctaggttgtttttgttccattcgtttg

SEQ ID NO: 212806 - DNA, 4810 bp, Zea Mays
gtttttcaccgctctcccgttccccgctactcgcgttttgccgcaacgcgaccatggcgtggggagaggacgaggctatcggccccgacgtggcctcggcgggtcttcacgtctcggagcggatcggccgcgacgccgccgcgcagcccgacctggaggaggcccttgaagcctcgcgctacgcgtctcacccctactcctcgcaccccaaggaatggcctcctttggtggaagttgcagaaattcgtcaactccctcctatgttgattgaaagatataacacagctgctggtgaaggaacagctctttgtgggattttttctgacatacatcgggcctgggcaacagttgacaattcatttttcgtctggcattttgataaatgggatgggcagtgccaagagcataatgtcgatgagcaagcaatttgtgctgttggccttgctagggcaaagtctgggattttcattgaagccattcaataccttttagttttagcaacacctgttgagctgatacttgttggagcttgctgttctgctagtgctgatggaacagacccatacgctgagctttcattacaacctttacctgagtacatgattgccactgatggtgtcacaatgacatgcatcacatgtacagaaaagggccaaatttttctagctggtcgtgatggccatatatatgaattgcagtatacaactggttcaggttggcgtaaacgctgccgtaaagtttgtcttactactggtattggcagccttctttctaggtgggtagtgccaaacacattcaaattttcaactgttgatccaatagttgatatggtcatggatgaggagagaaatactatctatacgcgtactgagggcatgaaaatgcaattatttgatctaggagctaatggtgatggccctttgacaaaaattactgaagaaaagaacattgttgatccactggatgcaccttatggtggccggaggactaatgcaccgccaccaagaactgcacgatcaccaaaaccatcaattgtttgcatctcacctctatccgctatggaatcgaaatggctccatgctgttgttgttttatcagatgggaagagattattcctcactacatcaggtgggattggttcttcagttggattgaacagtggtctgcggaggcccacctgtttaaaaattgttgctactaggccgtccccacctctgggggttggtggcgggcttacatttggtgctgtttctgcagctggcagagttcatcctgaggacctagctttgaaagttgagtctgcgttctattctgctggtgctcttataatgtcagattcatccgctacagccatgtcatctctgctggctgtgcagaaaggttcagctgcacagctatcccttcccagtacctttggaacagcttctagagcctcccgagctctacgggaaacagtatctgctttgcctgttgagggtcgaatgctttgtgcctctgatgttttaccacttcctgacgctgcttacatgttgcagtctttgtatgctgatgtggaatgcttcacaggtttcagaaaaccttttgagaaggcatgtataaaactttgggcaaaaggagatcttcctacccagcatatcttgcctcggaggagggttgttgtattcaatactatgggtttgatggaggtaatttttaacaggcctgttgatattctaaggaaattgtttgatgggaacaccttgagatcacaaatcgaagaattctttaatcgctttggtgctggagaggctgctgcaatgtgcttaatgatagctgcgaagctactttatgctgaagatagtctgataagcaattctgtttctgagaaagccgctgaggcatttgaggaccctgggcttgttgggatgcctcaaattgctggtaccactgctttatctaatacacgaactcaggctggaggctttagtatgggccaagttgttcaagaagcagaacctttgttttctggtgcatatgaagggctttgtttgtgctcgtcaagactactttatcccatatgggagtttcctattatggtgattcgaagaccggctggtactaataaatgcgaggatggtgtaattgtttgcaggctttcagctggggccatggaaattcttgagagcaagattcattcactggaaacatttttaagatctagaagaaataagagaaggggcctttatggttatgttgccggccttggtgattctggttccatactctacaaaacagggcctattattggtcctggagggcatagcaatgggaggagtccatataactcccaaattcaagatatggaccctgcggacaaatcagcatcaaataaaaagccaaggttgctttatacatcagcagaactagccgctatggaggtgagggcaatggagtgtcttaggcggttgcttaggagatctggtgaagcactctttctgcttcaacttatttgccagcataatgttgcccgcttggctcagacactgggcaatgatttacacaagaaattagttcaattaacatttcatcagttggtatgttcagaagatggtgatcagcttgcaatgtgtcttatttctgcactcatggagtactatattggcccagagggcagaggaactgttgaagaaattagcactaaattgaaggagggttgccctagttacttcaatgaatcagattacaaatattacttggcagtggagtgccttgagagagcagcatctatggctaataaccctgatgagagagatattcttgctagagatgctttcaaccttttgactaaaattccagaatctgctgatttgagtgccatatgcaagagatttgagaacctaagattttatgaggctgtagtccggttgcctctgcagaaagctcaagcacttgactccaatgctgatattaccaatggtcaaattgatccaaggcatcatgataccataatgttgcagcgtgaacaatgctatgagattgttatgaatgctctgcgcactctcaagggcgtcgggcatagtcgaatgcaaagtgcagacaagtcatctggtgtagcaactgctgttgatccagcttctcgaaccaagtatatcaaacaaattctccaacttagtgtccaatggccagacacagttttccatgaacatctatacaagacacttattgagctcggtctggaaaatgagcttttggagtatggtggttctgatttggcttcttttctgcagagtgctggtcgtaagcatcaagaagaggtatgaatatctcagagatgcagtgcttcaggccaaaagcgcaggcatagaggctgattcgtctagaaaacctattgacagtagcacagtggatttgcttgaaggcaaacttaccgtgctacgcttccaaatgcaaatcaaacaagaattggagctcatgactgcacgggttgaaaatatttcgagcagttctgaatcccctagtggtctgttccctcgtgacaacattcttgctgatgcagaggctgctaaggctgctaaggataaggcaaaagaactatcattgaatctcaagagcatcactcaactgtataatgattatgctgttccatttgagctctgggaggtttgcctggaaatgctgagcttcgctaattactctggagatgctgatagcaaaattcttcgagaaatttgggctagactccttgatgaggcacttacaaaaggtggtgttgcagaagcatgttctgtagtgaaaagagtaggctcgaaacttgatcctgcagatggagcttgtttacctttagatataatatgccttcatcttgagaaggctgcattggatagattaagttcaggagaagaattagtcggtgatgatgatgttgcaagagctcttcttggtgcatgtaaaggtcttcctgaacctgtacttgctgtgtatgatcaactgttattgaacggtgcaataataccctcactaaatctgaagttgcgcttgctgcgatcagttcttgcgatcctccgtgagtgggggatatctgtcattgcacataggcttggcaccacaagtactggggcttcaatctttcttgatggaacattttcactgaaccaaacagggactgcgaatcaaggtgctcgagataaaataattagtttggctaacaggtacatgactgaggtgaggcgattaaaccttccacagaaccaaacggagaatgtctaccgtggtttccgtgaacttgaggagaaattactatctccttattaggcaattttcagttgttcttcaagattgtaaaagaagagtcgaaggctctggattcactgcagcatgatctctattgttctgtacatatatctgcaagaacccaaggcttctttaatcattattaattagaggttattcatgacggtgtgcagccttcttttatttgacttagagccagtatggattacagagctgttgttgtggaaattgtctagctgtcttcattacttcttaataatcttttggtagatgctgttgatcctgttttacctgaatttaggaaacagctagagaactcaggcaggactttccaccagaaatacaagttggttttcatgttggaaatcgaaatttagtatgtaccatgacattgtacagttcgttagtagattatttagagtgttgtaagccttgtagcttatgtttttgttggcatcaaggtatcattcctgtagctgaaaaataaacgttatattgtcagaaatatggaattctaggttgtttttgttccattcgtttg

SEQ ID NO: 212807 - DNA, 3310 bp, Zea Mays
aacaaggtgggactgattattgggaagggtggggagactataaagtccatgcaggccaattctggagctcgtattcaggttattcctttgcatctgcctgctggtgatacttcaactgaaagaactgtgcatattgatggtacccaagaacaaattgaagctgcaaagcaactgatcagtgaggttaccagtgaggtccgccttctttctcgttgtgtatattcctgatctgtaattgctttgccgttttgcgctttatctatcttaggtaggttgcttctggttcattctgtttattgtctcattttatgattttccccgattctttttgaaaattttgtttcttctgcttattgctgccctacattgattacactgcgtcttcgctaatcaatgtctgaaacatattgttcgtgggtacatcctcagcatgcaaggggattgttatatgtgttcttccctgtttatgaacataacttattaatggttttgggcaaggttcacaactggagtatataataaagcgaagaaacatatttgtaaactaacttgttatttatcaattagccactgctaggctcgttaaatggttttgtacagaaactgcatctaaagttttgacaagtattgatttgaaattcatatgatcgtttacatcatatggaatatggatgatactattttgggaaaaaaccagagagtccttgttccacttgttctattcagtggttattgtttttttgtttttccacatagagccaattagtgtcattagcttgccaggaggactgcaaactatcctggagagcaggtgtgttactgtttaatatcaatgtcctactggatataactctgtattttcacttataacatgttttatggattatgtgagctgacgtgctttatctggcatctgtatcatttcaaatttttcatctgatcctcctgtttctctggagcacaatggatacatatacattgctttctcatggcttgtttgtgagaaagaaatgctctaaacagacccaggtccccaggtgtttcggttgtttatggtggtcatgcattccaatttaggtccttctgttctagttgcacatatttagttctgatgtttatgatcactacagaggcaagtttttccttttaattcactattcccacctatacaacttggtggttgattaagagttgtattctcatgtacatagtctctgattcatgatacttattttatagttgggcccaaaaattaaggatctatattctctaaagtgtgcatagaccagacaagaagccagttaatagtgcaactaaagaagggttgtactggggaaagtaggtaaaaaggctaaaatttgggatccaaatacagtctgtgtcatgcataaattttatttggaatattcctgtatcatatatgttgaactctttcgcagcagaaggattccgaaaaccttgcatgaagctattttatgtgatatttgtgtctattatatgtaccttgtggctttgcaggttgctgtccaatcttttttgtgtgcttatatagtatcatttgaatgctgtctttgatgcttcattttatttaatttttttcaacttcagtaaagtagcatatctgatcattatatatcctgtcatttagcaatgaatagaatcttttagatagtagtggaagcacctttgtattatcatatatatctttggacatctattgaaactctattccatggtattgctattcaacatatatatatgtatatattcgtctagctgtccaatcttcattagccccatagttttgcgcgtgggcaacggtagatgggcatcactagcttgacgatcttgatcgaatcgtgctaggaatccaatgtctggtggctattctcagcagggatatcgccctcctcgtcctcagtcaaactggggcccgccttctgtgccaccccagcagcctggctatggttatatgcagcctggggcttatcctggggcaccgccacagtatggtgcacctcagcaaccttatggtagctaccccccaacatctggtggttatcagactggatgggatcagtctcaaaaccagcaatctcatacaactccccctggtactgggtatgattattatagtcagcagcagcaacctcagcaacaatctgcccctgggacagctgcttctactgatgccactagctacaattatggtcagccttcgacgtatgcttcacagggatatgattctacctacactcagcagagtggtgggcagcaagcatatggacatgatggctacactggttaccagacccaagggcagcagcagggctactctcagcagactggttatgatcagcagggttatggcacatctgcttatggatcagctgcaagctcgacccaggatgggtccaactatggtggtcctggaggggccagtcaggcatctccagggcagcaaacatcaaacccagctgctggaagccaacctggctataccagccaaccgcccactagtgctgcagcaacttacccacctcaaggttcagctccatctggatatggcgctccaccatcccagtctggctatggcacccaaccaccacagcaagccggatatggtcagggcgcttatgggcagccttctccacagggccagaaacctcctgcattgtcaccttatggacagctcctgaaaacagtgggggcgcccaaacatccgctgaaacttgagcttcagcagctaattgggaacaaacattttccaagaccctgccgtgtggtttcctccgcgctgttgcttaatataattacgcatctaatttagggtctacaactacaagttatttatttttctgcctgttgtttttgacaccatgactttctgtttccttgctatattgagtagtactttgcagttattttattgctggcgtatatgtctggactagtgatatatgtgtttgtgtggttacccttgttggaccgtaatgggtaccttccggcttggtctggacagataaatgcccatctatatgtattctgagccctgttatgattgctctaccgtcggaggtttctatgcccacttcagctggtgatgatggttatgtatgaaatttggtttcaatatttcgtaagacttatgtatcggtccataaaaggtttaagcagcatgaaagtctgcctttttgtttttgctgctggtagttctgagtctctaaagctaatgttctttgtttttttttgaacggaaaaagtttgtttaaggtttttgcatacttagcatagatatagtattacggcc

SEQ ID NO: 212808 - DNA, 3393 bp, Zea Mays
aataaaatcaaggggcgagctctacaaatgtcgacaccttgtctgcaagggtttttcgccgtcttatcccttcgtccacgctccctgcagccgccgcccaaaccctagcaacccgtcctccgccatggccgacgaccactactcctctaagaggaagtacgacgacccctcgccgccgccgcggcgcacggggttctcttcgggcccgccgcctgcctcgccgctcgcgggcggcgccccgtcgtacaacagcgtgccaccgccccccgatgagatccagctcgcgaagcagcgcgcgcaggagatcgcggcgcggatctttaacgccgcagaggccaagcgtcctcgcgtcgacaacggcgacgatgacagcggcggcttcggtgtaggcctgggcagcactggtggcggtggccgcatcggcggcggaggactcggcttctcgtcctctgccggtggtgggcacggggcttctatcccacaattatcttctcagagcagcgcacctcagtactcctcttatggtggatatcagggtacaagcaaaaagattgaaattccaaatggaagggttggtgttatcattggaaaagccggggaaactattaggtatatccaacttcaatcaggagcaaagattcaagtcacaagagaccatgaagctgaacctggtgcactgacaaggcaagttgagctttctggcaaacctgagcagataagcaaagctgaacagttgatcaaagaagttctggcagaggccgatgctgggtcatccggtgctggatctggtggccggaaatacaatgcaacacagccaggtgctgagacgttccagatgaaaattgctaataacaaggtgggactgattattgggaagggtggggagactataaagtccatgcaggccaattctggagctcgtattcaggttattcctttgcatctgcctgctggtgatacttcaactgaaagaactgtgcatattgatggtacccaagaacaaattgaagctgcaaagcaactgatcagtgaggttaccagtgaggtccgccttctttctcgttgtgtatattcctgatctgtaattgctttgccgttttgcgctttatctatcttaggtaggttgcttctggttcattctgtttattgtctcattttatgattttccccgattctttttgaaaattttgtttcttctgcttattgctgccctacattgattacactgcgtcttcgctaatcaatgtctgaaacatattgttcgtgggtacatcctcagcatgcaaggggattgttatatgtgttcttccctgtttatgaacataacttattaatggttttgggcaaggttcacaactggagtatataataaagcgaagaaacatatttgtaaactaacttgttatttatcaattagccactgctaggctcgttaaatggttttgtacagaaactgcatctaaagttttgacaagtattgatttgaaattcatatgatcgtttacatcatatggaatatggatgatactattttgggaaaaaaccagagagtccttgttccacttgttctattcagtggttattgtttttttgtttttccacatagagccaattagtgtcattagcttgccaggaggactgcaaactatcctggagagcagaatcgtgctaggaatccaatgtctggtggctattctcagcagggatatcgccctcctcgtcctcagtcaaactggggcccgccttctgtgccaccccagcagcctggctatggttatatgcagcctggggcttatcctggggcaccgccacagtatggtgcacctcagcaaccttatggtagctaccccccaacatctggtggttatcagactggatgggatcagtctcaaaaccagcaatctcatacaactccccctggtactgggtatgattattatagtcagcagcagcaacctcagcaacaatctgcccctgggacagctgcttctactgatgccactagctacaattatggtcagccttcgacgtatgcttcacagggatatgattctacctacactcagcagagtggtgggcagcaagcatatggacatgatggctacactggttaccagacccaagggcagcagcagggctactctcagcagactggttatgatcagcagggttatggcacatctgcttatggatcagctgcaagctcgacccaggatgggtccaactatggtggtcctggaggggccagtcaggcatctccagggcagcaaacatcaaacccagctgctggaagccaacctggctataccagccaaccgcccactagtgctgcagcaacttacccacctcaaggttcagctccatctggatatggcgctccaccatcccagtctggctatggcacccaaccaccacagcaagccggatatggtcagggcgcttatgggcagccttctccacagggccagaaacctcctgcattgtcaccttatggacaggctccgcctcctggttctgctcaggctggttacgggcagtatggttacagccaacctgcttacggtgcaccaccagcttaccctggtgcacccattgcaagccaccagggctatggccagcagcagtcttatggccagcagcagtcttatggcgatgcttatggtagtgcaagctatgggcagcctccagcctactctactgaagcaacacctcctgctgcatcccaggatcactctgctgcccctgctgcggcccttggaacaacagcttcgacagctcctgaaaacagtgggggcgcccaaacatccgctgaaacttgagcttcagcagctaattgggaacaaacattttccaagaccctgccgtgtggtttcctccgcgctgttgcttaatataattacgcatctaatttagggtctacaactacaagttatttatttttctgcctgttgtttttgacaccatgactttctgtttccttgctatattgagtagtactttgcagttattttattgctggcgtatatgtctggactagtgatatatgtgtttgtgtggttacccttgttggaccgtaatgggtaccttccggcttggtctggacagataaatgcccatctatatgtattctgagccctgttatgattgctctaccgtcggaggtttctatgcccacttcagctggtgatgatggttatgtatgaaatttggtttcaatatttcgtaagacttatgtatcggtccataaaaggtttaagcagcatgaaagtctgcctttttgtttttgctgctggtagttctgagtctctaaagctaatgttctttgtttttttttgaacggaaaaagtttgtttaaggtttttgcatacttagcatagatatagtattacggcc

SEQ ID NO: 212809 - DNA, 4452 bp, Zea Mays
tgacaatttggagaaaataaaatcaaggggcgagctctacaaatgtcgacaccttgtctgcaagggtttttcgccgtcttatcccttcgtccacgctccctgcagccgccgcccaaaccctagcaacccgtcctccgccatggccgacgaccactactcctctaagaggaagtacgacgacccctcgccgccgccgcggcgcacggggttctcttcgggcccgccgcctgcctcgccgctcgcgggcggcgccccgtcgtacaacagcgtgccaccgccccccgatgagatccagctcgcgaagcagcgcgcgcaggagatcgcggcgcggatctttaacgccgcagaggccaagcgtcctcgcgtcgacaacggcgacgatgacagcggcggcttcggtgtaggcctgggcagcactggtggcggtggccgcatcggcggcggaggactcggcttctcgtcctctgccggtggtgggcacggggcttctatcccacaattatcttctcagagcagcgcacctcagtactcctcttatggtggatatcagggtacaagcaaaaagattgaaattccaaatggaagggttggtgttatcattggaaaagccggggaaactattaggtatatccaacttcaatcaggagcaaagattcaagtcacaagagaccatgaagctgaacctggtgcactgacaaggcaagttgagctttctggcaaacctgagcagataagcaaagctgaacagttgatcaaagaagttctggcagaggccgatgctgggtcatccggtgctggatctggtggccggaaatacaatgcaacacagccaggtgctgagacgttccagatgaaaattgctaataacaaggtgggactgattattgggaagggtggggagactataaagtccatgcaggccaattctggagctcgtattcaggttattcctttgcatctgcctgctggtgatacttcaactgaaagaactgtgcatattgatggtacccaagaacaaattgaagctgcaaagcaactgatcagtgaggttaccagtgaggtccgccttctttctcgttgtgtatattcctgatctgtaattgctttgccgttttgcgctttatctatcttaggtaggttgcttctggttcattctgtttattgtctcattttatgattttccccgattctttttgaaaattttgtttcttctgcttattgctgccctacattgattacactgcgtcttcgctaatcaatgtctgaaacatattgttcgtgggtacatcctcagcatgcaaggggattgttatatgtgttcttccctgtttatgaacataacttattaatggttttgggcaaggttcacaactggagtatataataaagcgaagaaacatatttgtaaactaacttgttatttatcaattagccactgctaggctcgttaaatggttttgtacagaaactgcatctaaagttttgacaagtattgatttgaaattcatatgatcgtttacatcatatggaatatggatgatactattttgggaaaaaaccagagagtccttgttccacttgttctattcagtggttattgtttttttgtttttccacatagagccaattagtgtcattagcttgccaggaggactgcaaactatcctggagagcaggtgtgttactgtttaatatcaatgtcctactggatataactctgtattttcacttataacatgttttatggattatgtgagctgacgtgctttatctggcatctgtatcatttcaaatttttcatctgatcctcctgtttctctggagcacaatggatacatatacattgctttctcatggcttgtttgtgagaaagaaatgctctaaacagacccaggtccccaggtgtttcggttgtttatggtggtcatgcattccaatttaggtccttctgttctagttgcacatatttagttctgatgtttatgatcactacagaggcaagtttttccttttaattcactattcccacctatacaacttggtggttgattaagagttgtattctcatgtacatagtctctgattcatgatacttattttatagttgggcccaaaaattaaggatctatattctctaaagtgtgcatagaccagacaagaagccagttaatagtgcaactaaagaagggttgtactggggaaagtaggtaaaaaggctaaaatttgggatccaaatacagtctgtgtcatgcataaattttatttggaatattcctgtatcatatatgttgaactctttcgcagcagaaggattccgaaaaccttgcatgaagctattttatgtgatatttgtgtctattatatgtaccttgtggctttgcaggttgctgtccaatcttttttgtgtgcttatatagtatcatttgaatgctgtctttgatgcttcattttatttaatttttttcaacttcagtaaagtagcatatctgatcattatatatcctgtcatttagcaatgaatagaatcttttagatagtagtggaagcacctttgtattatcatatatatctttggacatctattgaaactctattccatggtattgctattcaacatatatatatgtatatattcgtctagctgtccaatcttcattagccccatagttttgcgcgtgggcaacggtagatgggcatcactagcttgacgatcttgatcgaatcgtgctaggaatccaatgtctggtggctattctcagcagggatatcgccctcctcgtcctcagtcaaactggggcccgccttctgtgccaccccagcagcctggctatggttatatgcagcctggggcttatcctggggcaccgccacagtatggtgcacctcagcaaccttatggtagctaccccccaacatctggtggttatcagactggatgggatcagtctcaaaaccagcaatctcatacaactccccctggtactgggtatgattattatagtcagcagcagcaacctcagcaacaatctgcccctgggacagctgcttctactgatgccactagctacaattatggtcagccttcgacgtatgcttcacagggatatgattctacctacactcagcagagtggtgggcagcaagcatatggacatgatggctacactggttaccagacccaagggcagcagcagggctactctcagcagactggttatgatcagcagggttatggcacatctgcttatggatcagctgcaagctcgacccaggatgggtccaactatggtggtcctggaggggccagtcaggcatctccagggcagcaaacatcaaacccagctgctggaagccaacctggctataccagccaaccgcccactagtgctgcagcaacttacccacctcaaggttcagctccatctggatatggcgctccaccatcccagtctggctatggcacccaaccaccacagcaagccggatatggtcagggcgcttatgggcagccttctccacagggccagaaacctcctgcattgtcaccttatggacaggctccgcctcctggttctgctcaggctggttacgggcagtatggttacagccaacctgcttacggtgcaccaccagcttaccctggtgcacccattgcaagccaccagggctatggccagcagcagtcttatggccagcagcagtcttatggcgatgcttatggtagtgcaagctatgggcagcctccagcctactctactgaagcaacacctcctgctgcatcccaggatcactctgctgcccctgctgcggcccttggaacaacagcttcgacagctcctgaaaacagtgggggcgcccaaacatccgctgaaacttgagcttcagcagctaattgggaacaaacattttccaagaccctgccgtgtggtttcctccgcgctgttgcttaatataattacgcatctaatttagggtctacaactacaagttatttatttttctgcctgttgtttttgacaccatgactttctgtttccttgctatattgagtagtactttgcagttattttattgctggcgtatatgtctggactagtgatatatgtgtttgtgtggttacccttgttggaccgtaatgggtaccttccggcttggtctggacagataaatgcccatctatatgtattctgagccctgttatgattgctctaccgtcggaggtttctatgcccacttcagctggtgatgatggttatgtatgaaatttggtttcaatatttcgtaagacttatgtatcggtccataaaaggtttaagcagcatgaaagtctgcctttttgtttttgctgctggtagttctgagtctctaaagctaatgttctttgtttttttttgaacggaaaaagtttgtttaaggtttttgcatacttagcatagatatagtattacggcc

SEQ ID NO: 212810 - DNA, 2965 bp, Zea Mays
ttcctgttctgttcgcaccgcctccgcctccctccctccctctccccttccggactctctgctctcctctgctgctagtccatccattaatctcctctcctcgccatcgccgcactcacgctacgcttccctcctcaagcccgagggcttctccgggaaggaatcgccgcgccgggttcctgcaacgccccgccctttgcgcacccggagcaactgagtcgtggctatcgaggatgatgccgcgtttcagataacagagactgtgagagtgcacgacacacttgacatgcagagatgaagatcagtgcgcttctcacctccgcgggcatcaacattggcctctgtgttctcttcctgtcactctactccgttctcagaaagcagccggccaatgtcagggtctacttcggccgcaggatcgctgaggaacacgatcggctccgaggggcatttatcttggagaggtttgtcccatccactggatggatagtcaaagccctgcagtgtactgaggaagagatcctggctgctgctgggttggatgctgttgttttcaatagaattctagtattcaggctctgggtccattgtgtaaccctgtacataatttctgcagtagcttgcattcttctatacattgagtacaagcacattgccaggttgaagctccttcatcttacaagcgcaacaccaaaaccaaaccattttacagttcttgttcgtggaataccaaaggcagataaagaatcatgcagtgatgttgttgataatttcttcacaaagtatcactcatctagttatctcttccatcaagtagtttacaaagtcgggaaagttcagaagataatgactggcgcaaagaaggcatataagaagttcaaacatttcacagatgaaactgtcgatcaaggttgcaggacagttacctaccgctgttgtctgtgtggagcttcttcaaattctttcaagttgttgaacactgagtgtgagcagaacaaggggaaagcggacaataaatccatcttggacttagacgatgaggaatgcacaactgcttttgtatttttcaaaactcggtatgcagcacttattgcgtcagaaatacttcaaacatctaaccctatgaaatgggttgctaatcttgctccagaaccagaagacgtgtattggtccaatctttggctaccctataagcaactttgggctcgccgtattgctacactcctaggctctatctttttcatgttcatatttctgataccggtgacatttatacaaggactatctcagctagagcagttgcagcagaggcttcctttcctaagaggaatattgaagaagaaatactacatgactcagctagtaactgggtaccttcccagtgtcatactgcaaatcttcctgtacattgttgctccaattatgatgctgttttctacattggagggccctacatctcacagtgaaaggaagagaagtgcttgctgtaaagtgctgtactttacagtttggaacatattctttgctaatgtattatctggtactgtcattagtcaattgaatgtgttatcaagcccaaaggacatacctgtccagcttgctaaagctgtacctggacaggccactttcttcatcacctatgtcctgacctcaggatgggctagtttgtcatctgaagttatgcaactctttggtctgatatggaactttataatcaaatacgttctgagaatgagagaagatacagaattcgttccctcgtttccttaccacacagaagtaccaaaagttctgttgtttggactattgggcttcacattttctgtgctggctcctctgatcttaccttttctgctggtgtacttttgtcttggttatgttgtataccgcaatcagttgctcaatgtgtatcgaacaaggtatgacacaggtggtttgtattggccaattgcatacaacacagtcatattctcacttgtgctcacccagatcatctgccttggtgtatttggccttaaagaatcgccggtagctgcaggcttcactgtacctcttatcatccttactcttttgtttaaccagtactgcagaaaccggcttcttccattattcaagacttttccagcacaggatttaatcgacatggacagggaagatgaacgatcaggaagaatggatgaaattcaccacggacttcattctgcttattgccagttcgctgacactgtagatgtgcccttggataaaattgaaatcgttggtggggatgaggagcaaggctctagctcgggtcagtccagtgttaaagaaacgtgcgaggatcccaagaagcacctggctcaccctacactaaaaggactccctgttaaccgcctccggcatgccgtgaggtcggttactttcctgatcagattgcagagaagaggtttatcagaacagaaaatcggataattagttagccgccaaccccctttgcttgttggctatataaatgtacagaggcatacatgcatatacgatcgttcccttagaagagagaagggctaatgtagaagtctgtgggagaacatcatcatgagtgttgaggtgcaattttgttttgtcgcatggatgagtttgttggttctgcgggttatctggcagattcagctacccaaaccttagccttgcacgttgatgaaattaatgctcatggttttgttgtaagagattaatgtggccaaagtgatctagatgtataatgtcctcctctccattggtttgtgtttgagcctcgcaactttagcaggtctgttagtcttcatgcgccaatcatattgaggtattgagaattatactaattggtttgtctgacaagctgtaagcatgttagtccatgctgtcgagcagcaggtgtggaggttcttaacatgtagcattgagctggtatctgcatatctgcagctgttgggtatcatattccttt

SEQ ID NO: 212811 - DNA, 3048 bp, Zea Mays
ttcctgttctgttcgcaccgcctccgcctccctccctccctctccccttccggactctctgctctcctctgctgctagtccatccattaatctcctctcctcgccatcgccgcactcacgctacgcttccctcctcaagcccgagggcttctccgggaaggaatcgccgcgccgggttcctgcaacgccccgccctttgcgcacccggagcaactgagtcgtggctatcgaggatgatgccgcgtttcagataacagagactgtgagagtgcacgacacacttgacatgcagagatgaagatcagtgcgcttctcacctccgcgggcatcaacattggcctctgtgttctcttcctgtcactctactccgttctcagaaagcagccggccaatgtcagggtctacttcggccgcaggatcgctgaggaacacgatcggctccgaggggcatttatcttggagaggtttgtcccatccactggatggatagtcaaagccctgcagtgtactgaggaagagatcctggctgctgctgggttggatgctgttgttttcaatagaattctagtattcagcatacgcatcttctcccttgccgcagttttgtgtgttttcgggattcttccactcaattattttggacaggatatacaccatgttcgaattccttcagaatcactagatatatttacaattggcaatgtagaagtgaaatcaagatggagtacaagcacattgccaggttgaagctccttcatcttacaagcgcaacaccaaaaccaaaccattttacagttcttgttcgtggaataccaaaggcagataaagaatcatgcagtgatgttgttgataatttcttcacaaagtatcactcatctagttatctcttccatcaagtagtttacaaagtcgggaaagttcagaagataatgactggcgcaaagaaggcatataagaagttcaaacatttcacagatgaaactgtcgatcaaggttgcaggacagttacctaccgctgttgtctgtgtggagcttcttcaaattctttcaagttgttgaacactgagtgtgagcagaacaaggggaaagcggacaataaatccatcttggacttagacgatgaggaatgcacaactgcttttgtatttttcaaaactcggtatgcagcacttattgcgtcagaaatacttcaaacatctaaccctatgaaatgggttgctaatcttgctccagaaccagaagacgtgtattggtccaatctttggctaccctataagcaactttgggctcgccgtattgctacactcctaggctctatctttttcatgttcatatttctgataccggtgacatttatacaaggactatctcagctagagcagttgcagcagaggcttcctttcctaagaggaatattgaagaagaaatactacatgactcagctagtaactgggtaccttcccagtgtcatactgcaaatcttcctgtacattgttgctccaattatgatgctgttttctacattggagggccctacatctcacagtgaaaggaagagaagtgcttgctgtaaagtgctgtactttacagtttggaacatattctttgctaatgtattatctggtactgtcattagtcaattgaatgtgttatcaagcccaaaggacatacctgtccagcttgctaaagctgtacctggacaggccactttcttcatcacctatgtcctgacctcaggatgggctagtttgtcatctgaagttatgcaactctttggtctgatatggaactttataatcaaatacgttctgagaatgagagaagatacagaattcgttccctcgtttccttaccacacagaagtaccaaaagttctgttgtttggactattgggcttcacattttctgtgctggctcctctgatcttaccttttctgctggtgtacttttgtcttggttatgttgtataccgcaatcagttgctcaatgtgtatcgaacaaggtatgacacaggtggtttgtattggccaattgcatacaacacagtcatattctcacttgtgctcacccagatcatctgccttggtgtatttggccttaaagaatcgccggtagctgcaggcttcactgtacctcttatcatccttactcttttgtttaaccagtactgcagaaaccggcttcttccattattcaagacttttccagcacaggatttaatcgacatggacagggaagatgaacgatcaggaagaatggatgaaattcaccacggacttcattctgcttattgccagttcgctgacactgtagatgtgcccttggataaaattgaaatcgttggtggggatgaggagcaaggctctagctcgggtcagtccagtgttaaagaaacgtgcgaggatcccaagaagcacctggctcaccctacactaaaaggactccctgttaaccgcctccggcatgccgtgaggtcggttactttcctgatcagattgcagagaagaggtttatcagaacagaaaatcggataattagttagccgccaaccccctttgcttgttggctatataaatgtacagaggcatacatgcatatacgatcgttcccttagaagagagaagggctaatgtagaagtctgtgggagaacatcatcatgagtgttgaggtgcaattttgttttgtcgcatggatgagtttgttggttctgcgggttatctggcagattcagctacccaaaccttagccttgcacgttgatgaaattaatgctcatggttttgttgtaagagattaatgtggccaaagtgatctagatgtataatgtcctcctctccattggtttgtgtttgagcctcgcaactttagcaggtctgttagtcttcatgcgccaatcatattgaggtattgagaattatactaattggtttgtctgacaagctgtaagcatgttagtccatgctgtcgagcagcaggtgtggaggttcttaacatgtagcattgagctggtatctgcatatctgcagctgttgggtatcatattccttt

SEQ ID NO: 212812 - DNA, 3008 bp, Zea Mays
ttggattcctgttctgttcgcaccgcctccgcctccctccctccctctccccttccggactctctgctctcctctgctgctagtccatccattaatctcctctcctcgccatcgccgcactcacgctacgcttccctcctcaagcccgagggcttctccgggaaggaatcgccgcgccgggttcctgcaacgccccgccctttgcgcacccggagcaactgagtcgtggctatcgaggatgatgccgcgtttcagataacagagactgtgagagtgcacgacacacttgacatgcagagatgaagatcagtgcgcttctcacctccgcgggcatcaacattggcctctgtgttctcttcctgtcactctactccgttctcagaaagcagccggccaatgtcagggtctacttcggccgcaggatcgctgaggaacacgatcggctccgaggggcatttatcttggagaggtttgtcccatccactggatggatagtcaaagccctgcagtgtactgaggaagagatcctggctgctgctgggttggatgctgttgttttcaatagaattctagtattcagcatacgcatcttctcccttgccgcagttttgtgtgttttcgggattcttccactcaattattttggacaggatatacaccatgttcgaattccttcagaatcactagatatatttacaattggcaatgtagaagtgaaatcaagatggctctgggtccattgtgtaaccctgtacataatttctgcagtagcttgcattcttctatacattgagtacaagcacattgccaggttgaagctccttcatcttacaagcgcaacaccaaaaccaaaccattttacagttcttgttcgtggaataccaaaggcagataaagaatcatgcagtgatgttgttgataatttcttcacaaagtatcactcatctagttatctcttccatcaagtagtttacaaagtcgggaaagttcagaagataatgactggcgcaaagaaggcatataagaagttcaaacatttcacagatgaaactgtcgatcaaggttgcaggacagttacctaccgctgttgtctgtgtggagcttcttcaaattctttcaagttgttgaacactgagtgtgagcagaacaaggggaaagcggacaataaatccatcttggacttagacgatgagaaccagaagacgtgtattggtccaatctttggctaccctataagcaactttgggctcgccgtattgctacactcctaggctctatctttttcatgttcatatttctgataccggtgacatttatacaaggactatctcagctagagcagttgcagcagaggcttcctttcctaagaggaatattgaagaagaaatactacatgactcagctagtaactgggtaccttcccagtgtcatactgcaaatcttcctgtacattgttgctccaattatgatgctgttttctacattggagggccctacatctcacagtgaaaggaagagaagtgcttgctgtaaagtgctgtactttacagtttggaacatattctttgctaatgtattatctggtactgtcattagtcaattgaatgtgttatcaagcccaaaggacatacctgtccagcttgctaaagctgtacctggacaggccactttcttcatcacctatgtcctgacctcaggatgggctagtttgtcatctgaagttatgcaactctttggtctgatatggaactttataatcaaatacgttctgagaatgagagaagatacagaattcgttccctcgtttccttaccacacagaagtaccaaaagttctgttgtttggactattgggcttcacattttctgtgctggctcctctgatcttaccttttctgctggtgtacttttgtcttggttatgttgtataccgcaatcagttgctcaatgtgtatcgaacaaggtatgacacaggtggtttgtattggccaattgcatacaacacagtcatattctcacttgtgctcacccagatcatctgccttggtgtatttggccttaaagaatcgccggtagctgcaggcttcactgtacctcttatcatccttactcttttgtttaaccagtactgcagaaaccggcttcttccattattcaagacttttccagcacaggatttaatcgacatggacagggaagatgaacgatcaggaagaatggatgaaattcaccacggacttcattctgcttattgccagttcgctgacactgtagatgtgcccttggataaaattgaaatcgttggtggggatgaggagcaaggctctagctcgggtcagtccagtgttaaagaaacgtgcgaggatcccaagaagcacctggctcaccctacactaaaaggactccctgttaaccgcctccggcatgccgtgaggtcggttactttcctgatcagattgcagagaagaggtttatcagaacagaaaatcggataattagttagccgccaaccccctttgcttgttggctatataaatgtacagaggcatacatgcatatacgatcgttcccttagaagagagaagggctaatgtagaagtctgtgggagaacatcatcatgagtgttgaggtgcaattttgttttgtcgcatggatgagtttgttggttctgcgggttatctggcagattcagctacccaaaccttagccttgcacgttgatgaaattaatgctcatggttttgttgtaagagattaatgtggccaaagtgatctagatgtataatgtcctcctctccattggtttgtgtttgagcctcgcaactttagcaggtctgttagtcttcatgcgccaatcatattgaggtattgagaattatactaattggtttgtctgacaagctgtaagcatgttagtccatgctgtcgagcagcaggtgtggaggttcttaacatgtagcattgagctggtatctgcatatctgcagctgttgggtatcatattccttt

SEQ ID NO: 212813 - DNA, 3054 bp, Zea Mays
gtttggattcctgttctgttcgcaccgcctccgcctccctccctccctctccccttccggactctctgctctcctctgctgctagtccatccattaatctcctctcctcgccatcgccgcactcacgctacgcttccctcctcaagcccgagcaactgagtcgtggctatcgaggatgatgccgcgtttcagataacagagactgtgagagtgcacgacacacttgacatgcagagatgaagatcagtgcgcttctcacctccgcgggcatcaacattggcctctgtgttctcttcctgtcactctactccgttctcagaaagcagccggccaatgtcagggtctacttcggccgcaggatcgctgaggaacacgatcggctccgaggggcatttatcttggagaggtttgtcccatccactggatggatagtcaaagccctgcagtgtactgaggaagagatcctggctgctgctgggttggatgctgttgttttcaatagaattctagtattcagcatacgcatcttctcccttgccgcagttttgtgtgttttcgggattcttccactcaattattttggacaggatatacaccatgttcgaattccttcagaatcactagatatatttacaattggcaatgtagaagtgaaatcaagatggctctgggtccattgtgtaaccctgtacataatttctgcagtagcttgcattcttctatacattgagtacaagcacattgccaggttgaagctccttcatcttacaagcgcaacaccaaaaccaaaccattttacagttcttgttcgtggaataccaaaggcagataaagaatcatgcagtgatgttgttgataatttcttcacaaagtatcactcatctagttatctcttccatcaagtagtttacaaagtcgggaaagttcagaagataatgactggcgcaaagaaggcatataagaagttcaaacatttcacagatgaaactgtcgatcaaggttgcaggacagttacctaccgctgttgtctgtgtggagcttcttcaaattctttcaagttgttgaacactgagtgtgagcagaacaaggggaaagcggacaataaatccatcttggacttagacgatgaggaatgcacaactgcttttgtatttttcaaaactcggtatgcagcacttattgcgtcagaaatacttcaaacatctaaccctatgaaatgggttgctaatcttgctccagaaccagaagacgtgtattggtccaatctttggctaccctataagcaactttgggctcgccgtattgctacactcctaggctctatctttttcatgttcatatttctgataccggtgacatttatacaaggactatctcagctagagcagttgcagcagaggcttcctttcctaagaggaatattgaagaagaaatactacatgactcagctagtaactgggtaccttcccagtgtcatactgcaaatcttcctgtacattgttgctccaattatgatgctgttttctacattggagggccctacatctcacagtgaaaggaagagaagtgcttgctgtaaagtgctgtactttacagtttggaacatattctttgctaatgtattatctggtactgtcattagtcaattgaatgtgttatcaagcccaaaggacatacctgtccagcttgctaaagctgtacctggacaggccactttcttcatcacctatgtcctgacctcaggatgggctagtttgtcatctgaagttatgcaactctttggtctgatatggaactttataatcaaatacgttctgagaatgagagaagatacagaattcgttccctcgtttccttaccacacagaagtaccaaaagttctgttgtttggactattgggcttcacattttctgtgctggctcctctgatcttaccttttctgctggtgtacttttgtcttggttatgttgtataccgcaatcagttgctcaatgtgtatcgaacaaggtatgacacaggtggtttgtattggccaattgcatacaacacagtcatattctcacttgtgctcacccagatcatctgccttggtgtatttggccttaaagaatcgccggtagctgcaggcttcactgtacctcttatcatccttactcttttgtttaaccagtactgcagaaaccggcttcttccattattcaagacttttccagcacaggatttaatcgacatggacagggaagatgaacgatcaggaagaatggatgaaattcaccacggacttcattctgcttattgccagttcgctgacactgtagatgtgcccttggataaaattgaaatcgttggtggggatgaggagcaaggctctagctcgggtcagtccagtgttaaagaaacgtgcgaggatcccaagaagcacctggctcaccctacactaaaaggactccctgttaaccgcctccggcatgccgtgaggtcggttactttcctgatcagattgcagagaagaggtttatcagaacagaaaatcggataattagttagccgccaaccccctttgcttgttggctatataaatgtacagaggcatacatgcatatacgatcgttcccttagaagagagaagggctaatgtagaagtctgtgggagaacatcatcatgagtgttgaggtgcaattttgttttgtcgcatggatgagtttgttggttctgcgggttatctggcagattcagctacccaaaccttagccttgcacgttgatgaaattaatgctcatggttttgttgtaagagattaatgtggccaaagtgatctagatgtataatgtcctcctctccattggtttgtgtttgagcctcgcaactttagcaggtctgttagtcttcatgcgccaatcatattgaggtattgagaattatactaattggtttgtctgacaagctgtaagcatgttagtccatgctgtcgagcagcaggtgtggaggttcttaacatgtagcattgagctggtatctgcatatctgcagctgttgggtatcatattccttt

SEQ ID NO: 212814 - DNA, 3012 bp, Zea Mays
caaggattctcgttctcctccagcaactgagtcgtggctatcgaggatgatgccgcgtttcagataacagagactgtgagagtgcacgacacacttgacatgcagagatgaagatcagtgcgcttctcacctccgcgggcatcaacattggcctctgtgttctcttcctgtcactctactccgttctcagaaagcagccggccaatgtcagggtctacttcggccgcaggatcgctgaggaacacgatcggctccgaggggcatttatcttggagaggtttgtcccatccactggatggatagtcaaagccctgcagtgtactgaggaagagatcctggctgctgctgggttggatgctgttgttttcaatagaattctagtattcagcatacgcatcttctcccttgccgcagttttgtgtgttttcgggattcttccactcaattattttggacaggatatacaccatgttcgaattccttcagaatcactagatatatttacaattggcaatgtagaagtgaaatcaagatggctctgggtccattgtgtaaccctgtacataatttctgcagtagcttgcattcttctatacattgtaagttcgcttcccatttggattactggaatgcacatctccttgtatccagaatgtttttgacgattcattttacccataatccaggagtacaagcacattgccaggttgaagctccttcatcttacaagcgcaacaccaaaaccaaaccattttacagttcttgttcgtggaataccaaaggcagataaagaatcatgcagtgatgttgttgataatttcttcacaaagtatcactcatctagttatctcttccatcaagtagtttacaaagtcgggaaagttcagaagataatgactggcgcaaagaaggcatataagaagttcaaacatttcacagatgaaactgtcgatcaaggttgcaggacagttacctaccgctgttgtctgtgtggagcttcttcaaattctttcaagttgttgaacactgagtgtgagcagaacaaggggaaagcggacaataaatccatcttggacttagacgatgaggaatgcacaactgcttttgtatttttcaaaactcggtatgcagcacttattgcgtcagaaatacttcaaacatctaaccctatgaaatgggttgctaatcttgctccagaaccagaagacgtgtattggtccaatctttggctaccctataagcaactttgggctcgccgtattgctacactcctaggctctatctttttcatgttcatatttctgataccggtgacatttatacaaggactatctcagctagagcagttgcagcagaggcttcctttcctaagaggaatattgaagaagaaatactacatgactcagctagtaactgggtaccttcccagtgtcatactgcaaatcttcctgtacattgttgctccaattatgatgctgttttctacattggagggccctacatctcacagtgaaaggaagagaagtgcttgctgtaaagtgctgtactttacagtttggaacatattctttgctaatgtattatctggtactgtcattagtcaattgaatgtgttatcaagcccaaaggacatacctgtccagcttgctaaagctgtacctggacaggccactttcttcatcacctatgtcctgacctcaggatgggctagtttgtcatctgaagttatgcaactctttggtctgatatggaactttataatcaaatacgttctgagaatgagagaagatacagaattcgttccctcgtttccttaccacacagaagtaccaaaagttctgttgtttggactattgggcttcacattttctgtgctggctcctctgatcttaccttttctgctggtgtacttttgtcttggttatgttgtataccgcaatcagttgctcaatgtgtatcgaacaaggtatgacacaggtggtttgtattggccaattgcatacaacacagtcatattctcacttgtgctcacccagatcatctgccttggtgtatttggccttaaagaatcgccggtagctgcaggcttcactgtacctcttatcatccttactcttttgtttaaccagtactgcagaaaccggcttcttccattattcaagacttttccagcacaggatttaatcgacatggacagggaagatgaacgatcaggaagaatggatgaaattcaccacggacttcattctgcttattgccagttcgctgacactgtagatgtgcccttggataaaattgaaatcgttggtggggatgaggagcaaggctctagctcgggtcagtccagtgttaaagaaacgtgcgaggatcccaagaagcacctggctcaccctacactaaaaggactccctgttaaccgcctccggcatgccgtgaggtcggttactttcctgatcagattgcagagaagaggtttatcagaacagaaaatcggataattagttagccgccaaccccctttgcttgttggctatataaatgtacagaggcatacatgcatatacgatcgttcccttagaagagagaagggctaatgtagaagtctgtgggagaacatcatcatgagtgttgaggtgcaattttgttttgtcgcatggatgagtttgttggttctgcgggttatctggcagattcagctacccaaaccttagccttgcacgttgatgaaattaatgctcatggttttgttgtaagagattaatgtggccaaagtgatctagatgtataatgtcctcctctccattggtttgtgtttgagcctcgcaactttagcaggtctgttagtcttcatgcgccaatcatattgaggtattgagaattatactaattggtttgtctgacaagctgtaagcatgttagtccatgctgtcgagcagcaggtgtggaggttcttaacatgtagcattgagctggtatctgcatatctgcagctgttgggtatcatattccttt

SEQ ID NO: 212815 - DNA, 2982 bp, Zea Mays
attacatgtataaaaaaaaacagactcccttcgctgtctcgtcttccctgggctctctctctccctgcaaaagggccaagcaactgagtcgtggctatcgaggatgatgccgcgtttcagataacagagactgtgagagtgcacgacacacttgacatgcagagatgaagatcagtgcgcttctcacctccgcgggcatcaacattggcctctgtgttctcttcctgtcactctactccgttctcagaaagcagccggccaatgtcagggtctacttcggccgcaggatcgctgaggaacacgatcggctccgaggggcatttatcttggagaggtttgtcccatccactggatggatagtcaaagccctgcagtgtactgaggaagagatcctggctgctgctgggttggatgctgttgttttcaatagaattctagtattcagcatacgcatcttctcccttgccgcagttttgtgtgttttcgggattcttccactcaattattttggacaggatatacaccatgttcgaattccttcagaatcactagatatatttacaattggcaatgtagaagtgaaatcaagatggctctgggtccattgtgtaaccctgtacataatttctgcagtagcttgcattcttctatacattgagtacaagcacattgccaggttgaagctccttcatcttacaagcgcaacaccaaaaccaaaccattttacagttcttgttcgtggaataccaaaggcagataaagaatcatgcagtgatgttgttgataatttcttcacaaagtatcactcatctagttatctcttccatcaagtagtttacaaagtcgggaaagttcagaagataatgactggcgcaaagaaggcatataagaagttcaaacatttcacagatgaaactgtcgatcaaggttgcaggacagttacctaccgctgttgtctgtgtggagcttcttcaaattctttcaagttgttgaacactgagtgtgagcagaacaaggggaaagcggacaataaatccatcttggacttagacgatgaggaatgcacaactgcttttgtatttttcaaaactcggtatgcagcacttattgcgtcagaaatacttcaaacatctaaccctatgaaatgggttgctaatcttgctccagaaccagaagacgtgtattggtccaatctttggctaccctataagcaactttgggctcgccgtattgctacactcctaggctctatctttttcatgttcatatttctgataccggtgacatttatacaaggactatctcagctagagcagttgcagcagaggcttcctttcctaagaggaatattgaagaagaaatactacatgactcagctagtaactgggtaccttcccagtgtcatactgcaaatcttcctgtacattgttgctccaattatgatgctgttttctacattggagggccctacatctcacagtgaaaggaagagaagtgcttgctgtaaagtgctgtactttacagtttggaacatattctttgctaatgtattatctggtactgtcattagtcaattgaatgtgttatcaagcccaaaggacatacctgtccagcttgctaaagctgtacctggacaggccactttcttcatcacctatgtcctgacctcaggatgggctagtttgtcatctgaagttatgcaactctttggtctgatatggaactttataatcaaatacgttctgagaatgagagaagatacagaattcgttccctcgtttccttaccacacagaagtaccaaaagttctgttgtttggactattgggcttcacattttctgtgctggctcctctgatcttaccttttctgctggtgtacttttgtcttggttatgttgtataccgcaatcagttgctcaatgtgtatcgaacaaggtatgacacaggtggtttgtattggccaattgcatacaacacagtcatattctcacttgtgctcacccagatcatctgccttggtgtatttggccttaaagaatcgccggtagctgcaggcttcactgtacctcttatcatccttactcttttgtttaaccagtactgcagaaaccggcttcttccattattcaagacttttccagcacaggatttaatcgacatggacagggaagatgaacgatcaggaagaatggatgaaattcaccacggacttcattctgcttattgccagttcgctgacactgtagatgtgcccttggataaaattgaaatcgttggtggggatgaggagcaaggctctagctcgggtcagtccagtgttaaagaaacgtgcgaggatcccaagaagcacctggctcaccctacactaaaaggactccctgttaaccgcctccggcatgccgtgaggtcggttactttcctgatcagattgcagagaagaggtttatcagaacagaaaatcggataattagttagccgccaaccccctttgcttgttggctatataaatgtacagaggcatacatgcatatacgatcgttcccttagaagagagaagggctaatgtagaagtctgtgggagaacatcatcatgagtgttgaggtgcaattttgttttgtcgcatggatgagtttgttggttctgcgggttatctggcagattcagctacccaaaccttagccttgcacgttgatgaaattaatgctcatggttttgttgtaagagattaatgtggccaaagtgatctagatgtataatgtcctcctctccattggtttgtgtttgagcctcgcaactttagcaggtctgttagtcttcatgcgccaatcatattgaggtattgagaattatactaattggtttgtctgacaagctgtaagcatgttagtccatgctgtcgagcagcaggtgtggaggttcttaacatgtagcattgagctggtatctgcatatctgcagctgttgggtatcatattccttt

SEQ ID NO: 212816 - DNA, 1262 bp, Zea Mays
aagacgccatccatccgtccaccgggtagggtttctccagaattaaaagggccgaaggaggcgcccttaaaaacccttccattcacccgcagctcccatcctctcgctcgccaggagaagcagccgccgttgctgctgccgcgtccacagaatggggggtttcgtgaagactcataagaccaatgcgtatttcaaacgtttccaagtgaaattcaagagaaggcgggctggcaagacagactacagggccaggataaggctgattaaccaagacaaaaacaagtacaacacacccaaatacagatttgttgtgcgatttaccaacaaggacatcactgcccaaatcatatctgctagtatagcgggtgatatggttcttgcttctgcctactcgcatgagttgccacgatatggtcttgaagttggtctgaccaactatgcagctgcctactgcactggccttctgttggctcgccgtgtgctcaagatccgtggtttggatcaggagtacgagggcaatgttgaggccactggtgaggacttctctgttgagccagctgatgagaggaggcctttccgtgctctcttggatgttggccttatcaggactacaacagggaaccgtgtctttggtgccctcaagggagcattggatggaggcctggatattcctcacagcgagaagaggtttgctggattcaagaaggacgacaagcagttggatgctgatacccaccgcaggtacatctatggtggccatgttgctgactacatgaagaaccttgctgaagaggagccagaaaagtaccagagccacttcagtgcgtacattaagaagggagttgaggctgatgaaatagaagcgctgtacaagaaggtccatgctgccatccgtgccgatccttccattgttaagtcaaccaagcagccaccaaaggagcataagaggtacaaccccaagaagctgacatatgagcagaggaaggccagcctcattgaaaggctcaaccaactcaactcctccggtggtgctgatgacgacgatgaggacgacgagtaaagttaattgccatcgaagtagtgctatctcaatccagcgatcagcaattgtgtactgtcttatgcggggacctgtagtactgcaataggcatttttgtttaagttttgcgaggtgaacaaaactgtttctgttagtttcgagcttgagctctcaatgtttactctttacattgaaatgctgccgtttggacatgaaaaaaaa

SEQ ID NO: 212817 - DNA, 2629 bp, Zea Mays
aaaggaagggagacagggaggcagggcataaggtagaaggtgatggcgatggagaggtagaggtagaagaagatgaaaatactgagattgtgttatgtggagacaatgaaaacaatggggaggttgaggggtcatttgaaattactgaggaaggaggggaaaatgaaacaagtgaagaagcaaaacaggatgtgatgcccagtacaacaatgccattattaccaaacttgcttcagtgttgggtgacgccactatcaggcttgcttcgttgttgtggggaacatggcagccctcaagagagcaccaactcatacataaaagaaatgttgcaagtatccaagtttcttcgtgtcatcaatctacaaggcatcgagatcggtgagagcttaccaacaactattgggaatgtagcacaccttcagtacctcggtgtcactgcttgttccttgaaatatatcccatcgacaattgaaaaccttaaaaatcttcagacgttggatgttcgagacacgtttgtttataaacttccagaagcattttggagtataacgacactgcggcatgtatttggtgagggtcttttcttgcctaagcaggtgggtgacttgaaacacctgcagacacttgaaagcatagatcctgataaggataatggttgggacagcagcacttttgagaaaatggctcaccttcagtcccttcatgtttgggattctaaggagaatggagttaatgctgaggctctatctgctgttattgataaagctaatttcctcgaacacctagataccctcactcttgatgttcatgacatcccattgagtgtgttcaccagttcttccctgaggcgtcttcgtaccctaaacttagacggcaagttggacatgttggtgctgcaatctaaagaaaaggagtcaaaatttcatttccccaaccttagcttcctatcattggcaaacacagaggtgtcgcagaactttatcaacaagcttgggaagctgccttcgctcaccactctaatattggatgtaaaatcctacaaggatgatcaagatcaacttgccttccaagctggtggatttacaagccttacaaagctgatactttctgatctggaaattgtgaaactcgagataaagaaatatgcacttccagaactcacagatttggaggttgagttgtactacgacgaaatcgaaatcgaggtatatggcgagcatgagtttgtgaagaaaattgaacaagtggatgaatacctctatggccgtatcactcaagttccggttgctccaaagaaaattggtcagcttcctagcatgaagcaacgcgtggctagctgaagatcacaggtatatagaatagaaaaggcgacacagacagcgacgagacagtttgggagccgcatgtatttgagcatgcgtagagccggccgctccccgcgtttgtcgtccagcctctgcatactcttgcctccctccctagctccgtccagttggccaagccagatcgagcaagcaaaacttttatgacatctcccgttgttgacgcggccgggcttgtcggacgtacgtcctccgatccgttgacggtcaggcccttctgctgggtcgtcctgctgcatgcgtcgccgtggtcggggacacagaggaggagatcgagggagatggagtgcctgctggggctgctcaaggttagggtggtgcgaggagtgcacctggccatctgcgaccccctcacccacagcagcgacccctacgtcgtcctccgccacggacagcagaaagtcaagtcaagtataaaataccgcacgatcaatccggaatggaacgaggaactcaccctgtccatcacaaacatgatgaacccggtcaagattgaactcttcgaccatgacacgttcaccaaggacgacagcatgggcaacgccgagttctccatcctcaacttcgtggagatcgccaagcaggacctgagcgacgtccccgacggcacggtgatgaagacgatccacacggagaagggcagctgcctcgccaccgacagccacatcacgtgcaaggacggcaaggtctcccaggacatcctgctcaggctcagggacaccgagaccggcgacctcgtcctgcgcctgacctgggtcaacatccccggcgtcgcgcggtgaatcatcccctcgatcggcggggacggggccagggcatgaggcggcggcgacccgaccgacgcctgcccagctgattatacatccgtttacctggtattggcataaggagacccttggatgcgtgtaatgtttgtttgcagttctgataaggtgtgcaagaaggctcatgctactgggagcaatgcttctgcgggttttttatccacaaattacatttgttctcgttgatcacatttccataaaaccatttatcagtaggtcaccatgtagagcaaaagaaaaaaaaaattgcttcaaacatcacagatataggaaggactggatattcagattcaacctattggtgaggttgcgtgcaccgaccaaaagtttaaactgatagaaaaagaaatggacaattcatgttgtaattcaacactcctaatagaagagggctgcaactatgtttatgtaattgtgtcaact

SEQ ID NO: 212818 - DNA, 1165 bp, Zea Mays
caaacatgccctaagagggtttgggcctccagtccgtatatatatgctggcggttctgatcgcttccaggtccacacctctcttgcctctcccacgcccacgccaccccaccgcacgaagagagcgagcgcacgaacgggggagacatggcccactcgccgtcaggatcgcacgtagcggcgacgtcggtcgggaacgaggccttcaccgacgcggtggctgaggacggcggagactccaagctctccgcgctcctcttcgcgattgttcggcctagattggtggttgctgatgcagaatttccaagttcgtgcttccttcgaggaatatttgatgctggtgtgcggggattgagtcccccgctggtgtccgttgcctggtttcagtgtgtgctcagaatcgcgaccaatttggtccacatccatccgattcttctcgacgtgtcgcagcaggtgcaggacggtctccagagcatgctcaagacgagcagcgagatcgcgcggtgcgacggcgagatcgacgcggagctggagcgcgcgagggatgccgtggcggagaatgcccgagcgctgcacgacgaacgggagagagtccagaaggccgccctcgccgcgctcgacatcctcagcggcggccgttgcgtcatctgaagggatgcccgccgcatgccggcgccaccgacagtctgcccccgacctcagatcacgctcgattctcgcaagattcctgctccatttgtgaatgtcaccgtcggtgttacccttttgcagtagtagtaatattcgcactgatgctggcattactagtaacttgttgcctgttgaactgcaataatagagtttagaatttgagatgtgcacgatatgatcgatggagattggtctggactagtgcagaaatgacccataaatggtgacgttgagggtgtttaaggaactaaaactgttgattaagggtctgtttgattatagaagctaaagtaaaagtggctaaagcttagttagggtttgtttgacagagctctgacttgcttaaaaacaactctagctctagcttttttatagagctatagttatttcgtaaatcgtttggcagaaacgtcttattctagagctagaacaattttcctgtattaaagtgtcagagccggtgaacctactatttg

SEQ ID NO: 212819 - DNA, 2529 bp, Zea Mays
aagaaagaagcggcgtctggccaccgtaccccgccggccggagataacaagcaagcgccgcaacgcacgcgacgggccggccggggaggcgtataagtacgggcgcgtcttcttccgccgctgccccgacatctccctctctcgctggtgcgagagcgcgcgcgcaagcaagcaaggagcgtcgtgtctagctagctgagcacctggttttggagcatggaggacaacggtgccgccgccgccgccgccgctcccgcgacgagcatgcctgccgagaagcgtgtggcggtcatccagggggacgcgccgccggagccggcggcggggctactgccctgcgggccgaggaagacggggctccacctcttcgtcatgaacatcaggagcgtcttcaagctggacgggcttgggtcggaggtgctgcgcatcgcggtgcccgcgtcgcttgcgttggcggcggatccgctcgcctctttggtggacacggcgttcatcggccgtttaggttcggtggagatcgccgccgttggcgtttcgatcgccatatttaaccaagtctccaaggtctgcatctaccctctcgttagcgtcacaacgtcgttcgtcgcggaggaagacgcgatcatcagtaaggccgtccgaggaaacagcagccaggaggaggacgtggagaaagcctcccacgtgggctttgatccggagaccagcaatctgcatgcatctggccctgcaggtatggcagaatgcgtgaactcgtgtatccctacggagtgcgcagcagatccctctggcaggcaagggcggtgcgagaagaggtacgtgccgtcggtcacgtcggcgctaatagtcggttccattctcggcctgcttcaggccgtcttcctggtcctttcggccagattcgtgctcaacatcatgggtgttaagtccggatccccgatgcaagggcctgcggtgcgctacctaacgataaggtcccttggtgcccccgctgtgctgctgtctctggccatgcaaggggttttccgggggttcaaggacaccaagacaccgttatacgctactgtggttggcgacgcggcgaacatcatactggacccgattttgatgtttgtttgccatatgggcgtcactggtgcggctattgctcatgttgtttctcagtacatgataacgttgatactgctgtgccggctcgtccagcgagttcacgttatcccacccagcattaaatctctgaaatttgggaggtttcttggatgtggattcctgctgctcgcaagggttgtcgcggtgacgttctgcgtcacgctggcggcgtccctggccgctcgccatggacccaccgtcatggcaggcttccagatctgctgccagctctggctggccacgtctcttctcgccgatggattggccgtggcaggacaggcggtgcttgcaagcgcgttcgccaagaacgacagtaagaaggtcgctgccgcgacatcccgtgtgttgcagctgagcattgtcctgggcatgggtctcaccgtcgtgctgggacttgctatgaggttcggggctggcattttcacaagcgacgtgcccgtgatccaagtcattcacagaggcatcccgtttgtcgccgggacgcagaccatcaattccctggccttcgtgtttgatggcatcaactttggagcgtcagactacagatactctgcttactccatggttgctgttgcgtctgtgtcgataccatgcctgctgtacctttctgcgcataacggattcatcggtatatggatcgcattgacgatctacatgagtctgaggaccatagctagcacctggaggatgggggcagcgaggggaccatggacgtttctccggaactgatgatggattggcttggaactgatgatctgcggcacactgctgacagataaggctgcgccgcgctgcgcatgcgcctctcatgtagcatcagcgaagtatagtacgtgttctgctggtgtttaaagcttcggatatcggaggtagatgtagctatgggactatcccctcctgatcgtctgacttgtggccttgcgtggagagtttacgttgctccgttgatttatgttgtatcatgccaggatgtcagtttaataccatacatcggtaaagtgtctctctagtaactccattcttttctccttttccccccctttgtgcaagctatttttttagctgtttgatgagaccttgcaagaactgttttactgcgtggaagcagcaaaataacagcgataaaagagacgtgtagtaccagagtccctctgagtgccagtccaggatgctttgataacgttaaccagacaatttgataacaatccatactccactaagcatatagtagtgtatacccgaaaactcccatcagttatttgtccctcactccctctctatcggctttcaaccaataatcaggaacacataatgctgaaagaacacgaaatccttctagtctttgacagcatatagccgatacatcttgcaaaaataaat

SEQ ID NO: 212820 - DNA, 2083 bp, Zea Mays
accagccaccaaaaccacctgctgctcgacctttttcgagatcctggtgggcccggagcaccctccgccttccacggccccctccacttcctctgtccttcgccctcctgtcctttcaaaccccacggcggtgcagagcgcatcgccgagcccccgcccacccgacagcctcacctcgaattcttctccagcagttcgttgccctcctccttccccttccctcctcgacaggtgtccggcggcttggatctatgcggacccggcatctgtattttacctcattggggatggaggtgcaggtgctggatttgtcttccgattccgagggcgaggtgtcggcgcactcgcccgatcacaagcgcccctctcagcagccgggtgtagaccccaatcgccgggttggcgacaatggttccagcgccgtggacagcctcttcgaggaagcgggcgcggcgaggccaccgcgtcaccccagcgacgcgctgaacaaagggaaggagaaggtcgtcgatgtggagagcgtggagtctccaaagcacggtggggaatcgctcggtgctgctggccgcgtcctgggagctgggagtgatccgtggagcgcactggtgagcaagtgcaaggctggggacagtgggaataatggaactgagtgttgggatagttggggtgactggggtgatcagcttactaactcggcccccgtggcgcgtctagggtcagagaggacggggtttcatgagacatatgaactgcgagggacgcctcagcttcacagtgactcttcagcattcagtgaccagtggaagggtattctgggtgcaagccctgctgatcctgtcaactcactgtggtgctccagggatactagcatgaaagatagtgaggatgaaaccttgtctcaaaggtctgtgtctgttcgtgaaatttctagctgtgattattttcttaccgaagatagtagctcgtcatggctgtcgaaggtcaaggggctgaacttcccacttcctgatgagcatcagttgagaaccaggcagattgagaatgatgagatgtttgcccgtagacttcaggagcagctcaatcagcaacagccaggatctcagcattctgaagcggttgataaaacaatagcctggacattacatgagcaagatgctgagcatgccagatttgctgcaagagaagtccagtctagttctagggacagatcaatggcacacctatattcttatggacgtcactcacctgttcaaagttttgcttcttgggcatcaaatcatactccaatttcaatgtcaagcagaggcggcttgcaaagaaactccaactgccctcaagcggagcaacgcaatatgcttatctctcagttaaccagaggatgcttcagagaagacatggatctacaaacgagattgggctgtactggactcactttctgaagcatttaggaactgcgaggacacgcactctccagattcggatgatgatgattacgaggaccaaatagcgctcggcgtcgacagccagcaaagaggcgcctctgatgatcagataaacagcctgccactatcagtaatcgaggtcgttccgatgaaccctgcaatatatgcttggactgccctgctgctggtgattcactccggcgtttgccatgcatgcacaagtttcacaaagagtgcattgacaggtggctcgggatgaagatatggtgtccggtttgcaagtcaaatgtgttctcccagtaggccgtgagcatctcttatactttttggagcagcatcgaagctagattatagttggctgatacgaggcattgttacggctgcagtgtgtacattgcgttcttgacttgtgctctcttctgctccgtggggagcatttgaatgctctttttccgcggagagtttttttggctgtgagagaaggcacggaaaacctcattctgctattctcatttcttgtatacgtgtatgtaggctgacatgcatacaactacctagcgtacgtcagtcttgggcggtgccatgggggtatgaagcgctgagatgggacttgcaccctgaccttgggttgccgaaggccg

SEQ ID NO: 212821 - DNA, 1618 bp, Zea Mays
cacgcctggtctcgtcgccctaaccgcacccttccaatgacggggcgctagcgaagccgcgcatcctccctgcatctcaccggtcgtcaccctaaccgcgcccttccaacgacgaggtcgctaccgaagcgccgcgcatcctcctcgcatcttcgtcgctcctgcgccgcgccgaaatcctcccccaccgcgcccttccatcgacgaccatggcggactacccacgcgtcatgcacgccccgccctccgtgcctgtcctccggggccagcgcgctcccctcctcctcaccagactctgccgccgcgggtctggttgcccacctcaactccgaggaacgaggactccaccatgctcgctctagagacaccgccttcctgtcctccgctcaccgtgcttgtcctcggatccacgactgccgccccgctccccccaaataccactgatgcagggatccaagcccctgccatctattcagccgccccgacgtccacaggggataccaactgatgggccaccaaccatgttgttccacgctctgggctgctgctggaagctaatcaatcgcttggttagaccatcgcagattagcggtgggattcccaggttcaataatctcgtttcgggccatgccctcgatgtcattatctggcttgaggtttgtcgtggagaagcaaagggatgtttacatgtgctctattctaagtcttagggtctgggattaattgggcaagcatggagtattcgcttggttctactcaagaagggaatcaaggaattcaggactttatgcactgattgtaatagtccaacgaaagagcggatccacatgttaaaaatctcagcaagtgttcctttctgacagagtttcaacttatgtgttactaatgtagaagggatcccaattacttgctgcattgggtgatcgaacagtcatagtatggagtttaggaaacaggaaatgcattggtctcttgtttgggcatactgggagcgtgaggtcgttgccttgccattcctccaatccggatcatgtattaagggtgtggacggttatgttgcctttttcacaaacttcaatttatgatcaattgcaagcaagatgtggtctagctgttggaatgcggatcacgaaggtggtgtcttcactcttcagcatgttccagtgtcgtgtgttccagatcgggttgctatcgggagtctgttggtttgcatggaatcaatcaggtttagcttggattcatgaataattggtttgtgtcgtccggctgttcgagctacgtcatcatgattagaatctacatttttccctacgcttgtatttaaaatggagtttacaaagataatcgttagaatggaatcgaaggctcattttttgttctatctgataatagccgaacgaatgaaatgcaatttaaatttatgagatattgaagttaataataataaatactgtttgttttcatataatcattatgtacaaacattatatcgaataaattgtggttcgttgcaacgcacgagcacttacctagtattgtaaacaagaattgaacattactttgtatatttgtccatgccttgtaatatattttacctttccatccatgtataaattgc

SEQ ID NO: 212822 - DNA, 1686 bp, Zea Mays
cacgcctggtctcgtcgccctaaccgcacccttccaatgacggggcgctagcgaagccgcgcatcctccctgcatctcaccggtcgtcaccctaaccgcgcccttccaacgacgaggtcgctaccgaagcgccgcgcatcctcctcgcatcttcgtcgctcctgcgccgcgccgaaatcctcccccaccgcgcccttccatcgacgaccatggcggactacccacgcgtcatgcacgccccgccctccgtgcctgtcctccggggccagcgcgctcccctcctcctcaccagactctgccgccgcgggtctggttgcccacctcaactccgaggaacgaggactccaccatgctcgctctagagacaccgccttcctgtcctccgctcaccgtgcttgtcctcggatccacgactgccgccccgctccccccaaataccactgatgcagggatccaagcccctgccatctattcagccgccccgacgtccacaggggataccaactgatgggccaccaaccatgttgttccacgctctgggctgctgctggaagctaatcaatcgcttggttagaccatcgcagattagcggtgggattcccaggttcaataatctcgtttcgggccatgccctcgatgtcattatctggcttgaggtttgtcgtggagaagcaaagggatgtttacatgtgctctattctaagtcttagggtctgggattaattgggtacgattcgttctagaggatgatgcgagcaagcatggagtattcgcttggttctactcaagaagggaatcaaggaattcaggactttatgcactgattgtaatagtccaacgaaagagcggatccacatgttaaaaatctcagcaagtgttcctttctgacagagtttcaacttatgtgttactaatgtagaagggatcccaattacttgctgcattgggtgatcgaacagtcatagtatggagtttaggaaacaggaaatgcattggtctcttgtttgggcatactgggagcgtgaggtcgttgccttgccattcctccaatccggagagaacaagaacttgactggaacatcaagataagcaagtatcatgtattaagggtgtggacggttatgttgcctttttcacaaacttcaatttatgatcaattgcaagcaagatgtggtctagctgttggaatgcggatcacgaaggtggtgtcttcactcttcagcatgttccagtgtcgtgtgttccagatcgggttgctatcgggagtctgttggtttgcatggaatcaatcaggtttagcttggattcatgaataattggtttgtgtcgtccggctgttcgagctacgtcatcatgattagaatctacatttttccctacgcttgtatttaaaatggagtttacaaagataatcgttagaatggaatcgaaggctcattttttgttctatctgataatagccgaacgaatgaaatgcaatttaaatttatgagatattgaagttaataataataaatactgtttgttttcatataatcattatgtacaaacattatatcgaataaattgtggttcgttgcaacgcacgagcacttacctagtattgtaaacaagaattgaacattactttgtatatttgtccatgccttgtaatatattttacctttccatccatgtataaattgc

SEQ ID NO: 212823 - DNA, 1736 bp, Zea Mays
cacgcctggtctcgtcgccctaaccgcacccttccaatgacggggcgctagcgaagccgcgcatcctccctgcatctcaccggtcgtcaccctaaccgcgcccttccaacgacgaggtcgctaccgaagcgccgcgcatcctcctcgcatcttcgtcgctcctgcgccgcgccgaaatcctcccccaccgcgcccttccatcgacgaccatggcggactacccacgcgtcatgcacgccccgccctccgtgcctgtcctccggggccagcgcgctcccctcctcctcaccagactctgccgccgcgggtctggttgcccacctcaactccgaggaacgaggactccaccatgctcgctctagagacaccgccttcctgtcctccgctcaccgtgcttgtcctcggatccacgactgccgccccgctccccccaaataccactgatgcagggatccaagcccctgccatctattcagccgccccgacgtccacaggggataccaactgatgggccaccaaccatgttgttccacgctctgggctgctgctggaagctaatcaatcgcttggttagaccatcgcagattagcggtgggattcccaggttcaataatctcgtttcgggccatgccctcgatgtcattatctggcttgaggtttgtcgtggagaagcaaagggatgtttacatgtgctctattctaagtcttagggtctgggattaattgggtacgattcgttctagaggatgatgcgagcaagcatggagtattcgcttggttctactcaagaagggaatcaaggaattcaggactttatgcactgattgtaatagtccaacgaaagagcggatccacatgttaaaaatctcagcaagtgttcctttctgacagagtttcaacttatgtgttactaatgtagaagggatcccaattacttgctgcattgggtgatcgaacagtcatagtatggagtttaggaaacaggaaatgcattggtctcttgtttgggcatactgggagcgtgaggtcgttgccttgccattcctccaatccggagagaacaagaacttgactggaacatcaagataagcaagtgtaaatacccaccttgaaattggtagttttaattcaaacacatgccttttatcatgtattaagggtgtggacggttatgttgcctttttcacaaacttcaatttatgatcaattgcaagcaagatgtggtctagctgttggaatgcggatcacgaaggtggtgtcttcactcttcagcatgttccagtgtcgtgtgttccagatcgggttgctatcgggagtctgttggtttgcatggaatcaatcaggtttagcttggattcatgaataattggtttgtgtcgtccggctgttcgagctacgtcatcatgattagaatctacatttttccctacgcttgtatttaaaatggagtttacaaagataatcgttagaatggaatcgaaggctcattttttgttctatctgataatagccgaacgaatgaaatgcaatttaaatttatgagatattgaagttaataataataaatactgtttgttttcatataatcattatgtacaaacattatatcgaataaattgtggttcgttgcaacgcacgagcacttacctagtattgtaaacaagaattgaacattactttgtatatttgtccatgccttgtaatatattttacctttccatccatgtataaattgc

SEQ ID NO: 212824 - DNA, 1533 bp, Zea Mays
cgcctggtctcgtcgccctaaccgcacccttccaatgacggggcgctagcgaagccgcgcatcctccctgcatctcaccggtcgtcaccctaaccgcgcccttccaacgacgaggtcgctaccgaagcgccgcgcatcctcctcgcatcttcgtcgctcctgcgccgcgccgaaatcctcccccaccgcgcccttccatcgacgaccatggcggactacccacgcgtcatgcacgccccgccctccgtgcctgtcctccggggccagcgcgctcccctcctcctcaccagactctgccgccgcgggtctggttgcccacctcaactccgaggaacgaggactccaccatgctcgctctagagacaccgccttcctgtcctccgctcaccgtgcttgtcctcggatccacgactgccgccccgctccccccaaataccactgatgcagggatccaagcccctgccatctattcagccgccccgacgtccacaggggataccaactgatgggccaccaaccatgttgttccacgctctgggctgctgctggaagctaatcaatcgcttggttagaccatcgcagattagcggtgggattcccaggcaagcatggagtattcgcttggttctactcaagaagggaatcaaggaattcaggactttatgcactgattgtaatagtccaacgaaagagcggatccacatgttaaaaatctcagcaagtgttcctttctgacagagtttcaacttatgtgttactaatgtagaagggatcccaattacttgctgcattgggtgatcgaacagtcatagtatggagtttaggaaacaggaaatgcattggtctcttgtttgggcatactgggagcgtgaggtcgttgccttgccattcctccaatccggagagaacaagaacttgactggaacatcaagataagcaagtatcatgtattaagggtgtggacggttatgttgcctttttcacaaacttcaatttatgatcaattgcaagcaagatgtggtctagctgttggaatgcggatcacgaaggtggtgtcttcactcttcagcatgttccagtgtcgtgtgttccagatcgggttgctatcgggagtctgttggtttgcatggaatcaatcaggtttagcttggattcatgaataattggtttgtgtcgtccggctgttcgagctacgtcatcatgattagaatctacatttttccctacgcttgtatttaaaatggagtttacaaagataatcgttagaatggaatcgaaggctcattttttgttctatctgataatagccgaacgaatgaaatgcaatttaaatttatgagatattgaagttaataataataaatactgtttgttttcatataatcattatgtacaaacattatatcgaataaattgtggttcgttgcaacgcacgagcacttacctagtattgtaaacaagaattgaacattactttgtatatttgtccatgccttgtaatatattttacctttccatccatgtataaattgc

SEQ ID NO: 212825 - DNA, 1705 bp, Zea Mays
cgcctggtctcgtcgccctaaccgcacccttccaatgacggggcgctagcgaagccgcgcatcctccctgcatctcaccggtcgtcaccctaaccgcgcccttccaacgacgaggtcgctaccgaagcgccgcgcatcctcctcgcatcttcgtcgctcctgcgccgcgccgaaatcctcccccaccgcgcccttccatcgacgaccatggcggactacccacgcgtcatgcacgccccgccctccgtgcctgtcctccggggccagcgcgctcccctcctcctcaccagactctgccgccgcgggtctggttgcccacctcaactccgaggaacgaggactccaccatgctcgctctagagacaccgccttcctgtcctccgctcaccgtgcttgtcctcggatccacgactgccgccccgctccccccaaataccactgatgcagggatccaagcccctgccatctattcagccgccccgacgtccacaggggataccaactgatgggccaccaaccatgttgttccacgctctgggctgctgctggaagctaatcaatcgcttggttagaccatcgcagattagcggtgggattcccaggttcaataatctcgtttcgggccatgccctcgatgtcattatctggcttgaggtttgtcgtggagaagcaaagggatgtttacatgtgctctattctaagtcttagggtctgggattaattgggtacgattcgttctagaggatgatgcgaagtttcaacttatgtgttactaatgtagaagggatcccaattacttgctgcattgggtgatcgaacagtcatagtatggagtttaggaaacaggaaatgcattggtctcttgtttgggcatactgggagcgtgaggtcgttgccttgccattcctccaatccggagagaacaagaacttgactggaacatcaagataagcaagtgtaaatacccaccttgaaattggtagttttaattcaaacacatgccttttgtatgttatgttcttgcctccttggtattataacatgcttgcattaaatgatttattgaaggtaaattctggaagtattgtgattcccataaaacgtgtccttacagatcatgtattaagggtgtggacggttatgttgcctttttcacaaacttcaatttatgatcaattgcaagcaagatgtggtctagctgttggaatgcggatcacgaaggtggtgtcttcactcttcagcatgttccagtgtcgtgtgttccagatcgggttgctatcgggagtctgttggtttgcatggaatcaatcaggtttagcttggattcatgaataattggtttgtgtcgtccggctgttcgagctacgtcatcatgattagaatctacatttttccctacgcttgtatttaaaatggagtttacaaagataatcgttagaatggaatcgaaggctcattttttgttctatctgataatagccgaacgaatgaaatgcaatttaaatttatgagatattgaagttaataataataaatactgtttgttttcatataatcattatgtacaaacattatatcgaataaattgtggttcgttgcaacgcacgagcacttacctagtattgtaaacaagaattgaacattactttgtatatttgtccatgccttgtaatatattttacctttccatccatgtataaattgc

SEQ ID NO: 212826 - DNA, 2844 bp, Zea Mays
cgcctggtctcgtcgccctaaccgcacccttccaatgacggggcgctagcgaagccgcgcatcctccctgcatctcaccggtcgtcaccctaaccgcgcccttccaacgacgaggtcgctaccgaagcgccgcgcatcctcctcgcatcttcgtcgctcctgcgccgcgccgaaatcctcccccaccgcgcccttccatcgacgaccatggcggactacccacgcgtcatgcacgccccgccctccgtgcctgtcctccggggccagcgcgctcccctcctcctcaccagactctgccgccgcgggtctggttgcccacctcaactccgaggaacgaggactccaccatgctcgctctagagacaccgccttcctgtcctccgctcaccgtgcttgtcctcggatccacgactgccgccccgctccccccaaataccactgatgcagggatccaagcccctgccatctattcagccgccccgacgtccacaggggataccaactgatgggccaccaaccatgttgttccacgctctgggctgctgctggaagctaatcaatcgcttggttagaccatcgcagattagcggtgggattcccaggttcaataatctcgtttcgggccatgccctcgatgtcattatctggcttgaggtttgtcgtggagaagcaaagggatgtttacatgtgctctattctaagtcttagggtctgggattaattgggtacgattcgttctagaggatgatgcgagtaagtgcttaagtgccctgctaattttttcagctacctctttcgaatttgttgtctacctgtttgttaggcaagcatggagtattcgcttggttctactcaagaagggaatcaaggaattcaggactttatgcactgattgtaatagtccaacgaaagagcggatccacatgttaaaaatctcagcaagtgttcctttctgacagagtttcaacttatgtgttactaatgtagaagggatcccaattacttgctgcattgggtgatcgaacagtcatagtatggagtttaggaaacaggaaatgcattggtctcttgtttgggcatactgggagcgtgaggtcgttgccttgccattcctccaatccgggttagtaatgtatatcataaactaaatgactgaagcctttcattttaatttgtgtgcatttaactccatatgaagtagtttttttctttgcacaactcattgtttctggttcaaaggatggatcatttgctctctcggattctcagttgacttactctgataatataattttcctctaaagcaagaaagttgttgattctctctttagtgtgtacaccatttaaaaactgtcagattaagtttctccgtcctatgcaccgaagaggccctaaagctttatgtacacacgattttttcttgtattgtcctgttcacctctatccaaactatttgatgattggaaaatttaaaacagagggagtattatgttttagttttgttggcgtttggaaattactaaacttttgaggaaaattacatgcttgatattcaaatcgcaaatgttgtacattcctgcaacctaggcttgtaaatttcccattagagttttctctatttttttggcaatctgtttagttcatctgttaatgaaccgggtaagatgattagttctttgtcatgttatttactttgcatttaaactgggtaagatcattagcgctttgtcatgttatttactttgcatttagtcataatagaaattacttatttgtttcaaactataaaatgatttgacttctctacatacattgttcttaatacttatctaacatctaaaccctaaattgctccatagtttcaccaacaatatattttacttttgtagtttctgatgctgccaaactaggtccataagtattatttgcccatctatgatattgttccatgtacgactagaagttcaaatatctggaaaatgttctcttaacgtgatatcagacagcaccctgatttaaaatatcttaaccttcagtattgtccatgtaattgcagagagaacaagaacttgactggaacatcaagataagcaagtgtaaatacccaccttgaaattggtagttttaattcaaacacatgccttttgtatgttatgttcttgcctccttggtattataacatgcttgcattaaatgatttattgaaggtaaattctggaagtattgtgattcccataaaacgtgtccttacagatcatgtattaagggtgtggacggttatgttgcctttttcacaaacttcaatttatgatcaattgcaagcaagatgtggtctagctgttggaatgcggatcacgaaggtggtgtcttcactcttcagcatgttccagtgtcgtgtgttccagatcgggttgctatcgggagtctgttggtttgcatggaatcaatcaggtttagcttggattcatgaataattggtttgtgtcgtccggctgttcgagctacgtcatcatgattagaatctacatttttccctacgcttgtatttaaaatggagtttacaaagataatcgttagaatggaatcgaaggctcattttttgttctatctgataatagccgaacgaatgaaatgcaatttaaatttatgagatattgaagttaataataataaatactgtttgttttcatataatcattatgtacaaacattatatcgaataaattgtggttcgttgcaacgcacgagcacttacctagtattgtaaacaagaattgaacattactttgtatatttgtccatgccttgtaatatattttacctttccatccatgtataaattgc

SEQ ID NO: 212827 - DNA, 1758 bp, Zea Mays
cgcctggtctcgtcgccctaaccgcacccttccaatgacggggcgctagcgaagccgcgcatcctccctgcatctcaccggtcgtcaccctaaccgcgcccttccaacgacgaggtcgctaccgaagcgccgcgcatcctcctcgcatcttcgtcgctcctgcgccgcgccgaaatcctcccccaccgcgcccttccatcgacgaccatggcggactacccacgcgtcatgcacgccccgccctccgtgcctgtcctccggggccagcgcgctcccctcctcctcaccagactctgccgccgcgggtctggttgcccacctcaactccgaggaacgaggactccaccatgctcgctctagagacaccgccttcctgtcctccgctcaccgtgcttgtcctcggatccacgactgccgccccgctccccccaaataccactgatgcagggatccaagcccctgccatctattcagccgccccgacgtccacaggggataccaactgatgggccaccaaccatgttgttccacgctctgggctgctgctggaagctaatcaatcgcttggttagaccatcgcagattagcggtgggattcccaggttcaataatctcgtttcgggccatgccctcgatgtcattatctggcttgaggtttgtcgtggagaagcaaagggatgtttacatgtgctctattctaagtcttagggtctgggattaattgggtacgattcgttctagaggatgatgcgagtaagtgcttaagtgccctgctaattttttcagctacctctttcgaatttgttgtctacctgtttgttaggcaagcatggagtattcgcttggttctactcaagaagggaatcaaggaattcaggactttatgcactgattgtaatagtccaacgaaagagcggatccacatgttaaaaatctcagcaagtgttcctttctgacagagtttcaacttatgtgttactaatgtagaagggatcccaattacttgctgcattgggtgatcgaacagtcatagtatggagtttaggaaacaggaaatgcattggtctcttgtttgggcatactgggagcgtgaggtcgttgccttgccattcctccaatccggagagaacaagaacttgactggaacatcaagataagcaagtgtaaatcatgtattaagggtgtggacggttatgttgcctttttcacaaacttcaatttatgatcaattgcaagcaagatgtggtctagctgttggaatgcggatcacgaaggtggtgtcttcactcttcagcatgttccagtgtcgtgtgttccagatcgggttgctatcgggagtctgttggtttgcatggaatcaatcaggtttagcttggattcatgaataattggtttgtgtcgtccggctgttcgagctacgtcatcatgattagaatctacatttttccctacgcttgtatttaaaatggagtttacaaagataatcgttagaatggaatcgaaggctcattttttgttctatctgataatagccgaacgaatgaaatgcaatttaaatttatgagatattgaagttaataataataaatactgtttgttttcatataatcattatgtacaaacattatatcgaataaattgtggttcgttgcaacgcacgagcacttacctagtattgtaaacaagaattgaacattactttgtatatttgtccatgccttgtaatatattttacctttccatccatgtataaattgc

SEQ ID NO: 212828 - DNA, 1822 bp, Zea Mays
cgcctggtctcgtcgccctaaccgcacccttccaatgacggggcgctagcgaagccgcgcatcctccctgcatctcaccggtcgtcaccctaaccgcgcccttccaacgacgaggtcgctaccgaagcgccgcgcatcctcctcgcatcttcgtcgctcctgcgccgcgccgaaatcctcccccaccgcgcccttccatcgacgaccatggcggactacccacgcgtcatgcacgccccgccctccgtgcctgtcctccggggccagcgcgctcccctcctcctcaccagactctgccgccgcgggtctggttgcccacctcaactccgaggaacgaggactccaccatgctcgctctagagacaccgccttcctgtcctccgctcaccgtgcttgtcctcggatccacgactgccgccccgctccccccaaataccactgatgcagggatccaagcccctgccatctattcagccgccccgacgtccacaggggataccaactgatgggccaccaaccatgttgttccacgctctgggctgctgctggaagctaatcaatcgcttggttagaccatcgcagattagcggtgggattcccaggttcaataatctcgtttcgggccatgccctcgatgtcattatctggcttgaggtttgtcgtggagaagcaaagggatgtttacatgtgctctattctaagtcttagggtctgggattaattgggtacgattcgttctagaggatgatgcgagtaagtgcttaagtgccctgctaattttttcagctacctctttcgaatttgttgtctacctgtttgttaggcaagcatggagtattcgcttggttctactcaagaagggaatcaaggaattcaggactttatgcactgattgtaatagtccaacgaaagagcggatccacatgttaaaaatctcagcaagtgttcctttctgacagagtttcaacttatgtgttactaatgtagaagggatcccaattacttgctgcattgggtgatcgaacagtcatagtatggagtttaggaaacaggaaatgcattggtctcttgtttgggcatactgggagcgtgaggtcgttgccttgccattcctccaatccggagagaacaagaacttgactggaacatcaagataagcaagtgtaaatacccaccttgaaattggtaaattctggaagtattgtgattcccataaaacgtgtccttacagatcatgtattaagggtgtggacggttatgttgcctttttcacaaacttcaatttatgatcaattgcaagcaagatgtggtctagctgttggaatgcggatcacgaaggtggtgtcttcactcttcagcatgttccagtgtcgtgtgttccagatcgggttgctatcgggagtctgttggtttgcatggaatcaatcaggtttagcttggattcatgaataattggtttgtgtcgtccggctgttcgagctacgtcatcatgattagaatctacatttttccctacgcttgtatttaaaatggagtttacaaagataatcgttagaatggaatcgaaggctcattttttgttctatctgataatagccgaacgaatgaaatgcaatttaaatttatgagatattgaagttaataataataaatactgtttgttttcatataatcattatgtacaaacattatatcgaataaattgtggttcgttgcaacgcacgagcacttacctagtattgtaaacaagaattgaacattactttgtatatttgtccatgccttgtaatatattttacctttccatccatgtataaattgc

SEQ ID NO: 212829 - DNA, 1585 bp, Zea Mays
cgcctggtctcgtcgccctaaccgcacccttccaatgacggggcgctagcgaagccgcgcatcctccctgcatctcaccggtcgtcaccctaaccgcgcccttccaacgacgaggtcgctaccgaagcgccgcgcatcctcctcgcatcttcgtcgctcctgcgccgcgccgaaatcctcccccaccgcgcccttccatcgacgaccatggcggactacccacgcgtcatgcacgccccgccctccgtgcctgtcctccggggccagcgcgctcccctcctcctcaccagactctgccgccgcgggtctggttgcccacctcaactccgaggaacgaggactccaccatgctcgctctagagacaccgccttcctgtcctccgctcaccgtgcttgtcctcggatccacgactgccgccccgctccccccaaataccactgatgcagggatccaagcccctgccatctattcagccgccccgacgtccacaggggataccaactgatgggccaccaaccatgttgttccacgctctgggctgctgctggaagctaatcaatcgcttggttagaccatcgcagattagcggtgggattcccaggttcaataatctcgtttcgggccatgccctcgatgtcattatctggcttgaggcaagcatggagtattcgcttggttctactcaagaagggaatcaaggaattcaggactttatgcactgattgtaatagtccaacgaaagagcggatccacatgttaaaaatctcagcaagtgttcctttctgacagagtttcaacttatgtgttactaatgtagaagggatcccaattacttgctgcattgggtgatcgaacagtcatagtatggagtttaggaaacaggaaatgcattggtctcttgtttgggcatactgggagcgtgaggtcgttgccttgccattcctccaatccggagagaacaagaacttgactggaacatcaagataagcaagtatcatgtattaagggtgtggacggttatgttgcctttttcacaaacttcaatttatgatcaattgcaagcaagatgtggtctagctgttggaatgcggatcacgaaggtggtgtcttcactcttcagcatgttccagtgtcgtgtgttccagatcgggttgctatcgggagtctgttggtttgcatggaatcaatcaggtttagcttggattcatgaataattggtttgtgtcgtccggctgttcgagctacgtcatcatgattagaatctacatttttccctacgcttgtatttaaaatggagtttacaaagataatcgttagaatggaatcgaaggctcattttttgttctatctgataatagccgaacgaatgaaatgcaatttaaatttatgagatattgaagttaataataataaatactgtttgttttcatataatcattatgtacaaacattatatcgaataaattgtggttcgttgcaacgcacgagcacttacctagtattgtaaacaagaattgaacattactttgtatatttgtccatgccttgtaatatattttacctttccatccatgtataaattgc

SEQ ID NO: 212830 - DNA, 3422 bp, Zea Mays
acgcagctaacggtcacccccttccctccctccatcccccttcgcctcgtcagtcgtctctgcctctttccttcctcatcttcgtctctttcctcaccccgacccccccgcaccgactcctccacgcgcacgcgcgcggcggcggcggcggagtcgggagaggtccctggtgctgcttctcgctcaacccgtacgctactccttcctctccgtatggcttccgccgccgtggaaaccctcgtctcgttcccaatcgcatcccgtccccgctcgctcctacgccccttcccgcggcgacctgccgccgccgccgccgccgggggatgcgcgccttcgatccggatatccgccgtgccgccgcggggcctcgggctcgcgctggtgcaccgccgcgcgcgccgctgcccgccagcggcgcgcgcgaatgttgagcacggcggcgacggcgcctctggtaacggcgagccgtcgtcctcgtccggggacggcgaccgcgacgcggctgcggactcggggggcgacaccaccggcacgagcaccacgagcgccgcccagacgccgccgccgccctcgtcgaagaggggcgaaaacaagtggcggcggaggctgactaagggaggtggcgtcgggcgctggctatgggagcccatagtccaggggcgggagatgggcttcctcctgctccagctcggcttcgccgtattcgcgctacgcatgcttcgaccggagatcgcgttgcctggctcagagccccgcccgcagaccacgtacgtcagtgtaccgtacagcgacttcctggcgagcatagacaaggaccaggtgaagaaggttgaggtggacggggtgcacgtcatgttccgactccgtccagaggttgagtcccaggtccgtgtggagcagacaccatcacagcgcggaacagatgctgtcgtcgataatgctggagtctcgaggagaattgtgttcaccacgactcgtccagtggacataaagacgccatacgagaagatggtggaaaacatggttgaatttgggtcaccggacaagaggtctggcggcacgctcaattctgcgctggtagctcttatttatgtcgtattgattgcagtagttttgcagcgtttgccaataagcttttctcagcattcagccggtcagttgaggaacaggaagaattctaattctggtagagcaaaagtttctgaaagtacagatatagttacatttgctgatgtggctggagtagatgaggcaaaagaagagcttgaagaaattgtggagttcttaaggaacccagaaagatatgttcgtcttggtgctcgccctcctcgtggtgtcttattggtgggtcttccagggactggaaagacacttcttgcaaaagccgtagcaggagaagcagaagtcccgttcataagttgctctgctagtgaatttgttgagctatatgtaggcatgggagcagctcgagtacgtgacctatttgctaaggccaaaaaggaatcaccgtcgattatttttatcgatgagattgatgctgttgcaaaaagccgtgatggtcgatatcgcattgtcagtaatgatgaacgtgagcagacactaaaccaattgctcacggaaatggatggcttcgacaccaattcggctgtcattgtactaggggcaacaaatcgagctgatgttttggatcctgcccttaggcgacctgggagatttgaccgtgtagttatggttgaagctcctgataggtttggaagagaatcaattctaaaagttcatgtgagcagaagagagcttccactgagtaaagatgtagatctagccgatattgctgcaatgacaactggttttactggaccttgcaaacttggtaaatgaagctgctttgttggctgggcgattaaataaagaaattgtggaaaagattgacttcatccatgcggttgagcgatctatagctgggatagagaaaaagcatgcaaaattgaagggtaatgaaaaggctgtcgttgcacggcatgaagtaggtcatgcactcgtgggaactgctgtagcgaaccttcttcctggacagccacgtgttgaggtttgaacttaagcaattactgatagaacaatctgagagaagatgtaatttgacttactttttcaatgctgaatttaacagaaattgagtatattgccaaggtcaggaggtgcattaggctttacatacacccctcccaccacagaggatagatatttactctttgttgatgaactacgtggccgtttagtaacacttctgggtgggagggcagcagaggaagttgttttagcaggacgggtttccactggtgcacttgatgacataagacgtgctactgacatggcctacaaagctgtagcagaatacggtcttaatcagcgcatcgggccaatatcacttgctacactgtcaaatggtgggttagatgactctggtggttctccatggggaagagatcagggccatctagttgatctcgttcagagggaagtaaaagcgcttttacagacggcactggaagtagctctttcagttattcgtgctaatcctgcagttttggaaggcctcggagcatatttagaagagaatgaaaaggttgaaggcgaggaacttgaagagtggctaaagtcagttgttgcatcaaaagagttgacctcttttatcagaggacagcaagagcaagttcttcagctggaagcaggctcctagcgtcaggactcttaaaattaattacttacagaagtcttccagcaattagaacatacaatgcgagttccaaggtatgcaatggaaaccttgatactggggacagatctgtggccatgtggtggattgtatgacctctcccacccactcatgctaagacaaacttgggttgggcgcccacccttcgttcgttgaatcatgagctcgagccttagaggagaattttcagaaaaggaaatctacatgcccgagtgaccatgtaaatatttaccattgcagttcgcggacccatgagtaccaaaaaaaagagatgattcatattgacctgtaacattgtaagatcaacctcaggaatatttgaagcggttagttttcacatgttcatagatcgggtcggtgttacacatgtaaaagattctttttttgccctaggttcttgtcctcaccctgttagaagttattttcctctttacaatatgatcctagagatgatcaataggataattaatgcttatacggactatggttcctgtattgatatactctttccaatatacttcgggcttcaaatccatcattagttgacattaccgttaagcgttatggaaggttttctgccacttgcgcatggaccatcgagaattgttcttcagaatggtgattgctttttcgaaagaatagaaatgcg

SEQ ID NO: 212831 - DNA, 3039 bp, Zea Mays
tctcagcctgcctgcctggccaccaacacgagcgttcaaaacccaggagctatccagcacatcctagctttccccccttctatggctctatctcatcctgataacaaagcagaaacagtagctgtaggcctcatcagttaccttcccgcacgttctgccacccatagtttatcaattttatcaacctatattaataatccctcgattatgttttccactctgatcgagctcaccctatcgcctggcatgtgtgtatagtactataatacactctcccaatcttgttctctcctcctactcatcctctctgtcttaagaggaggccagtccggaggaagaagggacaggaggagacacagacagagagagaggggcaggaattcaattccaccgacccacgcacctctaggtcaccccgctcccacccctttcctccatttacctccacctatatagctccccataattccccgggcctcccctctcttgttaggagtacacacttctccttagaattggagctgtacgagccacccagcaactttcttcatcatcttcttcagccctcgctctgtccgtcgacacagcagctttgcttgccaccaagctagccatgcaggaggagtaagagtacaaccgtaggagagagagagagagagagagagagagagagagctaacaccaccccgattccacccaccactgtccctagctagcttatttacaggcgttcgtgatcgccaacagcttctcgtcagaaagagtgcaacgggccggccgggcagaagaggtagctgggagctagagagaaaaaaaaaaggtgcaccgagcaacccaggccagggaggaagggaggagtgagccgtcagtcgaccgtttccggcgaactcacaggcagatggcaggcggcggattcgtggaggacatgatgagggagcagagcctgctggaggcgacgtgcggcgacctcttcgaccacatcgacgacctcctcgacttccccaacgaggactccgccgccgccgtgctcctcctggacgcgccggcgcccgggagcccgctgtcggcgcgcatcatcgacgtcggccgcgccggcaatgcgctcgccccgcctgctgcccccgcgcagcacgacgcttccgctagcgccttcttcgccgccgcggggaacgatgtgttcgacaccaaggacgtcgtcggcgcacacatcggctcgtgcgacgacattgacatggacatggcgcagctggagtggctgtcggggctcttcgacgacgcctccatcccgcacgagccggtgttccctggcgcgacggcgggcggcgcggcgcccatcatgaagagctccgcgctggcggccggcgcgctgctgccgcaggacaaaatggaggacgcgctgctgttccgcagctccagccccatctcggtgctggagcacggcagcggtggcagcggcagcgccagcgccaccggctccgcgtcctcgtcctcctcctcggcgtcgtcctcctcggagtccttctccgggagtgggagtgggagtggcggagggcatgtttggtcggcgccagtgtcgccgcgcccggcgccgccgccggcgctcgtcataccggcgcgcgcacggagcaagcgctcccgttcgtccgcgttcaccggagccgccgcgcgcgccggggcggagacgcccaccatcctcgtgccgacgcccatgtactcctccgggtcggcccactcggaccccgagagcatcgccgagtccagcccgcacccggcgccgcccatgaagaagaagaagaaggccaagaagcctgtggtccccgcgccagctgcctcttctgacgacaacgatggcgacgccgactacgaggaaggcggcgagcaaacggagccgcagggcggcgccgtcaggaggtgcacacattgccagatcgagaagacgccgcagtggcgcgcggggccgctggggcccaagacgctctgcaacgcctgcggcgtgcgctacaagtccggtcgtctgttcccggagtaccgccccgcggcgagccccaccttcgtgccgtccatccactccaactcgcacaagagggtggtggagatgcgccagaaggctgtccggagcggcgacccgtcgtgcgaccttctccatttcatccgccgccgggattgacgtcccggcatggcgtcgccggactgtcggtcggtctcgtcccccatatagctatatatgtatgcatgcatggttgcttcatcagtcgtcgtcgcccatcatggtcatcatcaccgcttcaccggtcaccgccatggatcgtctcccgcccatcatcacatgcattggtttgtgtcagcatccatccaatcccaatccatcgccgggcgtcccgacgttgttagttcattaggtcttttttttcctcatcgggggctagtgttattttacctttgatccttttgtctattggttaattggttccccctggatgttttttgtttgtatagagagtgaaaaagagagaagaaatagatgagtcagagtggttgctgcattgcaataaaaaaaacaaggagagtgcttgaagcaggtgaaagggcaatttgttggtttgctaattagaagagaggttctgtcaggtcaggtcaggtagttgctatcattattcatgaggattttcaaacttaatagggggacagccatcatccatcatagtttgtatttggaacttggtatactgaactctgaaaattctttttgcagttcatctatgcttagggattgataagtgttgtctggtttcttctatattgatagtgctaccttttagccaataattagttatgtaagagttgctcttggtcttgcctccatctactccctctgttcctgcaatacagggcattctaacaaagaattaacgcaacactcaaatgacgcttgtactcatgaattatatcttattagggctagtttggaaactccattttcccattgaatttctatttttaagaaaaaaataaactaatttcccttgaaaaaaataaaaa

SEQ ID NO: 212832 - DNA, 1763 bp, Zea Mays
attggattcctccgacgcactgacccgcagtcccgcacaaccaccaccaccaccaccaccatggccgccgcgccaacaagctccggcgactcgccgccgcctgcgcagccggagtacggttccatctcctccatggtagcctcgtctgcctcctccgctgcagccgcggtcgcggacttcacccgctgggccgagaccttcggcaccgagaaggccgacgccgccaaggctgccctaacctccgccaccaccttggccacctcatctgcctccgaggcggcttctgcttcctccaaggccgcgtcctccgcatatgcggccgcctccgacctcaccctcgtcgccaaggaggagctggaatggttcaagacggagtactctgctcacgagcagattgtgttcggcaagatcaaagagggtgtcgtcatggcgataatgcatccaggcattgctgcaggctctgcaacccttgcagggattatccttttcaaaagtaacatgttttccttggaacatcattgctctgtggtgctatattgaatttcagctcttttcattatactttcattggttgcttttgctgatgcacaatgtaatttggtaattgcatgaggaattctatccatacatgcacttaaagaacatagggttcattatgactacatgctaaaccacattgttttatttaactcgattgtacttttcatactctagaattgatcctttattgtgttcttacaaatgattgaaatgttttgaaaccttggtcttcttagaatatgatgcacgtcaggccgtcagcacgtatcttattctggtcggattaaaagaactttgaaaaaatagtcagtgatttgagaattgatgaaatttattaaagctgctacgaagttttgttcaaattatctattctctacttagctgcctagtatttgatggtacatatcccgaggtaataagcttgccgttcattggaaatttgatccaatataatttcaagaaggctgaaaattggtcctgtatattaaatgaaatgcgaatgaatccttgcagggccaaggagctaccttattcaacgagtacggcacatgtttgttagcaaggagaccctactttctggagtacaggctgaagtgaatcacatgcggcagactgtgaatcttgtatccaatgaacgccaaaagctgttggatagagcagcaactgcagagaaaagattccaaaaaggatggaatacactcagggaagaagggcgttccattcaacacgagttgcgtgagattagtgatattgaaaaccaagcagtaggtctgaagggaattcttgatcagcttcccagagcacatgcatctgaatttcggtcgaagatgtctggcctagcttctcaggttaagaaggagaagcgagtgctcaacgccgccctcacgaagattgtgaactacggtgtccccatctgactgccactccagccagttgttctgagggtccattgtattgtatcagatttttgtgaaggaagacatgttcgatgtgtagggtgaacgctatactgcccacttggtttcgagaaaaggaaaagagaataagttgtgacccgtgcagatttctaatgtcgcaaaagcaacatctttgaaacctgagtaacagatgacattttgctatggtttttttttgttggcttattgacatgttcaccgccgtcagctgccgtatgcctgggaatcgtaaaagtggaatgaaatttttggttgaaatcatgcgag

SEQ ID NO: 212833 - DNA, 985 bp, Zea Mays
agaatggaaataccttggagaagagttgtctcattagctcctttatgaaacttgcctctgcatctggcttttatcattttatgatgctgcagttgattatttgtccaccacaagagttatgccaagacttgttgaggttgtcaagggatctactaaagagaaggtggtcagagttgctgtgttgtctttctgtaatttgctggcaaagggtgcatttgctgcccagatgatcgatcttggattgccgcaaatagtacaaaacttgaaagctcaagcatggactgatgaggatctgttagatgctttgaatcaactagaggtgggactcaaagaaaacctcaagaagttgagttcctttgataagtacaaacagcaagttcttcttggtcatcttgactggtctccaatgcacaaagatccaagtttctggcgtgagaacattaacaattttgaagagaatgatttccagattctacgagttctcatgacaatcattgacacatcaagtgacaccaccgctcttgccgtggcctgctacgacctctcacagttcctccagtaccatccatctggccgaatcgtggtggcagacctcaaggccaaggaccgagtcatgaagctcatgaatcatgaaaacactgaagtgcagaaaaatgcgctgctctgtgtgcagaggctcttccttggcgatttagatccagagaactcctggccatttttaaaaatggctgttaagaaaaccttgaaaattcttgtccattatatcctattgttatttgatttctgagaccgatgtataataaataattagagccataccatgctcgatgtaataaagtgtccatgggcttgttgattcatttatgtaaattctgatctccaactttagcaatccttttttttctgtacacctgacttgtgtgaatatggacgtacatgtttgcaattgttccacaggtttttatgttagttcattctcctgaaa

SEQ ID NO: 212834 - DNA, 800 bp, Zea Mays
ctcgagcttacccgctgcacaagtattgccatcttttctcgcggtgacctatgcccctcaatttgagagccctcaagataccaaggagaaactggaagttaggagaaaagaagtccttggccgaataaaatcatctgctggcagacctgaaggatcatctccagctcagggatcatctagtgggaatcaccaccaaatgaactctaataagagggaatatatgaagacaattcatgcttctcctattgaagatcctcgtttcagtcatgtgtcctcagacaaggattattttccatccgagtcgatgaatgctactgtaaagctagtcagagggaagcttgataagatacaatctggtggtgataattccagtacctcagcagcatccaggaaaccaggggttgataagcgcaggcgaatttgattgcagataatgccgagcacgcgttcaatgttttggtgtaatgttgatattagcataacataccaggattttaatggacttttttctatcaattttctcactcacattctaggccattaagttgtttatgtttcagggtggcggtgctatactatatggttagctagaattgctggaatatcgataaccgagttaagttaaaaatgcctcgcgtttagttttcccagctgtaatgttatgttactcttgcaatcaattgcatcggaattctcatattttatattgacgcgcctccgatgcatgtgtacggtgagacatgatccataagaaagacatgcctggcgttgggcatcgttttgaaaccactttattccat

SEQ ID NO: 212835 - DNA, 1325 bp, Zea Mays
cgcaaaggcccagccgaggcccaccgccaccgccaccgccgtcccgctccacgcgtccgcaccctctgcgcggcgccggtcgagaactcgtgatgccccgcgaccgcgacgagccagccgccgtgcgcgtctacaccgtctgcgacgagtccaggtacctgatcgtgcgcaacgtgccgtcactcggatgcggtgacgacctcgccagtctcttcgggacgtacggccccgtggaggagtgcacgcccatggatgcagaggactctgagccctacactgacgtcttcttcgtcaagttctcacaggtcaacaacgccagctcgagcttacccgctgcacaagtattgccatcttttctcgcggtaaaagtccagaatcagcggcctccatttgaaatgcaaaattggtgctcatgctgcaggtttgcaaagaggaagcttgacgagtctgtgtttcttggcaaccgcctgcaggtgacctatgcccctcaatttgagagccctcaagataccaaggagaaactggaagttaggagaaaagaagtccttggccgaataaaatcatctgctggcagacctgaaggatcatctccagctcagggatcatctagtgggaatcaccaccaaatgaactctaataagagctaggctcaagctcttcaatttaactgttctcttgagcaaaatgtagaagtgtcagcctgatttttctcctaaggttcattttacacacattcagggaatatatgaagacaattcatgcttctcctattgaagatcctcgtttcagtcatgtgtcctcagacaaggattattttccatccgagtcgatgaatgctactgtaaagctagtcagagggaagcttgataagatacaatctggtggtgataattccagtacctcagcagcatccaggaaaccaggggttgataagcgcaggcgaatttgattgcagataatgccgagcacgcgttcaatgttttggtgtaatgttgatattagcataacataccaggattttaatggacttttttctatcaattttctcactcacattctaggccattaagttgtttatgtttcagggtggcggtgctatactatatggttagctagaattgctggaatatcgataaccgagttaagttaaaaatgcctcgcgtttagttttcccagctgtaatgttatgttactcttgcaatcaattgcatcggaattctcatattttatattgacgcgcctccgatgcatgtgtacggtgagacatgatccataagaaagacatgcctggcgttgggcatcgttttgaaaccactttattccat

SEQ ID NO: 212836 - DNA, 1177 bp, Zea Mays
cgacacctcctttccgcaaaggcccagccgaggcccaccgccaccgccaccgccgtcccgctccacgcgtccgcaccctctgcgcggcgccggtcgagaactcgtgatgccccgcgaccgcgacgagccagccgccgtgcgcgtctacaccgtctgcgacgagtccaggtacctgatcgtgcgcaacgtgccgtcactcggatgcggtgacgacctcgccagtctcttcgggacgtacggccccgtggaggagtcagtctcacctcttctccacctgtattctgtatccgtatttgcttagttgatcgattacccaccctggggggtgtcaggtgcacgcccatggatgcagaggactctgagccctacactgacgtcttcttcgtcaagttctcacaggtcaacaacgccagcatctgctggcagacctgaaggatcatctccagctcagggatcatctagtgggaatcaccaccaaatgaactctaataagagctaggctcaagctcttcaatttaactgttctcttgagcaaaatgtagaagtgtcagcctgatttttctcctaaggttcattttacacacattcagggaatatatgaagacaattcatgcttctcctattgaagatcctcgtttcagtcatgtgtcctcagacaaggattattttccatccgagtcgatgaatgctactgtaaagctagtcagagggaagcttgataagatacaatctggtggtgataattccagtacctcagcagcatccaggaaaccaggggttgataagcgcaggcgaatttgattgcagataatgccgagcacgcgttcaatgttttggtgtaatgttgatattagcataacataccaggattttaatggacttttttctatcaattttctcactcacattctaggccattaagttgtttatgtttcagggtggcggtgctatactatatggttagctagaattgctggaatatcgataaccgagttaagttaaaaatgcctcgcgtttagttttcccagctgtaatgttatgttactcttgcaatcaattgcatcggaattctcatattttatattgacgcgcctccgatgcatgtgtacggtgagacatgatccataagaaagacatgcctggcgttgggcatcgttttgaaaccactttattccat

SEQ ID NO: 212837 - DNA, 1133 bp, Zea Mays
aaaaactttgttttttttttcgactttcgtcgtgtccgctggacgacacctcctttccgcaaaggcccagccgaggcccaccgccaccgccaccgccgtcccgctccacgcgtccgcaccctctgcgcggcgccggtcgagaactcgtgatgccccgcgaccgcgacgagccagccgccgtgcgcgtctacaccgtctgcgacgagtccaggtacctgatcgtgcgcaacgtgccgtcactcggatgcggtgacgacctcgccagtctcttcgggacgtacggccccgtggaggagtgcacgcccatggatgcagaggactctgagccctacactgacgtcttcttcgtcaagttctcacaggtcaacaacgccaggtgacctatgcccctcaatttgagagccctcaagataccaaggagaaactggaagttaggagaaaagaagtccttggccgaataaaatcatctgctggcagacctgaaggatcatctccagctcagggatcatctagtgggaatcaccaccaaatgaactctaataagagggaatatatgaagacaattcatgcttctcctattgaagatcctcgtttcagtcatgtgtcctcagacaaggattattttccatccgagtcgatgaatgctactgtaaagctagtcagagggaagcttgataagatacaatctggtggtgataattccagtacctcagcagcatccaggaaaccaggggttgataagcgcaggcgaatttgattgcagataatgccgagcacgcgttcaatgttttggtgtaatgttgatattagcataacataccaggattttaatggacttttttctatcaattttctcactcacattctaggccattaagttgtttatgtttcagggtggcggtgctatactatatggttagctagaattgctggaatatcgataaccgagttaagttaaaaatgcctcgcgtttagttttcccagctgtaatgttatgttactcttgcaatcaattgcatcggaattctcatattttatattgacgcgcctccgatgcatgtgtacggtgagacatgatccataagaaagacatgcctggcgttgggcatcgttttgaaaccactttattccat

SEQ ID NO: 212838 - DNA, 5532 bp, Zea Mays
agaccacgggtggcgcgatgcgacgtcggctgtcgtgctcgtgaccgcagccgcgccttcccgcctccacctcctcctgcgattccgatccgccgccctgtccggccggccggtaagccccgcctccgccctgttccctcggcacccatttttcatttcaactgagaggcggaggaaccaacccaggcacccaaccaaccctagatccaccgcttctgccacacgagagggagagatagacctctccgatctaattccgcatggcctcctcctcctccttcgcccccgacgaccagaccgacgccgacttcttcgacaagctcgtcgacgacgacgaccccgccaccagcctccccgacgacccacccatcccagagccgcaggcgcctcccgagggttcaggcaagggcggcgccggcgtccacactgcggtcaagcaggtgcagtgggcttccttcggaggtggcgcggacgacggtcctgacccatttgctcatctctcgggaggcgccggcgacgacgacggcttcctcgtgaccacggccgggacccagacggcctcggatcacgccttctttggcgggacccagagcttggccgccgaggtgacggaccaggacttcttcgccgggagcaactcctccaatcagcataatgtcagtggtcagcacgaccagggcggcggcagcactgcagtggattcagcagatcccatgtctttggaggccatgtaccctgggtggaagtatgatgaggcctcccagcaatggtaccagcttgacgacagtgtaaattcaactgggaatgcagctcaggtgctggacaacagcactcggtatgcacagcagcagcagcagctccacgcctcttatctgcacaattcagtgcattcagggcttgagacaattgctgaggagggcactaccgcaaccggtgctgtctcaagttggggccaaggggctgcctcagagtacccacccaacatgctcttctatgcagagtaccctggttggtacttcgacaccaacacccagcagtggcactccctcgagttataccagcaggccgccatgcaggctggaacagctagcatgggccagactgttattgcaaacgacggtgttgctgcaacttcctctctgacaggctataatgccgcacaaaatgaggaccttgctgcccatgatcaggtcacccaacacaactcattctcgaatagtttcgctcatcagaaccaatggcagattaccgatgcatttggtaacaatgtacgatctgaatgtgctacagagaacagcctggctagtagttcctatggttttcaacaacacaggaatgctgattctaccagttcatctacgaaccaacgggctggttttaatgcagctgaaactgttactgatcactatggtggacgcaagggcgttgaatcgccaagtattcagagcggttatagcacttctgacattcaacaatccagtcacaaggcattcgaaccttacacgggttatcaggaccattacaaagcatttgaacctgccacaggtcaccatgccagtaacaacatgttcaaacagtccacaggtaaccagggaggttacaaggcgtttgaacctgccatggataaccagagtggctacaaggcatatgaaccttctatgggtcaccatagtgcttcctgggaacccgtgccttccacgggtcaccagactgatttcaaggggtccggagcttcaactgttcatcaggccggatacaaagaatttgaaacttctacaggttacaatacaagtttaaaggcatttgaaccttcttcatctcaacatgctggttacatgggttcccaatctaactacatgggatttgacacttctacaaaccaccatggttatggcgatgcaaatgttgttgcgagcactcaaggctttgtcccaatgcaaaccacataccagggacagacacaagcaattgcaaactcacaagtgcacctgtcaaatagctatttgggtattgacaactccatgaactttaatcagcagcaatttctgggtgcaaatgcctcaaacttgcaattcagtcactccccacatgatggtagagctggacgaccaccacatgctctcgtttcttttgggtttggagggaagctcatagttatgaaagaagctagctccatgcccgcaagctttaacaatggaattcagggtaactctagtggcacagtttcagttcttaatctgtcagaggtggtcatggataaaattgattcttcaagcatcactaatggtagtgcacttagttatttccatgctctgtgccgccaaccagttcctggtcctctggttggtggaagtgctgcatcaaaggatgtaaataagtggattgatgaaatgattgcatggtacgattcttctagtgaactccagagaagtgatactcgcaagttgcttatttcattgctgaagatactgtctcagcactatggaaaactccgttcaccttttgcgtctgacccatcacaagaggagacagatggtccagaaatggcagtaactaagctattttcatcgtttaaaagtactgttaatatgggagattatggatccattgtttcttgcatgaaaaatattccttcagaaagtcagatgcaggaggtccaaaatcttctagtttctgggagaagaaaagaggcccttcagtgtgcccagggaggtcaactttggggacctgcaatcatactggcattgcagctcggtgatatgttttatgtggatacagtgaagaaaatggctcacttccattttgtatcggggtcccctctgcgaacgctatgccttctgattgctggacaacctgcagatgtttttaatgtagataacaatgtcaacattgactatggtacatcccatcaacctatggagcctggtcctaatggtatgttggatgattgggaggagaatttagctattattactgcaaacagaacgaaaggtgacgatctagtaatcacccatcttggtgactgtctctggaaagaaaaaaatgagattgcagctgctcattcgtgctatttagttgccgaactaaatattgattcatactcggaaagcgcaaggttgtgcctcattggtgcagatcacttgaagtgtcctcgaacatttgccagccctgaagccattcagaggacagaggtttatgaatacgcgaaggtgcttggtaattctcagtatatcctactaccctttcagccatataagctgatatatgcatacatgcttgttgaagtggggaaggtttctgattctttgaggtattgccaagcgtctatgaaggtattgaaagcctctggccgtgcccctgaattggaggtgtggaagcaattaatttcttcactggaggagaggatacgcactcaccagcagggtggatatggcacaaatcttgccccagcaaaactagttgggaagatttttacctcgcttgataaatctatatcccgcatgatgggtacaccatctgcaccacttccaccattgccacatggatctgttagcgatagagagagccactctatgcctgaagcagcaaaatttataaatagccaatcagtaatggccatgtcatcgctaatgccatctgcttcaatgcagtcaatgactgagatagcagagaatagtgatggcactggcaggaaaatggcacacaacagaagtgtttctgagccagacttcggtagaacatcaaaacagggtggtggatcagatggcacacagagcagtgcagcaggatctggcagttctcgatttggttggctagtgcagaagactatgggattagtgtcaaaatctcaccgccaggcaaaattaggggatcagaacaaattttactatgatgaaaagttgaagcggtgggtggaagaaggtgctgtggttcctgccgaggagcctcctcttcctccccctccaacaaaatcatctttccagaatggtatgccagaccataagttgaatggccacatgagcgtaggccatgctcccagtggagtcacagaatggaaatcctcaaattattcagagcaaggtctgggtatgccgccaattccacctagccaaaaccagttttcttctcgtgggcggatgggtgtccgatccagatatgttgacacattcaataaatcaggtgcatctggagcggtgccatcatataacaaaccagctgctccatccgtgacaccaccagctggtgccaagttcttcataccgactgcagcacctgttgctgcagatcagatgatgccacaccaagcagcagagatacacagtgaaaccatgcaacaggatgagagggcagcctcaccgcctgctggaacatcattctcttcaaccccaccacccacacaattttcatcgcccccaccacacacgcaattctcgtcaccaatgcaatcaacaatccatcggcaatctagtatggcgaacatctccaccccttaccagagttccggggtatcatcattaagcagcgacacctcattctcaaaatcacgagctgcatcctggagtggaacatactctgagcagttcagtgcttttgcgggcacaagatcacccgatggacagacggtgcgctcaccactcatgcctggcaaaccatcacacagtcgttccaacagcaactcatcagtgcagctcaatggattgacagaggatcttcatgaggtcgagctctaattggcggctgctcagcatgactgtcgtcttttatccaccacaaaaggcagccataacaacccctgataaaccccttcccaagcgggtgacagaaaaaaaaggtgcccacgaaatgctgatcacgggggacgctgcagttggaatgggcatgtgggacttttgcacgagattctggggtgcgctctaaaccaccaaggtatgtcagacatgtactaacagaaatagaaatgcggggggttttggacattttgtagctatatatatatatatgtgtgtgtgttttgttttatgttttagagagaagggaaagagttgggctggcctcgtttacaggtgagaaaaatggagcaggagccgcatgcagatgcccttgtacagataatctgcgcctacccagttttttttttttttaaaaaaaaaacgcgaacaagttcacacccgcactccattttgatgttcgtttctgggcgaaggatagaagagaaggtgcgttctagtgtgacaagtatggctctgtagagtactgttgttttggtgtactgcactagccgcagtatattgtctctgttttattctttgggtacgaatcgattctttcatcttgaaacaattgtgttacgccttgttgtgtattcttgtgccctggccgatgtggcggatgcaattgtacgtgttcttcaggtcttggttgtgctgtcgctatatccttgagcacacgtgtgtgctgagctgttttgttgacaatgcgcatcgtaatactggatctttttttaataaactacacgatttgcagttagttgtt

SEQ ID NO: 212839 - DNA, 508 bp, Zea Mays
caaaagtttaagctaatgaaagaaggtgaatcggaagtacaggatagcacctagtttgctggaagacgtgcaaagagaacccttgaaattagggagtgatgctagtagaacccttacaagatcccaagtcgatgctgaattggtccgtatggcaactatgactgttgaggcggcggcggcagctgctgctcatgcagttgcagaggcagaggctatcatggcagaagctgaagcagctgctagggaagcagaagctgcggaagcagaggcccgagctgcacaggcctttgctgaagcagcagttttgacactgaagaacagaaatgctgcgaaattggtatagctcgagtccatgaatcttagatatgccctcttgtccttccacacgtagaatccagttccgtagctctgtatgcaactaattggttactaaaagaacctgaaatcagaagttttcacaaacacaccgacttattcaccgaagattatgatttccaaagtaattgtc

SEQ ID NO: 212840 - DNA, 1206 bp, Zea Mays
atcatctaaaaaggctaatataataaaaaaaaactgcgcgcactgctgtcaccgcggcggagggaaaaatcgggcgtaccccggtgcccgttcaccgccgttcacgccgcgtgtgcgctctggctctgccgctctctctctctcctgcgcgtggcgcaactgccgtcctataccaggcgcccaggtctagcctcgtcggtgccttcgccaggtctttctcgggcccttcgccaacgacgagcgcccgctagaggtggacttctgaggaagaggctgctcttagagctggagtagccagacatggagttggaaattggcgcatgatattgaatgatccagaacttagctccacattgcgctaccgctcgaatgttgacctaaagggggagaacttccacgaggagaacccgagctgctcctaagaataatgaccaattgttggcaatgagcacaatcacttctgaggttgatgatgagattgttgatgtaaagcccatagtatcaatgtctgttgaaggatggaatacttcaaattcaaagaaatctcactcaaggctagacaatattataatggaggctataaagaacttgaatgagcctacagggtcccacagaactactattgctaattacatagaggagcaatattggccacctagtgattttgatcacttattgtctgcaaaactgaagtatttagctaccagtgggaaattgttgaaggtgaatcggaagtacaggatagcacctagtttgctggaagacgtgcaaagagaacccttgaaattagggagtgatgctagtagaacccttacaagatcccaagtcgatgctgaattggtccgtatggcaactatgactgttgaggcggcggcggcagctgctgctcatgcagttgcagaggcagaggctatcatggcagaagctgaagcagctgctagggaagcagaagctgcggaagcagaggcccgagctgcacaggcctttgctgaagcagcagttttgacactgaagaacagaaatgctgcgaaattggtatagctcgagtccatgaatcttagatatgccctcttgtccttccacacgtagaatccagttccgtagctctgtatgcaactaattggttactaaaagaacctgaaatcagaagttttcacaaacacaccgacttattcaccgaagattatgatttccaaagtaattgtc

SEQ ID NO: 212841 - DNA, 1333 bp, Zea Mays
atcatctaaaaaggctaatataataaaaaaaaactgcgcgcactgctgtcaccgcggcggagggaaaaatcgggcgtaccccggtgcccgttcaccgccgttcacgccgcgtgtgcgctctggctctgccgctctctctctctcctgcgcgtggcgcaactgccgtcctataccaggcgcccaggtctagcctcgtcggtgccttcgccaggtctttctcgggcccttcgccaacgacgagcgcccgctagaaggtatgcattcgtgttcataatattgtatttgactaaaaagactgggcctacgcatgggggctccaaaacagaggtggacttctgaggaagaggctgctcttagagctggagtagccagacatggagttggaaattggcgcatgatattgaatgatccagaacttagctccacattgcgctaccgctcgaatgttgacctaaaggacaaatggcgcaacatgaatgtaattgtcacttcatcgagtactcgtgacagggggagaacttccacgaggagaacccgagctgctcctaagaataatgaccaattgttggcaatgagcacaatcacttctgaggttgatgatgagattgttgatgtaaagcccatagtatcaatgtctgttgaaggatggaatacttcaaattcaaagaaatctcactcaaggctagacaatattataatggaggctataaagaacttgaatgagcctacagggtcccacagaactactattgctaattacatagaggagcaatattggccacctagtgattttgatcacttattgtctgcaaaactgaagtatttagctaccagtgggaaattgttgaaggtgaatcggaagtacaggatagcacctagtttgctggaagacgtgcaaagagaacccttgaaattagggagtgatgctagtagaacccttacaagatcccaagtcgatgctgaattggtccgtatggcaactatgactgttgaggcggcggcggcagctgctgctcatgcagttgcagaggcagaggctatcatggcagaagctgaagcagctgctagggaagcagaagctgcggaagcagaggcccgagctgcacaggcctttgctgaagcagcagttttgacactgaagaacagaaatgctgcgaaattggtatagctcgagtccatgaatcttagatatgccctcttgtccttccacacgtagaatccagttccgtagctctgtatgcaactaattggttactaaaagaacctgaaatcagaagttttcacaaacacaccgacttattcaccgaagattatgatttccaaagtaattgtc

SEQ ID NO: 212842 - DNA, 1276 bp, Zea Mays
cgcacggtcattcagctatcatctaaaaaggctaatataataaaaaaaaactgcgcgcactgctgtcaccgcggcggagggaaaaatcgggcgtaccccggtgcccgttcaccgccgttcacgccgcgtgtgcgctctggctctgccgctctctctctctcctgcgcgtggcgcaactgccgtcctataccaggcgcccaggtctagcctcgtcggtgccttcgccaggtctttctcgggcccttcgccaacgacgagcgcccgctagaggtggacttctgaggaagaggctgctcttagagctggagtagccagacatggagttggaaattggcgcatgatattgaatgatccagaacttagctccacattgcgctaccgctcgaatgttgacctaaaggacaaatggcgcaacatgaatgtaattgtcacttcatcgagtactcgtgacagggggagaacttccacgaggagaacccgagctgctcctaagaataatgaccaattgttggcaatgagcacaatcacttctgaggttgatgatgagattgttgatgtaaagcccatagtatcaatgtctgttgaaggatggaatacttcaaattcaaagaaatctcactcaaggctagacaatattataatggaggctataaagaacttgaatgagcctacagggtcccacagaactactattgctaattacatagaggagcaatattggccacctagtgattttgatcacttattgtctgcaaaactgaagtatttagctaccagtgggaaattgttgaaggtgaatcggaagtacaggatagcacctagtttgctggaagacgtgcaaagagaacccttgaaattagggagtgatgctagtagaacccttacaagatcccaagtcgatgctgaattggtccgtatggcaactatgactgttgaggcggcggcggcagctgctgctcatgcagttgcagaggcagaggctatcatggcagaagctgaagcagctgctagggaagcagaagctgcggaagcagaggcccgagctgcacaggcctttgctgaagcagcagttttgacactgaagaacagaaatgctgcgaaattggtatagctcgagtccatgaatcttagatatgccctcttgtccttccacacgtagaatccagttccgtagctctgtatgcaactaattggttactaaaagaacctgaaatcagaagttttcacaaacacaccgacttattcaccgaagattatgatttccaaagtaattgtc

SEQ ID NO: 212843 - DNA, 1268 bp, Zea Mays
tagccatctgtcgtcgctgcgaggttagaaggtatgcattcgtgttcataatattgtatttgactaaaaagactgggcctacgcatgggggctccaaaacagaggtggacttctgaggaagaggctgctcttagagctggagtagccagacatggagttggaaattggcgcatgatattgaatgatccagaacttagctccacattgcgctaccgctcgaatgttgacctaaaggttaaatctattcactcgtttttacgtaagattgatttagtgaagggactgccatatttgggtattccttgaaatcatgtgtcttttggttttcaaatttctagattcatcttcaatcttaatgctcatatgttccttttttattaatcactacttaggacaaatggcgcaacatgaatgtaattgtcacttcatcgagtactcgtgacagggggagaacttccacgaggagaacccgagctgctcctaagaataatgaccaattgttggcaatgagcacaatcacttctgaggttgatgatgagattgttgatgtaaagcccatagtatcaatgtctgttgaaggatggaatacttcaaattcaaagaaatctcactcaaggctagacaatattataatggaggctataaagaacttgaatgagcctacagggtcccacagaactactattgctaattacatagaggagcaatattggccacctagtgattttgatcacttattgtctgcaaaactgaagtatttagctaccagtgggaaattgttgaaggtgaatcggaagtacaggatagcacctagtttgctggaagacgtgcaaagagaacccttgaaattagggagtgatgctagtagaacccttacaagatcccaagtcgatgctgaattggtccgtatggcaactatgactgttgaggcggcggcggcagctgctgctcatgcagttgcagaggcagaggctatcatggcagaagctgaagcagctgctagggaagcagaagctgcggaagcagaggcccgagctgcacaggcctttgctgaagcagcagttttgacactgaagaacagaaatgctgcgaaattggtatagctcgagtccatgaatcttagatatgccctcttgtccttccacacgtagaatccagttccgtagctctgtatgcaactaattggttactaaaagaacctgaaatcagaagttttcacaaacacaccgacttattcaccgaagattatgatttccaaagtaattgtc

SEQ ID NO: 212844 - DNA, 1038 bp, Zea Mays
atcatctaaaaaggctaatataataaaaaaaaactgcgcgcactgctgtcaccgcggcggagggaaaaatcgggcgtaccccggtgcccgttcaccgccgttcacgccgcgtgtgcgctctggctctgccgctctctctctctcctgcgcgtggcgcaactgccgtcctataccaggcgcccaggtctagcctcgtcggtgccttcgccaggtctttctcgggcccttcgccaacgacgagcgcccgctaggttagaaggtatgcattcgtgttcataatattgtatttgactaaaaagactgggcctacgcatgggggctccaaaacagaggtggacttctgaggaagaggctgctcttagagctggagtagccagacatggagttggaaattggcgcatgatattgaatgatccagaacttagctccacattgcgctaccgctcgaatgttgacctaaaggacaaatggcgcaacatgaatgtaattgtcacttcatcgagtactcgtgacagggggagaacttccacgaggagaacccgagctgctcctaagaataatgaccaattgttggcaatgagcacaatcacttctgaggttgatgatgagattgttgatgtaaagcccatagtatcaatgtctgttgaaggatggaatacttcaaattcaaagaaatctcactcaaggctagacaatattataatggaggctataaagaacttgaatgagcctacagggtcccacagaactactattgctaattacatagaggagcaatattggccacctagtgattttgatcacttattgtctgcaaaactgaagtatttagctaccagtgggaaattgttgaagggtcaagaaggccagctgacttcccaggatgcaaccatgtatatctctgaaagcagttgcaacgtgaggggccttttgtgaaacccagggttcaaaccctgatcctacagcaccacaactgggtgcccaaccaccggccaccacactagtgcattctcatgacatcacctggtgttgtactcc

SEQ ID NO: 212845 - DNA, 1038 bp, Zea Mays
atcatctaaaaaggctaatataataaaaaaaaactgcgcgcactgctgtcaccgcggcggagggaaaaatcgggcgtaccccggtgcccgttcaccgccgttcacgccgcgtgtgcgctctggctctgccgctctctctctctcctgcgcgtggcgcaactgccgtcctataccaggcgcccaggtctagcctcgtcggtgccttcgccaggtctttctcgggcccttcgccaacgacgagcgcccgctaggttagaaggtatgcattcgtgttcataatattgtatttgactaaaaagactgggcctacgcatgggggctccaaaacagaggtggacttctgaggaagaggctgctcttagagctggagtagccagacatggagttggaaattggcgcatgatattgaatgatccagaacttagctccacattgcgctaccgctcgaatgttgacctaaaggttaaatctattcactcgtttttacgtaagattgatttagtgaagggactgccatatttgggtattccttgaaatcatgtgtcttttggttttcaaatttctagattcatcttcaatcttaatgctcatatgttccttttttattaatcactacttaggacaaatggcgcaacatgaatgtaattgtcacttcatcgagtactcgtgacagggggagaacttccacgaggagaacccgagctgctcctaagaataatgaccaattgttggcaatgagcacaatcacttctgaggttgatgatgagattgttgatgtaaagcccatagtatcaatgtctgttgaaggatggaatacttcaaattcaaagaaatctcactcaaggctagacaatattataatggaggctataaagaacttgaatgagcctacagggtcccacagaactactattgctaattacatagaggagcaatattggccacctagtgattttgatcacttattgtctgcaaaactgaagtatttagctaccagtgggaaattgttgaagctcacctaaaaaaactcttcttgga

SEQ ID NO: 212846 - DNA, 1145 bp, Zea Mays
gcctggcccattgcaatctcgagaagcaactccgtcgcgccgcactcaatcgcctccgattctgcggagactcagcatcggaatggcggcggcggctcgtgccgggttccggcggctcttctccgtctcggccttcgctgcaccgcctcctcctgccgcgcgccccgcggcgaacccttgcaacaacctcttcgtctcaggtatgaagtttgctgcaaagctataatcagagaaggcgatggtacaattgaagtcgtccttgttgcaagaaacgccatcctagaggatttgaaggcagctaaataccaaaattaaatgtgatgcatgctgccacttgtgactaatatatgttttgcagggttaaataaacgcacaacgtccgagggacttaaggaagcattttctaaatttggtcaggttattgaagcaagagtaatcactgataggatatctggatactccagaggatttggctttgtcaaatatgcgactgtacaagaagctggtgaggccataaaaggcatggatggaaagttccttgacagttgggttattttcgctgagacgccacacaaccatcacaacaaggagcaccagcttatgattgaagttgccatacacggtcgatgacatacactgtatttttctgccgagtgtaatagtggatgttgattgccggccaaacatttgcagagagaatgtagcttgatgtgctccttgaacttcctttgttgtggttaacattggacttactgcaacctcatgcgcgtggcccataactttcgtctttcatttacaggtcactacattttttttgaccactgtgttggaaggaggttacactgcagcagaaatgcaatgtgttggaaggaggcccacctcctccttcggccaaaaacagtataaaataaatatgtcgaattatacaagaaaaaaaattgacccctcaaataaaattctaaataaaatcttatgtacgccactcagtcgtaccaggccgggaacccgagtcttggtccgccgcttcggccagcaccattggtctctatctatcgtcagtcgtcaccatcgtcgcgacctcgcctgcctgcgctccaccatagatgccgcatggaccagcgtcctatccagccattgcatctttc

SEQ ID NO: 212847 - DNA, 3138 bp, Zea Mays
gcctggcccattgcaatctcgagaagcaactccgtcgcgccgcactcaatcgcctccgattctgcggagactcagcatcggaatggcggcggcggctcgtgccgggttccggcggctcttctccgtctcggccttcgctgcaccgcctcctcctgccgcgcgccccgcggcgaacccttgcaacaacctcttcgtctcagagtatcaggtatgaagtttgctgcaaagctataatcagagaaggcgatggtacaattgaagtcgtccttgttgcaagaaacgccatcctagaggatttgaaggcagctaaataccaaaattaaatgtgatgcatgctgccacttgtgactaatatatgttttgcaggtacgtcataataggaaaatgtattcatcagctgcaccacaaatttcataccaatgattagagagaagtgggataatggtcatcatctgccacctactggtttcagacttccaacctaggctggttttagactttcctttccaacctatatccatagtagctattgaccggtcgatatcgatcactgttagtccgctccacgacacaatctttacactacaaccactttattgttatatcattttttacatacttttatgtgacataaaacatgaaattttattaaaatacaaatacataaaatcacagtttaccaacgggctctcgctgaatttcgtatttttaaaatttgaaaatatgtacatcaaatcttattgaaaaaaccaaaaatcgctggggaacaccgaaaatcacccagaaaatggtgaaaaccgctcgggatcttgtgaaaaccgctagagacaaccgaaattccattcgggatttggcaaaaattgacgaaaaccgtttggttttccgttcttgaatggtagcgagaaaagagaaaaaacgaaatgttgaactcggtctccaactcttgtacgacctagtgccccgacgacgcgggtggattgagcttcctcctcgtgacggcgcaagaaagaaggggctatcgggtctgttttgatctattaggatctaagagcaactccaatagttacttaaattttagctctctaaatcatagatttaagaagttgctaaatggcttttgaagtaaaaaatgtgagttctccaatagttctctaaatataggttgtaattttgttttgtatctatccacataaaaaataagtcacaaaaactatataatgcagtaaacatttttgtttagcgagttgttaaatggttgctaaatgtagagagaaaatgaggttagatgacaacttgttaaatttagaaagttcatttagagaactgttggagaatagtttttatattaactacctaaattattgatttaggaagtcttttatagaactactggagttgctctaatagaaacttgaacagagatcagacccttaaaggatatactttaaaagtttatggacaggttgaaacaagtagccaagtttgaggacgggaattgtaatttacccatccaaatttattgacgtatcgaaactccggcggccagatcttgagaagacaaataccgccagctctgtcatgcttatcactcgacatctcctcaccatactcttctatagaagaagcggtaaggaaggcctcaaaacatggaatttttgcatcgctgaatatgaacggaggcgagtaggcgtcaggcatgcgaggtagccgcatgcgctgcctcgacaaggggtcgcacacggctagctccggcaacaagcccaatgccctgaatgtaaaccccagaggtgcgcacttgaggagggcacgatcgtcacggaggtcacaaatctcccaaccaaggccagatgcagtgcgacactatgcaagaggaacccctcgctgtggttcttatgctgcgtgcttcattaattgcacatgttatgctgagcgctttattagttgcaagcggtggatgtttgcgataggattaggtatgggagaagctgtttgcttttgtctgagatctgcgagccagtagttacttcaaattttggtagacctgatgaactaaaactgatactaatcgatttgctctgtctgaacccactctgaacgagagaagtaccacacaagttcacaagtatttggtaaacttggaagtaggacacatctcaaatgccagcgattactgctggtttgagtaattcactttcctatgtagaaggtggtgctaaaaaattgttgcaggattcggtgcatttgtagctccctacaattttccttctctggcaatagttcatctggttatctgtgtcaaatagtcagtctcttcatcgaaggagaaaggcagagatttggaaaaattcaagggttaaataaacgcacaacgtccgagggacttaaggaagcattttctaaatttggtcaggttattgaagcaagagtaatcactgataggatatctggatactccagaggatttggctttgtcaaatatgcgactgtacaagaagctggtgaggccataaaaggcatggatggaaagttccttgacagttgggttattttcgctgagacgccacacaaccatcacaacaaggagcaccagcttatgattgaagttgccatacacggtcgatgacatacactgtatttttctgccgagtgtaatagtggatgttgattgccggccaaacatttgcagagagaatgtagcttgatgtgctccttgaacttcctttgttgtggttaacattggacttactgcaacctcatgcgcgtggcccataactttcgtctttcatttacaggtcactacattttttttgaccactgtgttggaaggaggttacactgcagcagaaatgcaatgtgttggaaggaggcccacctcctccttcggccaaaaacagtataaaataaatatgtcgaattatacaagaaaaaaaattgacccctcaaataaaattctaaataaaatcttatgtacgccactcagtcgtaccaggccgggaacccgagtcttggtccgccgcttcggccagcaccattggtctctatctatcgtcagtcgtcaccatcgtcgcgacctcgcctgcctgcgctccaccatagatgccgcatggaccagcgtcctatccagccattgcatctttc

SEQ ID NO: 212848 - DNA, 4027 bp, Zea Mays
gcctggcccattgcaatctcgagaagcaactccgtcgcgccgcactcaatcgcctccgattctgcggagactcagcatcggaatggcggcggcggctcgtgccgggttccggcggctcttctccgtctcggccttcgctgcaccgcctcctcctgccgcgcgccccgcggcgaacccttgcaacaacctcttcgtctcaggcaactaacctcgcctccatttcccccctttttgcatgttttgcaagagaaaaccctcgccttgattcttatgctgcgcgctttattagttgcttgttgtgctagcatgcggtggatgtttgcggtaggattaggaatgggggaagttgtttacttttgtctgagatctgttagccagtagttacttccaactttgatatacctgatgaactaaactgatactagtcgtagtcgaatagtgttatcttgcgaactgaatcgatttgctctatctgaacccactctgaacgagagaagtactgcacaggcgcatacaaacttattgtcgaatgtcgatgtcaactacttgaccttttataagcacacgtatatgttaaacttgaaactgagtctttttgtatttagacctagagaactcctggtcatttttcaaaatggctgttaagaaaaccttgaatttttttgtccattatatcctattgttatttgatttctgaaactggtgtataataaataatcagagccataccatgctcgatgtaatgaagtgttcatgggcttgttgattcatttatgcaaattttgttattccattaatattctactacttgacaacattgcctgacttgtgtgaatatggacgttacatgtttgcaattgttcctcaggtttttatgttaattcattctcttctggaacatcgtgcgcctgaaatattttgatttttccttgttgtgctacaccatccacatctttcgatttaacctgtattgtttttcatcataacgctcgatgttatttgctttttataaataacatatgagctttcacatatttcaaaaaacatatattccattgtcttcttgtcttgaaatatgagtgatggaagagtatcaggtatgaagtttgctgcaaagctataatcagagaaggcgatggtacaattgaagtcgtccttgttgcaagaaacgccatcctagaggatttgaaggcagctaaataccaaaattaaatgtgatgcatgctgccacttgtgactaatatatgttttgcaggtacgtcataataggaaaatgtattcatcagctgcaccacaaatttcataccaatgattagagagaagtgggataatggtcatcatctgccacctactggtttcagacttccaacctaggctggttttagactttcctttccaacctatatccatagtagctattgaccggtcgatatcgatcactgttagtccgctccacgacacaatctttacactacaaccactttattgttatatcattttttacatacttttatgtgacataaaacatgaaattttattaaaatacaaatacataaaatcacagtttaccaacgggctctcgctgaatttcgtatttttaaaatttgaaaatatgtacatcaaatcttattgaaaaaaccaaaaatcgctggggaacaccgaaaatcacccagaaaatggtgaaaaccgctcgggatcttgtgaaaaccgctagagacaaccgaaattccattcgggatttggcaaaaattgacgaaaaccgtttggttttccgttcttgaatggtagcgagaaaagagaaaaaacgaaatgttgaactcggtctccaactcttgtacgacctagtgccccgacgacgcgggtggattgagcttcctcctcgtgacggcgcaagaaagaaggggctatcgggtctgttttgatctattaggatctaagagcaactccaatagttacttaaattttagctctctaaatcatagatttaagaagttgctaaatggcttttgaagtaaaaaatgtgagttctccaatagttctctaaatataggttgtaattttgttttgtatctatccacataaaaaataagtcacaaaaactatataatgcagtaaacatttttgtttagcgagttgttaaatggttgctaaatgtagagagaaaatgaggttagatgacaacttgttaaatttagaaagttcatttagagaactgttggagaatagtttttatattaactacctaaattattgatttaggaagtcttttatagaactactggagttgctctaatagaaacttgaacagagatcagacccttaaaggatatactttaaaagtttatggacaggttgaaacaagtagccaagtttgaggacgggaattgtaatttacccatccaaatttattgacgtatcgaaactccggcggccagatcttgagaagacaaataccgccagctctgtcatgcttatcactcgacatctcctcaccatactcttctatagaagaagcggtaaggaaggcctcaaaacatggaatttttgcatcgctgaatatgaacggaggcgagtaggcgtcaggcatgcgaggtagccgcatgcgctgcctcgacaaggggtcgcacacggctagctccggcaacaagcccaatgccctgaatgtaaaccccagaggtgcgcacttgaggagggcacgatcgtcacggaggtcacaaatctcccaaccaaggccagatgcagtgcgacactatgcaagaggaacccctcgctgtggttcttatgctgcgtgcttcattaattgcacatgttatgctgagcgctttattagttgcaagcggtggatgtttgcgataggattaggtatgggagaagctgtttgcttttgtctgagatctgcgagccagtagttacttcaaattttggtagacctgatgaactaaaactgatactaatcgatttgctctgtctgaacccactctgaacgagagaagtaccacacaagttcacaagtatttggtaaacttggaagtaggacacatctcaaatgccagcgattactgctggtttgagtaattcactttcctatgtagaaggtggtgctaaaaaattgttgcaggattcggtgcatttgtagctccctacaattttccttctctggcaatagttcatctggttatctgtgtcaaatagtcagtctcttcatcgaaggagaaaggcagagatttggaaaaattcaagggttaaataaacgcacaacgtccgagggacttaaggaagcattttctaaatttggtcaggttattgaagcaagagtaatcactgataggatatctggatactccagaggatttggctttgtcaaatatgcgactgtacaagaagctggtgaggccataaaaggcatggatggaaagttccttgacagttgggttattttcgctgagacgccacacaaccatcacaacaaggagcaccagcttatgattgaagttgccatacacggtcgatgacatacactgtatttttctgccgagtgtaatagtggatgttgattgccggccaaacatttgcagagagaatgtagcttgatgtgctccttgaacttcctttgttgtggttaacattggacttactgcaacctcatgcgcgtggcccataactttcgtctttcatttacaggtcactacattttttttgaccactgtgttggaaggaggttacactgcagcagaaatgcaatgtgttggaaggaggcccacctcctccttcggccaaaaacagtataaaataaatatgtcgaattatacaagaaaaaaaattgacccctcaaataaaattctaaataaaatcttatgtacgccactcagtcgtaccaggccgggaacccgagtcttggtccgccgcttcggccagcaccattggtctctatctatcgtcagtcgtcaccatcgtcgcgacctcgcctgcctgcgctccaccatagatgccgcatggaccagcgtcctatccagccattgcatctttc

SEQ ID NO: 212849 - DNA, 3446 bp, Zea Mays
ttgtgcccgactgcccgtctcggctctcaaaacaaaccccggctcgcctcgcggaatccacgagtccgccacgccagtgcgcctccaatttctccgcagtccgcagttccgcacccgtacctccccaaccccccagctcaccaccccgagatctcccccgaccggcctcgagatccctgcggccatgtcgtcgtcggcagccatggaagcaatcgacgagctcgtccagctctccgagtccatgcggcaggccgcctcgctccttgcggacgatgacccgtccgacgagaccgcctcgcgccgcccctccacctttctcaacgccgtcgcgctcggcaacgtcggagctggcaagtcggctgtgctgaacagcctcatcggccaccctgtgctgcccacgggggaaaacggcgcgacgcgggcgccgatagtcgtcgacctggcgagggatccagggctcagcagcaagtccatcgtcctacagatcgacagcaagtcccagcaggtgtcggcaagtgcactccggcattcactgcaggataggcttagcaaaggggcatccagtggatctgggagaagccgaagcgatgagatttaccttaagttgcggacaagtacagctcctccgttgaaattgattgatttacctggcatagaccaacgagttatggatgattcaacaatcagtgaatatgctgggcacaatgatgcactattgattgttgtgataccagcaatgcaagcggctgatgttgcatcttctcgagctcttagactagcaaaggacattgatccagatggaactagaacaataggtgtcttaagcaaaatcgatcaggcagctgcagatgcaaaaaccgtttcttgtgttcagtccattttgtccaataagggtgccccacgagcagcagctgatattgagtgggttgctctaattgggcagtctgtctcaattgcatctgctcaatcaggatcagttgggtctgataattcactggaaacagcttggcgagctgaggctgagacccttaaatctatcctaactggtgcacctcagagtaagctgggaagaattgctctcgtggataccatcgctaagcagatacgtaaacggatgaaagttcgtctgccaaatttgttgaccggacttcagggtaaatcccagatagtgcaagatgaacttgcaaggctaggagaacagatggtacaaagtgctgaaggaacaagagcagttgctctggagctatgtcgagaatttgaagataaatttcttgctcacattacttctggtgagaggggtccggttggaaaatagttgcaagttttgagggcaagttcccagataggatcaaacaacttccattggacaggcattttgatttgaacaacgtgaagaggattgtgttggaagcggatggctatcaaccctatttgatatctccagagaagggtttacgttccttaataaaaggagttcttgaaatggccaaggagccatcacgactctgtgttgaagaggtacaccgagttttgttagacatagtaaatgctgctgcaaatgctacaccaggactaggaagataccctccattcaagcgggaggtcattgcaattgcatctaatgcattagatgctttcaaaagtgatgcaaaaaagatggtggttgcacttgttgatatggagcgagcttttgttcctccacaacacttcatccgattagtacagaggagaatggaaagacagcgccgtgaggatgagttgaaaaataacagatcatctaagaaaggacaagatgcagagctatccaagatgaaccgggcttcaagccctcaaactggatccgatgaagctggtggtaacctgaaatcaatgaaggataaatccaataagcaagataatgatacaaaagagggaccaaatttgcaggttgctgggcctggcggcgaaataactgcaggttaccttttgaagaaaagtgcaaaaaataatgaatggagtaaaaggtggtttgttctaaacgagaagagtgggaagcttggatacactaagaagcaagaggagagacattttcgaggtgtcattgtcctggaggaatgtaacctggaagagatagaggaggaagagatatcgaagagttctaaggattcgaagaaggcaaatggacaagagaaaggcccaagtcttgtttttaagattactaacagggtttcctacaaaactgtcttaaaagctcacagtgccgttatattgaaggctgagagtatggctgacaaaattgaatggatcaagaagataaaaggtgttattcaaagcagagggggctctgttaagggtcccactgaagatggtcctatgagacaaagccgttcagatggatcccttgatacaatggctcggaggcctgctgatcctgaagaagaacttcgatggatgtctcaagaagtccgtggttatgttgaagctgttttgaacagtttggctgcaaatgttccaaaggctattgtactttgccaagtggagaaatcaaaagaagatatgctaaacaaactgtacaactcaataagtgcacaaagcaatgcaaagatcgaagagctactccaagaggaccacaatgctaaacgtaggcgggaaaaataccaaaaacaatcatccctcttgtcaaagctcactcgccaactcagcattcatgacaatagagcagcttcatatgggaacgatagttctggagctgagggtagcccccggtctcctggccactctggtgaggattggaagtctgccttcgactcagcaacaaatggctctgttgaccggtccagttcacagcatgagacaaggtcaaaaagtgctgacagtcgaggccggcgccatgaaaacggggatgccaactctggcagccgacgcacacctaaccggttgccaccggcaccaccaaatggggggagatactaagtatgttgattgatcattacctgtgaccaatcatcatcatatgctcttgccaggttctcatcctctactgatactggttattggtggaagaaaacatatgggaccggagaacggaaagcttactggaagatttggatggacggtgtgtatcaagagaaccaaagttgtttatagaaaattagaatcatataggtcattgatgattgtcatttcccgatcgttttggtgtatttgatcttttggatcctcattgccagtgggattttgttgccacggatcagttaattttggttttgtacgcttcttctgtaagtctccccatcaaactggcaaatgtattctttacacacagtcatgtatcgttgttcttcccattcttttagactgaaccacatgttcagtggttgtgccatactgctgtatgattatattgtacaattcattattgggctggagtacacacatgcttgttgatacggcccacatgttcatat

SEQ ID NO: 212850 - DNA, 3439 bp, Zea Mays
ttgtgcccgactgcccgtctcggctctcaaaacaaaccccggctcgcctcgcggaatccacgagtccgccacgccagtgcgcctccaatttctccgcagtccgcagttccgcacccgtacctccccaaccccccagctcaccaccccgagatctcccccgaccggcctcgagatccctgcggccatgtcgtcgtcggcagccatggaagcaatcgacgagctcgtccagctctccgagtccatgcggcaggccgcctcgctccttgcggacgatgacccgtccgacgagaccgcctcgcgccgcccctccacctttctcaacgccgtcgcgctcggcaacgtcggagctggcaagtcggctgtgctgaacagcctcatcggccaccctgtgctgcccacgggggaaaacggcgcgacgcgggcgccgatagtcgtcgacctggcgagggatccagggctcagcagcaagtccatcgtcctacagatcgacagcaagtcccagcaggtgtcggcaagtgcactccggcattcactgcaggataggcttagcaaaggggcatccagtggatctgggagaagccgaagcgatgagatttaccttaagttgcggacaagtacagctcctccgttgaaattgattgatttacctggcatagaccaacgagttatggatgattcaacaatcagtgaatatgctgggcacaatgatgcactattgattgttgtgataccagcaatgcaagcggctgatgttgcatcttctcgagctcttagactagcaaaggacattgatccagatggaactagaacaataggtgtcttaagcaaaatcgatcaggcagctgcagatgcaaaaaccgtttcttgtgttcagtccattttgtccaataagggtgccccacgagcagcagctgatattgagtgggttgctctaattgggcagtctgtctcaattgcatctgctcaatcaggatcagttgggtctgataattcactggaaacagcttggcgagctgaggctgagacccttaaatctatcctaactggtgcacctcagagtaagctgggaagaattgctctcgtggataccatcgctaagcagatacgtaaacggatgaaagttcgtctgccaaatttgttgaccggacttcagggtaaatcccagatagtgcaagatgaacttgcaaggctaggagaacagatggtacaaagtgctgaaggaacaagagcagttgctctggagctatgtcgagaatttgaagataaatttcttgctcacattacttctggggtccggttggaaaatagttgcaagttttgagggcaagttcccagataggatcaaacaacttccattggacaggcattttgatttgaacaacgtgaagaggattgtgttggaagcggatggctatcaaccctatttgatatctccagagaagggtttacgttccttaataaaaggagttcttgaaatggccaaggagccatcacgactctgtgttgaagaggtacaccgagttttgttagacatagtaaatgctgctgcaaatgctacaccaggactaggaagataccctccattcaagcgggaggtcattgcaattgcatctaatgcattagatgctttcaaaagtgatgcaaaaaagatggtggttgcacttgttgatatggagcgagcttttgttcctccacaacacttcatccgattagtacagaggagaatggaaagacagcgccgtgaggatgagttgaaaaataacagatcatctaagaaaggacaagatgcagagctatccaagatgaaccgggcttcaagccctcaaactggatccgatgaagctggtggtaacctgaaatcaatgaaggataaatccaataagcaagataatgatacaaaagagggaccaaatttgcaggttgctgggcctggcggcgaaataactgcaggttaccttttgaagaaaagtgcaaaaaataatgaatggagtaaaaggtggtttgttctaaacgagaagagtgggaagcttggatacactaagaagcaagaggagagacattttcgaggtgtcattgtcctggaggaatgtaacctggaagagatagaggaggaagagatatcgaagagttctaaggattcgaagaaggcaaatggacaagagaaaggcccaagtcttgtttttaagattactaacagggtttcctacaaaactgtcttaaaagctcacagtgccgttatattgaaggctgagagtatggctgacaaaattgaatggatcaagaagataaaaggtgttattcaaagcagagggggctctgttaagggtcccactgaagatggtcctatgagacaaagccgttcagatggatcccttgatacaatggctcggaggcctgctgatcctgaagaagaacttcgatggatgtctcaagaagtccgtggttatgttgaagctgttttgaacagtttggctgcaaatgttccaaaggctattgtactttgccaagtggagaaatcaaaagaagatatgctaaacaaactgtacaactcaataagtgcacaaagcaatgcaaagatcgaagagctactccaagaggaccacaatgctaaacgtaggcgggaaaaataccaaaaacaatcatccctcttgtcaaagctcactcgccaactcagcattcatgacaatagagcagcttcatatgggaacgatagttctggagctgagggtagcccccggtctcctggccactctggtgaggattggaagtctgccttcgactcagcaacaaatggctctgttgaccggtccagttcacagcatgagacaaggtcaaaaagtgctgacagtcgaggccggcgccatgaaaacggggatgccaactctggcagccgacgcacacctaaccggttgccaccggcaccaccaaatggggggagatactaagtatgttgattgatcattacctgtgaccaatcatcatcatatgctcttgccaggttctcatcctctactgatactggttattggtggaagaaaacatatgggaccggagaacggaaagcttactggaagatttggatggacggtgtgtatcaagagaaccaaagttgtttatagaaaattagaatcatataggtcattgatgattgtcatttcccgatcgttttggtgtatttgatcttttggatcctcattgccagtgggattttgttgccacggatcagttaattttggttttgtacgcttcttctgtaagtctccccatcaaactggcaaatgtattctttacacacagtcatgtatcgttgttcttcccattcttttagactgaaccacatgttcagtggttgtgccatactgctgtatgattatattgtacaattcattattgggctggagtacacacatgcttgttgatacggcccacatgttcatat

SEQ ID NO: 212851 - DNA, 3421 bp, Zea Mays
ttgtgcccgactgcccgtctcggctctcaaaacaaaccccggctcgcctcgcggaatccacgagtccgccacgccagtgcgcctccaatttctccgcagtccgcagttccgcacccgtacctccccaaccccccagctcaccaccccgagatctcccccgaccggcctcgagatccctgcggccatgtcgtcgtcggcagccatggaagcaatcgacgagctcgtccagctctccgagtccatgcggcaggccgcctcgctccttgcggacgatgacccgtccgacgagaccgcctcgcgccgcccctccacctttctcaacgccgtcgcgctcggcaacgtcggagctggcaagtcggctgtgctgaacagcctcatcggccaccctgtgctgcccacgggggaaaacggcgcgacgcgggcgccgatagtcgtcgacctggcgagggatccagggctcagcagcaagtccatcgtcctacagatcgacagcaagtcccagcaggtgtcggcaagtgcactccggcattcactgcaggataggcttagcaaaggggcatccagtggatctgggagaagccgaagcgatgagatttaccttaagttgcggacaagtacagctcctccgttgaaattgattgatttacctggcatagaccaacgagttatggatgattcaacaatcagtgaatatgctgggcacaatgatgcactattgattgttgtgataccagcaatgcaagcggctgatgttgcatcttctcgagctcttagactagcaaaggacattgatccagatggaactagaacaataggtgtcttaagcaaaatcgatcaggcagctgcagatgcaaaaaccgtttcttgtgttcagtccattttgtccaataagggtgccccacgagcagcagctgatattgagtgggttgctctaattgggcagtctgtctcaattgcatctgctcaatcaggatcagttgggtctgataattcactggaaacagcttggcgagctgaggctgagacccttaaatctatcctaactggtgcacctcagagtaagctgggaagaattgctctcgtggataccatcgctaagcagatacgtaaacggatgaaagttcgtctgccaaatttgttgaccggacttcagggtaaatcccagatagtgcaagatgaacttgcaaggctaggagaacagatggtacaaagtgctgaaggaacaagagcagttgctctggagctatgtcgagaatttgaagataaatttcttgctcacattacttctggtgaggggtccggttggaaaatagttgcaagttttgagggcaagttcccagataggatcaaacaacttccattggacaggcattttgatttgaacaacgtgaagaggattgtgttggaagcggatggctatcaaccctatttgatatctccagagaagggtttacgttccttaataaaaggagttcttgaaatggccaaggagccatcacgactctgtgttgaagaggtacaccgagttttgttagacatagtaaatgctgctgcaaatgctacaccaggactaggaagataccctccattcaagcgggaggtcattgcaattgcatctaatgcattagatgctttcaaaagtgatgcaaaaaagatggtggttgcacttgttgatatggagcgagcttttgttcctccacaacacttcatccgattagtacagaggagaatggaaagacagcgccgtgaggatgagttgaaaaataacagatcatctaagaaaggacaagatgcagagctatccaagatgaaccgggcttcaagccctcaaactggatccgatgaagctggtggtaacctgaaatcaatgaaggataaatccaataagcaagataatgatacaaaagagggaccaaatttgcaggttgctgggcctggcggcgaaataactgcaggttaccttttgaagaaaagtgcaaaaaataatgaatggagtaaaaggtggtttgttctaaacgagaagagtgggaagcttggatacactaagaagcaagaggagagacattttcgaggtgtcattgtcctggaggaatgtaacctggaagagatagaggaggaagagatatcgaagagttctaaggattcgaagaaggcaaatggacaagagaaaggcccaagtcttgtttttaagattactaacagggtttcctacaaaactgtcttaaaaggctgagagtatggctgacaaaattgaatggatcaagaagataaaaggtgttattcaaagcagagggggctctgttaagggtcccactgaagatggtcctatgagacaaagccgttcagatggatcccttgatacaatggctcggaggcctgctgatcctgaagaagaacttcgatggatgtctcaagaagtccgtggttatgttgaagctgttttgaacagtttggctgcaaatgttccaaaggctattgtactttgccaagtggagaaatcaaaagaagatatgctaaacaaactgtacaactcaataagtgcacaaagcaatgcaaagatcgaagagctactccaagaggaccacaatgctaaacgtaggcgggaaaaataccaaaaacaatcatccctcttgtcaaagctcactcgccaactcagcattcatgacaatagagcagcttcatatgggaacgatagttctggagctgagggtagcccccggtctcctggccactctggtgaggattggaagtctgccttcgactcagcaacaaatggctctgttgaccggtccagttcacagcatgagacaaggtcaaaaagtgctgacagtcgaggccggcgccatgaaaacggggatgccaactctggcagccgacgcacacctaaccggttgccaccggcaccaccaaatggggggagatactaagtatgttgattgatcattacctgtgaccaatcatcatcatatgctcttgccaggttctcatcctctactgatactggttattggtggaagaaaacatatgggaccggagaacggaaagcttactggaagatttggatggacggtgtgtatcaagagaaccaaagttgtttatagaaaattagaatcatataggtcattgatgattgtcatttcccgatcgttttggtgtatttgatcttttggatcctcattgccagtgggattttgttgccacggatcagttaattttggttttgtacgcttcttctgtaagtctccccatcaaactggcaaatgtattctttacacacagtcatgtatcgttgttcttcccattcttttagactgaaccacatgttcagtggttgtgccatactgctgtatgattatattgtacaattcattattgggctggagtacacacatgcttgttgatacggcccacatgttcatat

SEQ ID NO: 212852 - DNA, 1390 bp, Zea Mays
ctaacacaacggaggcaataggatgggatggtcatctataaataagtagcccggcgcagccttctttggagcagggagaagaacacagggcacacgcactacacgcacggcacgcagatacatatagagagaggttagctatagcttgcacatctatttaactaactaactaactggctagctagctcgatccgcagagcaaagcgaaagcagcaagaagcaaagcaatggagaaccctgcgagtgtgctagttctaccagcgcagttcaccaaactcaccttcggaaacctgtacatccgccgggccgggccgggcagcagggagataaccgaggagggcaggtgcgacctggacaagagatacgtgagtgacttccccgtctacgacggccgcggccccgacgccagccttgtggcccgcgtgcaggggatcaccagcgaaatcgggaacgcgcaccaactgttcgtcgttgttttcgacaccgacagctgttcgtctcgccctgcatatgcgtctctctgctgccaggctcaagggctccacgctcgtcaccaatggcgtgataacggccgggtctgacgagtgggcgatctacggcggaaccggggtgtttgccatggcgaggggcgtcataaggagaaggtatctcgccgacagggccggcgggaacactgatgagctcaacatggatgtcttctgccggccgtttggctcacagtcagagctgcaagataagatgcaggtgcaggggcagggctctagcgtcaccaagattggactatggggtggaccgggagggtcggcacaggacatcacggcggagcggccgccgcagcgtctgcacagcgtcaccgttcgtgctggcgtcgccgtcgactccatcgagttcacctatactgacagcgctgggcagaggcgcgccgctgggcgatggggtggactcgggggcaatgttcgaacgatcgaccttggcgacgccgaggatgtcagggaagtctcgggaacatacggcgcatttgaaggtgccactacgctgacctcgctcaggctcgtcaccagcagcagaacctggggcccctggggtgtcgagaacgggacgcgtttctccgtcacggcgcccatcggcagcagcatcgtgggattctatgcgcgggcgggaaccaggctcgtcgatgctatcggtgtttacttgcgtcagatttaattcgaataatagcaggggagctactgctagctacgtacctgctccatcctccattatcctttatttcaattcgctcatcatcgtcgtgtgtaaattaaataaataaagctcttgtgcccatattatatatagttgtcatggccgtgccgtgtctatgtgcgtatacaagtttggctcatataat

SEQ ID NO: 212853 - DNA, 1344 bp, Zea Mays
ctaacacaacggaggcaataggatgggatggtcatctataaataagtagcccggcgcagccttctttggagcagggagaagaacacagggcacacgcactacacgcacggcacgcagatacatatagagagaggttagctatagcttgcacatctatttaactaactaactaactggctagctagctcgatccgcagagcaaagcgaaagcagcaagaagcaaagcaatggagaaccctgcgagtgtgctagttctaccagcgcagttcaccaaactcaccttcggaaacctgtacatccgccgggccgggccgggcagcagggagataaccgaggagggcaggtgcgacctggacaagagatacgtgagtgacttccccgtctacgacggccgcggccccgacgccagccttgtggcccgcgtgcaggggatcaccagcgaaatcgggaacgcgcaccaactgttcgtcgttgttttcgacaccgacaggctcaagggctccacgctcgtcaccaatggcgtgataacggccgggtctgacgagtgggcgatctacggcggaaccggggtgtttgccatggcgaggggcgtcataaggagaaggtatctcgccgacagggccggcgggaacactgatgagctcaacatggatgtcttctgccggccgtttggctcacagtcagagctgcaagataaggtgcaggggcagggctctagcgtcaccaagattggactatggggtggaccgggagggtcggcacaggacatcacggcggagcggccgccgcagcgtctgcacagcgtcaccgttcgtgctggcgtcgccgtcgactccatcgagttcacctatactgacagcgctgggcagaggcgcgccgctgggcgatggggtggactcgggggcaatgttcgaacgatcgaccttggcgacgccgaggatgtcagggaagtctcgggaacatacggcgcatttgaaggtgccactacgctgacctcgctcaggctcgtcaccagcagcagaacctggggcccctggggtgtcgagaacgggacgcgtttctccgtcacggcgcccatcggcagcagcatcgtgggattctatgcgcgggcgggaaccaggctcgtcgatgctatcggtgtttacttgcgtcagatttaattcgaataatagcaggggagctactgctagctacgtacctgctccatcctccattatcctttatttcaattcgctcatcatcgtcgtgtgtaaattaaataaataaagctcttgtgcccatattatatatagttgtcatggccgtgccgtgtctatgtgcgtatacaagtttggctcatataat

SEQ ID NO: 212854 - DNA, 896 bp, Zea Mays
ctaacacaacggaggcaataggatgggatggtcatctataaataagtagcccggcgcagccttctttggagcagggagaagaacacagggcacacgcactacacgcacggcacgcagatacatatagagagaggttagctatagcttgcacatctatttaactaactaactaactggctagctagctcgatccgcagagcaaagcgaaagcagcaagaagcaaagcaatggagaaccctgcgagtgtgctagttctaccagcgcagttcaccaaactcaccttcggaaacctgtacatccgccgggccgggccgggcagcagggagataaccgaggagggcagcgtctgcacagcgtcaccgttcgtgctggcgtcgccgtcgactccatcgagttcacctatactgacagcgctgggcagaggcgcgccgctgggcgatggggtggactcgggggcaatgttcgaacgatcgaccttggcgacgccgaggatgtcagggaagtctcgggaacatacggcgcatttgaaggtgccactacgctgacctcgctcaggctcgtcaccagcagcagaacctggggcccctggggtgtcgagaacgggacgcgtttctccgtcacggcgcccatcggcagcagcatcgtgggattctatgcgcgggcgggaaccaggctcgtcgatgctatcggtgtttacttgcgtcagatttaattcgaataatagcaggggagctactgctagctacgtacctgctccatcctccattatcctttatttcaattcgctcatcatcgtcgtgtgtaaattaaataaataaagctcttgtgcccatattatatatagttgtcatggccgtgccgtgtctatgtgcgtatacaagtttggctcatataat

SEQ ID NO: 212855 - DNA, 2037 bp, Zea Mays
atggttgattttgtcagggaaggttttcttgggagtactcatgaattccgaaacaggttccagaaccccattgaaaatgggcaacacacgaattcaacatcagatgatgtgaagatcatgaaccaacgatcacacatcttgtttgaacaactgaaaggttttgtccagcgaaagagcatgaacgttgtgaagaatgatctaccaccaaagaaggtttttgttattactgtaaagctctcacagctgcagaggaagctatacaaaaggttcttggatgttcatggtttctcaagtagtggttattcagaaaaatctcacaggtccttctttgccaagtaccagacattatcccaggtatggaatcatccggggctcctccagatggctaaagaacaaagaggaaatttgcgtcgtgaagacgcggttgagaattttatgatggatgagagttcaagcgatgataatgttgaaaattacttgcctaatggagagaagcaaaaggataaagctgatcagcagtccaagaaaagcaacatcattatgaatgagattgtaggaaagtaactggtgggaggaacttttagatgagaatacttatatgaaagcagattacagtggcaaaatgaccttgctccttgatatcctgtcaaaaagttctgaattaggcgacaaagtattagtgtttagccagagtttgaccactctggatttagtagagttttatctggcaaaattgcaaatcaatggaaaagaaggcaaacattggaagcgggggaaggattggtacaggcttgatgggagcactccatcttctgatcgtcagaatcttgtggagatgtttaatgaccttgaaaacacaagagtgaaatgcacattgatatcaactcgtgctggatccctgggtatcaaccttcatgctgcaaatcgcgtggttcttcttgatggatcatggaatccaacacatgatctgcaagccatttatcgagtttggaggtatggccagaccaaacctgtatatgcctaccgcctaatggcacatcaaacaatggaagagaaaatatataagcgccaggtgacaaaggaaggccttgcagcaagggtggtggatagacagcaagtttcaagaaccatctccaaagaagagatgctgcatctttttgaatttggtgaagaggaattaatggaacagaacgagaatggttctactatgattgagaagccatccacttctaacactattaaaacctctgtgcctgttcctgtcgacagtctcatgctgagcctgctcagtgagcaaactcggtggatttcaggttaccatgaacatgaagctctcctccaagaaaatgaagaagaaaagcttacaaaggaggagcaggacctggctttgtccgaatgggagtcattgaggaaagctgcatctgatcctgagagaaaatcaagcatgagcgcagttccaacatatcccaatcctgtgcggccacttaagcctgcttcaagaagccggcaactgcagcaacctaaggctaactcaaataaccaaaagaagtgcaccaacttaacccacttgctgactctgagaagccatggcacaaaagcagggtgcacgacaacctgtaacgagtgcggccaggaaattagttgggagactctaaacagagatggtagatcgagatgatgcctgtctctgtggcattgccagatttttttggggtctttatgtaatgttaacgtccaggtagcagtatatatattgcgtatacgagagtattagagtaggtagaatgtagaatggacaaaaaatggctcttgtggtacacatggtagaacgcatgggatgcaaaaaatgaacgatcacattgttatggaatgtagtcgtaacaagatgtttgttatgcacttattgtcattttcttttccttatcctcagcgctagctattttaagtcaagtgtttgtctgaaatttgccaatcggaaggcataactttataggtttaaaataatgaatactaataatgtcttggaaccgattctct

SEQ ID NO: 212856 - DNA, 1971 bp, Zea Mays
atggttgattttgtcagggaaggttttcttgggagtactcatgaattccgaaacaggttccagaaccccattgaaaatgggcaacacacgaattcaacatcagatgatgtgaagatcatgaaccaacgatcacacatcttgtttgaacaactgaaaggttttgtccagcgaaagagcatgaacgttgtgaagaatgatctaccaccaaagaaggtttttgttattactgtaaagctctcacagctgcagaggaagctatacaaaaggttcttggatgttcatggtttctcaagtagtggttattcagaaaaatctcacaggtccttctttgccaagtaccagacattatcccaggtatggaatcatccggggctcctccagatggctaaagaacaaagaggaaatttgcgtcgtgaagacgcggttgagaattttatgatggatgagagttcaagcgatgataatgttgaaaattacttgcctaatggaggaaagtaactggtgggaggaacttttagatgagaatacttatatgaaagcagattacagtggcaaaatgaccttgctccttgatatcctgtcaaaaagttctgaattaggcgacaaagtattagtgtttagccagagtttgaccactctggatttagtagagttttatctggcaaaattgcaaatcaatggaaaagaaggcaaacattggaagcgggggaaggattggtacaggcttgatgggagcactccatcttctgatcgtcagaatcttgtggagatgtttaatgaccttgaaaacacaagagtgaaatgcacattgatatcaactcgtgctggatccctgggtatcaaccttcatgctgcaaatcgcgtggttcttcttgatggatcatggaatccaacacatgatctgcaagccatttatcgagtttggaggtatggccagaccaaacctgtatatgcctaccgcctaatggcacatcaaacaatggaagagaaaatatataagcgccaggtgacaaaggaaggccttgcagcaagggtggtggatagacagcaagtttcaagaaccatctccaaagaagagatgctgcatctttttgaatttggtgaagaggaattaatggaacagaacgagaatggttctactatgattgagaagccatccacttctaacactattaaaacctctgtgcctgttcctgtcgacagtctcatgctgagcctgctcagtgagcaaactcggtggatttcaggttaccatgaacatgaagctctcctccaagaaaatgaagaagaaaagcttacaaaggaggagcaggacctggctttgtccgaatgggagtcattgaggaaagctgcatctgatcctgagagaaaatcaagcatgagcgcagttccaacatatcccaatcctgtgcggccacttaagcctgcttcaagaagccggcaactgcagcaacctaaggctaactcaaataaccaaaagaagtgcaccaacttaacccacttgctgactctgagaagccatggcacaaaagcagggtgcacgacaacctgtaacgagtgcggccaggaaattagttgggagactctaaacagagatggtagatcgagatgatgcctgtctctgtggcattgccagatttttttggggtctttatgtaatgttaacgtccaggtagcagtatatatattgcgtatacgagagtattagagtaggtagaatgtagaatggacaaaaaatggctcttgtggtacacatggtagaacgcatgggatgcaaaaaatgaacgatcacattgttatggaatgtagtcgtaacaagatgtttgttatgcacttattgtcattttcttttccttatcctcagcgctagctattttaagtcaagtgtttgtctgaaatttgccaatcggaaggcataactttataggtttaaaataatgaatactaataatgtcttggaaccgattctct

SEQ ID NO: 212857 - DNA, 1835 bp, Zea Mays
atggttgattttgtcagggaaggttttcttgggagtactcatgaattccgaaacaggttccagaaccccattgaaaatgggcaacacacgaattcaacatcagatgatgtgaagatcatgaaccaacgatcacacatcttgtttgaacaactgaaaggttttgtccagcgaaagagcatgaacgttgtgaagaatgatctaccaccaaagaaggtttttgttattactgtaaagctctcacagctgcagaggaagctatacaaaaggttcttggatgttcatggtttctcaagtagtggttattcagaaaaatctcacaggtccttctttgccaagtaccagacattatcccaggaaagtaactggtgggaggaacttttagatgagaatacttatatgaaagcagattacagtggcaaaatgaccttgctccttgatatcctgtcaaaaagttctgaattaggcgacaaagtattagtgtttagccagagtttgaccactctggatttagtagagttttatctggcaaaattgcaaatcaatggaaaagaaggcaaacattggaagcgggggaaggattggtacaggcttgatgggagcactccatcttctgatcgtcagaatcttgtggagatgtttaatgaccttgaaaacacaagagtgaaatgcacattgatatcaactcgtgctggatccctgggtatcaaccttcatgctgcaaatcgcgtggttcttcttgatggatcatggaatccaacacatgatctgcaagccatttatcgagtttggaggtatggccagaccaaacctgtatatgcctaccgcctaatggcacatcaaacaatggaagagaaaatatataagcgccaggtgacaaaggaaggccttgcagcaagggtggtggatagacagcaagtttcaagaaccatctccaaagaagagatgctgcatctttttgaatttggtgaagaggaattaatggaacagaacgagaatggttctactatgattgagaagccatccacttctaacactattaaaacctctgtgcctgttcctgtcgacagtctcatgctgagcctgctcagtgagcaaactcggtggatttcaggttaccatgaacatgaagctctcctccaagaaaatgaagaagaaaagcttacaaaggaggagcaggacctggctttgtccgaatgggagtcattgaggaaagctgcatctgatcctgagagaaaatcaagcatgagcgcagttccaacatatcccaatcctgtgcggccacttaagcctgcttcaagaagccggcaactgcagcaacctaaggctaactcaaataaccaaaagaagtgcaccaacttaacccacttgctgactctgagaagccatggcacaaaagcagggtgcacgacaacctgtaacgagtgcggccaggaaattagttgggagactctaaacagagatggtagatcgagatgatgcctgtctctgtggcattgccagatttttttggggtctttatgtaatgttaacgtccaggtagcagtatatatattgcgtatacgagagtattagagtaggtagaatgtagaatggacaaaaaatggctcttgtggtacacatggtagaacgcatgggatgcaaaaaatgaacgatcacattgttatggaatgtagtcgtaacaagatgtttgttatgcacttattgtcattttcttttccttatcctcagcgctagctattttaagtcaagtgtttgtctgaaatttgccaatcggaaggcataactttataggtttaaaataatgaatactaataatgtcttggaaccgattctct

SEQ ID NO: 212858 - DNA, 2049 bp, Zea Mays
ttttcaatcttgtgagcagatggttgattttgtcagggaaggttttcttgggagtactcatgaattccgaaacaggttccagaaccccattgaaaatgggcaacacacgaattcaacatcagatgatgtgaagatcatgaaccaacgatcacacatcttgtttgaacaactgaaaggttttgtccagcgaaagagcatgaacgttgtgaagaatgatctaccaccaaagaaggtttttgttattactgtaaagctctcacagctgcagaggaagctatacaaaaggttcttggatgttcatggtttctcaagtagtggttattcagaaaaatctcacaggtccttctttgccaagtaccagacattatcccaggtatggaatcatccggggctcctccagatggctaaagaacaaagaggaaatttgcgtcgtgaagacgcggttgagaattttatgatggatgagagttcaagcgatgataatgttgaaaattacttgcctaatggagagaagcaaaaggataaagctgatcagcagtccaagaaaagcaacatcattatgaatgaggaaagtaactggtgggaggaacttttagatgagaatacttatatgaaagcagattacagtggcaaaatgaccttgctccttgatatcctgtcaaaaagttctgaattaggcgacaaagtattagtgtttagccagagtttgaccactctggatttagtagagttttatctggcaaaattgcaaatcaatggaaaagaaggcaaacattggaagcgggggaaggattggtacaggcttgatgggagcactccatcttctgatcgtcagaatcttgtggagatgtttaatgaccttgaaaacacaagagtgaaatgcacattgatatcaactcgtgctggatccctgggtatcaaccttcatgctgcaaatcgcgtggttcttcttgatggatcatggaatccaacacatgatctgcaagccatttatcgagtttggaggtatggccagaccaaacctgtatatgcctaccgcctaatggcacatcaaacaatggaagagaaaatatataagcgccaggtgacaaaggaaggccttgcagcaagggtggtggatagacagcaagtttcaagaaccatctccaaagaagagatgctgcatctttttgaatttggtgaagaggaattaatggaacagaacgagaatggttctactatgattgagaagccatccacttctaacactattaaaacctctgtgcctgttcctgtcgacagtctcatgctgagcctgctcagtgagcaaactcggtggatttcaggttaccatgaacatgaagctctcctccaagaaaatgaagaagaaaagcttacaaaggaggagcaggacctggctttgtccgaatgggagtcattgaggaaagctgcatctgatcctgagagaaaatcaagcatgagcgcagttccaacatatcccaatcctgtgcggccacttaagcctgcttcaagaagccggcaactgcagcaacctaaggctaactcaaataaccaaaagaagtgcaccaacttaacccacttgctgactctgagaagccatggcacaaaagcagggtgcacgacaacctgtaacgagtgcggccaggaaattagttgggagactctaaacagagatggtagatcgagatgatgcctgtctctgtggcattgccagatttttttggggtctttatgtaatgttaacgtccaggtagcagtatatatattgcgtatacgagagtattagagtaggtagaatgtagaatggacaaaaaatggctcttgtggtacacatggtagaacgcatgggatgcaaaaaatgaacgatcacattgttatggaatgtagtcgtaacaagatgtttgttatgcacttattgtcattttcttttccttatcctcagcgctagctattttaagtcaagtgtttgtctgaaatttgccaatcggaaggcataactttataggtttaaaataatgaatactaataatgtcttggaaccgattctct

SEQ ID NO: 212859 - DNA, 2235 bp, Zea Mays
cgctacagaaactcgcgcggcctgaaaacgcgggctgagttcgttaccaaaaataacggccacgacacaaccaccgctcccgtcccgcggaacgggagagccccggaaagagctcgtcgtcgccccaggagcccgctccacccaagaaacggtacgcagagcgccaggctccactctccacccccgtctgcgtgcgtgcgaccgcgcgcgacgtctcggtgatggcgtaccgtcggaagcagggcatccagcgctcggccaccttcgtcgaggaccaccgccaggcgtcgtcgggcggctccgcgtcgccggccatcgcgtccccgcgcgccacacggttcgcggacgacagccgccgccccgaacgcccctctcccctggcctcgcccgccgcgcccggggacctaacgctgccttccatcggcgagcgcttacccgccgctccggcggcggcgggggcccaagcccaatgcgacgtcgagccgagtagcccgctgcaggaccctgtcacccatctctacacatcgccaacttgcctaaacgacgaggggcccaagtacgacctcgagctatccaagaaagagcacacgaagcatgggttctgggggcttctggctcagaaagccaaggtcatgctcgacgagaatggcaccccacgcattcagacctctgaatctcgctggtcctacgatcgggtccgaagctcggagagccagagccccacggcacggagaggaacgctggaaggcaggctagacatcggagggaagatcaaggacgttcttgagaggagggcctggcggtggccgacaacacaatgtcaggcaacagccacggcggtgtcgtcgctgctgcccggaagctgcacatcaggaggaaggcgtgcagcatggacttccgggccgcaaacctgaccccggccagccccagcatgtcgccgatgctggccgacatggaatcgcctcagctcaaggcctctcgcgacgtagcgaacgccatggccgccaaggtgaagctgctgcagcgggagctcaagacgttgaaggccgacctggccttctccaaggagcggtgcgcgcagctggaggaggagaaccggctgctccgggatggcaaccacgacgccgacgaggacctgatacggcggcagctggagacgctgctcgcggagaagacgcggttggcgcacgagaacacggtgtacgcccgcgagaaccggttcctgcgggagatcgtcgactactaccagctcaacatgcaggacgtcgtcaaccttgacgacgacgacgacgacatcgaggaagaagacgacgattacgacgtcaacgccgacgacgtggagttggaggctgaacagtaccaagatcgccgcaagtgcctgccgtcccggcttgtgctggaggaagaggagcaccaggcggccgatccaggcgccgaaccgcagtcgcccactgagcagacggagtcgccgcgaatgctgaacacgaacagcggcggcggtgtcacccctgaccacgaatcgccgcggatcctgaacacgaacagcggcggcggcggcacccctgaccgcgaatcgccacggatcctgaacacgaacagtggcgtcacctctgaccacgaatcgccgcggatgctgaacacaaacagcggcggcacccctgaccacgaaccgccgcggatgctgaacacaaacagcggcgtcgaaattgctagtgaatcccccaggatgctgagcacaaacaccggcggcaacacaaatgagtcgccccggggctacaaggatgatggttcttcgccagaaacgacgagggacggttgacgattcttcatctctgatttgtcatttggattttgttgaatgtaaaacctgattcacctgatcagcgtgaaaataaagaaccattattgatcaggtatttttatttcagatgttaagattcctgatcaatgaccagatattcttcctttccagatgactgattgctgcgattcagtcccattgtggttttctcgcctatagtgctcttcagcacaacgtctgattcactggcatttcctagaggacaaataggatcagcaacctgcaccttgtttaattagaatgggtatccttaattccttatatcatccagatgtaccccgtttggacccaccatggacagatcaaaacatatatcaaacaaaagccaaaacaactgtgacacgtgtttttttttgtgttcatggatctgcccc

SEQ ID NO: 212860 - DNA, 397 bp, Zea Mays
cccacgcctcctcatccacccggaggcacctcacacacacacactctctctctctccactggctgacgccgcgaccgccccaacccaactgcccttttcggagatctcgccgcctccgccgtcgacttccgtcgcccccctatcccgcgtccgggcttacccgatggcacggctgcactggcttgaggccgtcctgccgctggggatcatcggcggcatgctctgcatcatgggcaacgcccagtatttcatccacaaggccgcgcacggcaggccgaagcacatcgggaacgatatgtgggacgtcgccatggagcgccgcgacaagaagctcgtggaacaatcctccggcaactagtggcaatgttaacggaatcaagtttcggtgggatttgtt

SEQ ID NO: 212861 - DNA, 396 bp, Zea Mays
cacgcctcctcatccacccggaggcacctcacacacacacactctctctctctccactggctgacgccgcgaccgccccaacccaactgcccttttcggagatctcgccgcctccgccgtcgacttccgtcgcccccctatcccgcgtccgggcttacccgatggcacggctgcactggcttgaggccgtcctgccgctggggatcatcggcggcatgctctgcatcatgggcaacgcccagtatttcatccacaaggccgcgcacggcaggccgaagcacatcgggaacgatatgtgggacgtcgccatggagcgccgcgacaagaagctcgtggaacaatcctccggcaactagggagtgtgtggctgcagggcagatggcgcggtgccgatgg

SEQ ID NO: 212862 - DNA, 1175 bp, Zea Mays
tccccctccccctccccctccgacccatccccgccgagaactccatttcccggctcgcaccgaggccaaggttccctcgtcccttctccaggcggcgcctacgccttcccgccctcctccaagtccaatgcctcgcggccaccggccccgccgcgcccgcgccgcggtggcacgcggcactgtccgccgcggcggggctgtacccggcctacgtcgcagccggcgcctccgtggccttcacgcggcccgaggcgttccggtggttcgtggcgctggcgccggggtcctacaccgctacgctcggcttcatcatgctcgccatgggcctcacgctccagctcagtgacttcgccgccctcctccgcgacaggcccctcgccattttgttcgggtgtgccgcccagtacaccataatgcctgcgtttggcgctatcattagccacgcgctggggcttcccccgtcgctctcagctggcctcatcctgctgggatgctgtcctggaggaactgcatccaatgtggtgactttagttgctcaaggcgacgttccattatccgtcgtgatgactgtctgcagcactcttgctgcagtgttccttactcctctgttaacgaaaattcttgctggtgcttatattcctgtggatgccgttaagctctctctcagtactttgcaggtggttgttgccccaattctattaggttcattgatacaaactgcattcccatcagtagctcaatttctgagtccttttgcacctctgatggcagtcttggcttcatcacttctagcatccagtgtcttctctgagaactttgtgcgcctaagatcgacaattgccgatgcatcccctgtgaatggaatgttctttggggatgtagggactgtcatcttctctgtcttcttgctgcattttgctggtttctttgtcgggtatgcagcagcagctataggtggtttcaaagaaaagcaaaggagagcaatatcgatcgaggatactgaaatagacgaatcaagcaagtcttccagcggacttacactcaaattaatgggcgtaaaatacttgggaggatcgactagctggctaattataaacatcagattatgagttaacaaatcgtgtaaaaagctagtcacattttggtatgcatgcagttgggcattttaaagctga

SEQ ID NO: 212863 - DNA, 2487 bp, Zea Mays
tccccctccccctccccctccgacccatccccgccgagaactccatttcccggctcgcaccgaggccaaggttccctcgtcccttctccaggcggcgcctacgccttcccgccctcctccaagtccaatgcctcgcggccaccggccccgccgcgcccgcgccgcggtggcacgcggcactgtccgccgcggcggggctgtacccggcctacgtcgcagccggcgcctccgtggccttcacgcggcccgaggcgttccggtggttcgtggcgctggcgccggggtcctacaccgctacgctcggcttcatcatgctcgccatgggcctcacgctccagctcagtgacttcgccgccctcctccgcgacaggcccctcgccattttgttcgggtgtgccgcccagtacaccataatgcctgcgtttggcgctatcattagccacgcgctggggcttcccccgtcgctctcagctggcctcatcctgctgggatgctgtcctggaggaactgcatccaatgtgtggttcaggtgactttagttgctcaaggcgacgttccattatccgtcgtgatgactgtctgcagcactcttgctgcagtgttccttactcctctgttaacgaaaattcttgctggtgcttatattcctgtggatgccgttaagctctctctcagtactttgcaggtggttgttgccccaattctattaggttcattgatacaaactgcattcccatcagtagctcaatttctgagtccttttgcacctctgatggcagtcttggcttcatcacttctagcatccagtgtcttctctgagaactttgtgcgcctaagatcgacaattgccgatgcatcccctgtgaatggaatgttctttggggatgtagggactgtcatcttctctgtcttcttgctgcattttgctggtttctttgtcgggtatgcagcagcagctataggtggtttcaaagaaaagcaaaggagagcaatatcgatcgaggtaggaatgcagaactcgtccctaggggtagttttagcaaccgcgcatttctcctcgcccttggtcgcgctgcctcctgcagtctcggccgtcgtcatgaacatgatgggtagcacactgggtctcgtatggcaatataccagcacttccgtgtcagagaacgaaaccagtgcgtgatctactcttactgtcgccatgtgcttaatctaatgtgtcgtatctaccaccaccaccactactactacccgaatatacctttcgagtacttttgatcatgttggggaacggggtcgctgatgatgaccctggaatggaaaaaatcttgctgtcttaattactggaggacccaggttacctgtctgaattatgtgggtggtgaatgcccaggctacatatgggtcccttttttcagcactgcaaatagagggaaaacccattttgcatgtgacctggtacattacaatgctgtgctgtgcctgcaaacaaagccccgcgcccactgcttccacctgtatgtgcgtgctcgtgcaatggcatcaggcaaaggtcgcaaggccaagtgccatttgcacccatgcgctcttgtggcagtagtgctaccgactaatgatgatgaccagagctcgcgactgccccacagagagaggtttgccgaaccgcttgatgagattcattcacggaaccacgaggagcaggcaggcagggaaaagcagatctcgccacagctgcaggatcatgatcatcgcctggtgttttcctgggatctaaaccacgctgcttactttttaaaggtctggatctggtcaacagtcaaccgagttgtgggatcatggttgccattttattttatttttttggtttgggccagcttttcttcttgcagctcaacggcgacgacctggagcgttcagctttgcctttgaatgaccggcactgtagcacgtccagatcaggtcccgttgttctgaatcctggctagcagcttagcatggtacggtcaaatgaagctgtcatgtgcgcccgtaacgagtcaaagtagatgaacatgtgagtgcaactaaacctgtccgttgagatgaacatgtctacgctacttttgccgaggctgacggcgtctcccgctcctgttcaagtggagattaacaaagttgctcacacacactgatcggggagggatcaaagtagtatatgttcaatctggctggttatttggtctgtgaatcatgtgctgggatttaactagtctctctgtctcccagttgcggttgatcagctccttcctattaatgttccagccacgctgagtcacagctgctggctgaacaccgggcatcatccagtggagttctttttgtggacgaagtcaaagatgacaatgagacgtgattagtgcggacgcacgttctcattgaaaaattaacggctttcactgtcatttcgtatttttattttattcctgtaatggttgcactatgtccttgttg

SEQ ID NO: 212864 - DNA, 2402 bp, Zea Mays
tccccctccccctccccctccgacccatccccgccgagaactccatttcccggctcgcaccgaggccaaggttccctcgtcccttctccaggcggcgcctacgccttcccgccctcctccaagtccaatgcctcgcggccaccggccccgccgcgcccgcgccgcggtggcacgcggcactgtccgccgcggcggggctgtacccggcctacgtcgcagccggcgcctccgtggccttcacgcggcccgaggcgttccggtggttcgtggcgctggcgccggggtcctacaccgctacgctcggcttcatcatgctcgccatgggcctcacgctccagctcagtgacttcgccgccctcctccgcgacaggcccctcgccattttgttcgggtgtgccgcccagtacaccataatgcctgcgtttggcgctatcattagccacgcgctggggcttcccccgtcgctctcagctggcctcatcctgctgggatgctgtcctggaggaactgcatccaatgtggtgactttagttgctcaaggcgacgttccattatccgtcgtgatgactgtctgcagcactcttgctgcagtgttccttactcctctgttaacgaaaattcttgctggtgcttatattcctgtggatgccgttaagctctctctcagtactttgcaggtggttgttgccccaattctattaggttcattgatacaaactgcattcccatcagtagctcaatttctgagtccttttgcacctctgatggcagtcttggcttcatcacttctagcatccagtgtcttctctgagaactttgtgcgcctaagatcgacaattgccgatgcatcccctgtgaatggaatgttctttggggatgtagggactgtcatcttctctgtcttcttgctgcattttgctggtttctttgtcgggtatgcagcagcagctataggtggtttcaaagaaaagcaaaggagagcaatatcgatcgaggtaggaatgcagaactcgtccctaggggtagttttagcaaccgcgcatttctcctcgcccttggtcgcgctgcctcctgcagtctcggccgtcgtcatgaacatgatgggtagcacactgggtctcgtatggcaatataccagcacttccgtgtcagagaacgaaaccagtgcgtgatctactcttactgtcgccatgtgcttaatctaatgtgtcgtatctaccaccaccaccactactactacccgaatatacctttcgagtacttttgatcatgttggggaacggggtcgctgatgatgaccctggaatggaaaaaatcttgctgtcttaattactggaggacccaggttacctgtctgaattatgtgggtggtgaatgcccaggctacatatgggtcccttttttcagcactgcaaatagagggaaaacccattttgcatgtgacctggtacattacaatgctgtgctgtgcctgcaaacaaagccccgcgcccactgcttccacctgtatgtgcgtgctcgtgcaatggcatcaggcaaaggtcgcaaggccaagtgccatttgcacccatgcgctcttgtggcagtagtgctaccgactaatgatgatgaccagagctcgcgactgccccacagagagaggtttgccgaaccgcttgatgagattcattcacggaaccacgaggagcaggcaggcagggaaaagcagatctcgccacagctgcaggatcatgatcatcgcctggtgttttcctgggatctaaaccacgctgcttactttttaaagcttttcttcttgcagctcaacggcgacgacctggagcgttcagctttgcctttgaatgaccggcactgtagcacgtccagatcaggtcccgttgttctgaatcctggctagcagcttagcatggtacggtcaaatgaagctgtcatgtgcgcccgtaacgagtcaaagtagatgaacatgtgagtgcaactaaacctgtccgttgagatgaacatgtctacgctacttttgccgaggctgacggcgtctcccgctcctgttcaagtggagattaacaaagttgctcacacacactgatcggggagggatcaaagtagtatatgttcaatctggctggttatttggtctgtgaatcatgtgctgggatttaactagtctctctgtctcccagttgcggttgatcagctccttcctattaatgttccagccacgctgagtcacagctgctggctgaacaccgggcatcatccagtggagttctttttgtggacgaagtcaaagatgacaatgagacgtgattagtgcggacgcacgttctcattgaaaaattaacggctttcactgtcatttcgtatttttattttattcctgtaatggttgcactatgtccttgttg

SEQ ID NO: 212865 - DNA, 2323 bp, Zea Mays
tccccctccccctccccctccgacccatccccgccgagaactccatttcccggctcgcaccgaggccaaggttccctcgtcccttctccaggcggcgcctacgccttcccgccctcctccaagtccaatgcctcgcggccaccggccccgccgcgcccgcgccgcggtggcacgcggcactgtccgccgcggcggggctgtacccggcctacgtcgcagccggcgcctccgtggccttcacgcggcccgaggcgttccggtggttcgtggcgctggcgccggggtcctacaccgctacgctcggcttcatcatgctcgccatgggcctcacgctccagctcagtgacttcgccgccctcctccgcgacaggcccctcgccattttgttcgggtgtgccgcccagtacaccataatgcctgcgtttggcgctatcattagccacgcgctggggcttcccccgtcgctctcagctggcctcatcctgctgggatgctgtcctggaggaactgcatccaatgtggtggttgttgccccaattctattaggttcattgatacaaactgcattcccatcagtagctcaatttctgagtccttttgcacctctgatggcagtcttggcttcatcacttctagcatccagtgtcttctctgagaactttgtgcgcctaagatcgacaattgccgatgcatcccctgtgaatggaatgttctttggggatgtagggactgtcatcttctctgtcttcttgctgcattttgctggtttctttgtcgggtatgcagcagcagctataggtggtttcaaagaaaagcaaaggagagcaatatcgatcgaggtaggaatgcagaactcgtccctaggggtagttttagcaaccgcgcatttctcctcgcccttggtcgcgctgcctcctgcagtctcggccgtcgtcatgaacatgatgggtagcacactgggtctcgtatggcaatataccagcacttccgtgtcagagaacgaaaccagtgcgtgatctactcttactgtcgccatgtgcttaatctaatgtgtcgtatctaccaccaccaccactactactacccgaatatacctttcgagtacttttgatcatgttggggaacggggtcgctgatgatgaccctggaatggaaaaaatcttgctgtcttaattactggaggacccaggttacctgtctgaattatgtgggtggtgaatgcccaggctacatatgggtcccttttttcagcactgcaaatagagggaaaacccattttgcatgtgacctggtacattacaatgctgtgctgtgcctgcaaacaaagccccgcgcccactgcttccacctgtatgtgcgtgctcgtgcaatggcatcaggcaaaggtcgcaaggccaagtgccatttgcacccatgcgctcttgtggcagtagtgctaccgactaatgatgatgaccagagctcgcgactgccccacagagagaggtttgccgaaccgcttgatgagattcattcacggaaccacgaggagcaggcaggcagggaaaagcagatctcgccacagctgcaggatcatgatcatcgcctggtgttttcctgggatctaaaccacgctgcttactttttaaaggtctggatctggtcaacagtcaaccgagttgtgggatcatggttgccattttattttatttttttggtttgggccagcttttcttcttgcagctcaacggcgacgacctggagcgttcagctttgcctttgaatgaccggcactgtagcacgtccagatcaggtcccgttgttctgaatcctggctagcagcttagcatggtacggtcaaatgaagctgtcatgtgcgcccgtaacgagtcaaagtagatgaacatgtgagtgcaactaaacctgtccgttgagatgaacatgtctacgctacttttgccgaggctgacggcgtctcccgctcctgttcaagtggagattaacaaagttgctcacacacactgatcggggagggatcaaagtagtatatgttcaatctggctggttatttggtctgtgaatcatgtgctgggatttaactagtctctctgtctcccagttgcggttgatcagctccttcctattaatgttccagccacgctgagtcacagctgctggctgaacaccgggcatcatccagtggagttctttttgtggacgaagtcaaagatgacaatgagacgtgattagtgcggacgcacgttctcattgaaaaattaacggctttcactgtcatttcgtatttttattttattcctgtaatggttgcactatgtccttgttg

SEQ ID NO: 212866 - DNA, 1897 bp, Zea Mays
ggacgacaggacgaggacggcggggtcaaggctctctttctctctccctccctctctgcgtgtctcctcgcacgctacgcgaggccacgcgagattgcttgggagatgcgtgcccgcctccagattccccgttccagcgccgaggcgcgcaagctacgcgacggttgctgagcttcgctgcttgtgctgaagctctaaggagagcagacttccctcaaggtttcgtctttggcactgcttcttcagcttaccagtatgaaggtgctgtcaacgagggtcaacgtggacctacaatatgggatactctcacaagacgacccggacgggtgatagatttcagcaatgcagatgttgccgttgatcactaccatcgttataagatgtggacttgattaaggacattggcatggatgcataccggttctctatctcgtggtcacgtatctttccaaatggaactggtgaacctaatgaagaaggattgaattactataacagcctcataaatactctattagacaaaggtatacaaccatatgtaacactctttcactgggaccttccgcaagcactagaagacagatatggtggatggttaaactcccaaatcgtggatgattttgttcactatgcctctacttgcttcaaggaatttggagatagagtgaaacactggatcactttcaatgagccccataattttgcgattgaaggctatgaccttggcatccaggcacctgggaggtgttctattctgtctcatatattctgcagggagggcaaatcatcgactgagccttatgtcgtagctcacaacatactcttagcgcatgctggtgcctttcatacttataagcagcatttcaagaaagaacaaggaggtatcattggcattgcactcgattctaagtggtatgagccactgtcagatgttgatgaggacacagaggcagcagcacgagcaatggactttgagcttggatgaaacttgtgggcgacaggctgcctcagttttcagctcgggcttcgatgttagtgtcaggctcactagattttgtgggcataaaccattacaccacactgtatgttaggaacgacagaatgcggatcaggaaacttgtaatgaatgatgcttcaactgatgctgcggtcatacctactgcttatagacatggaaagaaaataggagaaacggcagcgtcaggatggctgcacatagtgccctggggcatgttcaagctgatgaagcacatcaaagaaaagtacgggaatccgcccgtgatcattactgaaaacggcatggatgatgcgaacaaccggttttcgaaattagaggatgatctgcaggatgataaacggatacagtaccacaaggactacatgtctaacctcctagacgcaattaggaaggaaggctgcaacgtccatggctacttcgtctggtcgctgctcgacaactgggagtggaactccgggtacacggtgcggtttgggctctactacatcgactacaacaacaatttgacacggatacccaaggcgtccgtggagtggttcaggcaggtcttggcccagaagacggctggtttggagtacagtggttctacagtggccagtagttgagtgtatataacatacacggcacggctaccatcgatctgtacatgcgtacgtagctttagattagattgtgattattctcgatgtatatagactcaccatttggacgaccttcaaccgcacagttgaatgtgtcgttatgcttgctacaaattggttgattggtgctaaagaaatcagtgaggggtgctcggttctactactaaatgtcatatcggaaattaaataccaattataaatattaaatatattttaattacaaattaattatacaaaa

SEQ ID NO: 212867 - DNA, 2028 bp, Zea Mays
ggacgacaggacgaggacggcggggtcaaggctctctttctctctccctccctctctgcgtgtctcctcgcacgctacgcgaggccacgcgagattgcttgggagatgcgtgcccgcctccagattccccgttccagcgccgaggcgcgcaagctacgcgacggttgctgagagattttgcaccttgtggcctccacaagagttacttagtagagacgcacgttggaagggcttccaagacaagtgaagctcactagctcagcgttcagttgcttcccacgcttcaccaactgaacaagcttcgctgcttgtgctgaagctctaaggagagcagacttccctcaaggtttcgtctttggcactgcttcttcagcttaccagtatgaaggtgctgtcaacgagggtcaacgtggacctacaatatgggatactctcacaagacgacccggacgggtgatagatttcagcaatgcagatgttgccgttgatcactaccatcgttataaggaagatgtggacttgattaaggacattggcatggatgcataccggttctctatctcgtggtcacgtatctttccaaatggaactggtgaacctaatgaagaaggattgaattactataacagcctcataaatactctattagacaaaggtatacaaccatatgtaacactctttcactgggaccttccgcaagcactagaagacagatatggtggatggttaaactcccaaatcgtggatgattttgttcactatgcctctacttgcttcaaggaatttggagatagagtgaaacactggatcactttcaatgagccccataattttgcgattgaaggctatgaccttggcatccaggcacctgggaggtgttctattctgtctcatatattctgcagggagggcaaatcatcgactgagccttatgtcgtagctcacaacatactcttagcgcatgctggtgcctttcatacttataagcagcatttcaagaaagaacaaggaggtatcattggcattgcactcgattctaagtggtatgagccactgtcagatgttgatgaggacacagaggcagcagcacgagcaatggactttgagcttggatgaaacttgtgggcgacaggctgcctcagttttcagctcgggcttcgatgttagtgtcaggctcactagattttgtgggcataaaccattacaccacactgtatgttaggaacgacagaatgcggatcaggaaacttgtaatgaatgatgcttcaactgatgctgcggtcatacctactgcttatagacatggaaagaaaataggagaaacggcagcgtcaggatggctgcacatagtgccctggggcatgttcaagctgatgaagcacatcaaagaaaagtacgggaatccgcccgtgatcattactgaaaacggcatggatgatgcgaacaaccggttttcgaaattagaggatgatctgcaggatgataaacggatacagtaccacaaggactacatgtctaacctcctagacgcaattaggaaggaaggctgcaacgtccatggctacttcgtctggtcgctgctcgacaactgggagtggaactccgggtacacggtgcggtttgggctctactacatcgactacaacaacaatttgacacggatacccaaggcgtccgtggagtggttcaggcaggtcttggcccagaagacggctggtttggagtacagtggttctacagtggccagtagttgagtgtatataacatacacggcacggctaccatcgatctgtacatgcgtacgtagctttagattagattgtgattattctcgatgtatatagactcaccatttggacgaccttcaaccgcacagttgaatgtgtcgttatgcttgctacaaattggttgattggtgctaaagaaatcagtgaggggtgctcggttctactactaaatgtcatatcggaaattaaataccaattataaatattaaatatattttaattacaaattaattatacaaaa

SEQ ID NO: 212868 - DNA, 646 bp, Zea Mays
aaaataggaaaaaggaaacggcccatcatgttgagaagggcagaaggccctggcgggctttgttccactccaccttggccgctgttctcctcaccgcgcgtgcgctctctctctctctctctcggcgccgactcggctaccgccgccgccctacggaagcttcccagatcgtgaacctgcacacctcaacgatagatggcggggttcagaagccttgcacccaagaccaggaacctggtggtggccgggggactgtctgccttcgtgctcggggtctactactacaccatgagagcggtgggaggcacggacgagctccaggtggcgatcgacaagtttgaggagacgaagaagcaggatgccgctagaaactctagctccagcgcaggaggatcataattcataaacacgcggacacgccctggatctgctgcaggctgacatggtagtggtacgacgacagtcacgtcgctcagtaggccatgaccatgcgttctgcttgtactgtggaataaataaatgatgggttatggtactctttatctggtagagcttggcagcttgtgctttgagggatgtaatagtggccccgatgtttgtattttcctggcgagccggaaattttgtggagtatttgcttgtgtga

SEQ ID NO: 212869 - DNA, 1074 bp, Zea Mays
taatatacttgcctcttctgaagtaagcaaaatattttagtataagacaggataattatcgatcataaatacatatgcatgcttataatataattttagctgatagtagcgattgtttgcaatagattttatcgaaaaacagaccattcagtagttatagattctctaatatgtcagccaaatgaactaagaattctgtccagatgaaaataaaagattaaagatgttctcaaagacaaataaaatatgttcgttgggtaattcactgaaaagttttctgctcccgaagccagctatggtgtgacaaaaaatatagcaagtaaatagactccactatgcagcgctataaaatcagaagacaagatgatacgacccaacatgtaatcttgtttgttgcaggtctttactatgactgcaactttgaagtttggtattcatataatcaataggctcaacagtatgtcccttgtaaatgttcttgtttcttacaagtggtgatggtggtagtggtctggtctctgtgtgagcattggtctagaggatcgtgaagctatgcggctcttctttcatgttcaagatgaagttcatgaagcttggatcgaatctggatacctttaatgatgatggcaatgaagtcagaggttataatcactcctgagcacaacgaagaagggatttacacgatcagattctacattcagcgaagatgcaggctatctcctgctaatgttgctgccgaagaaatgaacttcttacttttatgtagaggcaacacttactaatatgatgctcgaatttgcaatgaatgatgtgtgtgtgtgctatttttggaccactggtatttaaaactgacaaccatgaagttttggtacacatgaatcccaagcaatttgtgtaaaatatggctaaacaaaacattgatgcctgatttatgatccagctgattttgatgtcaatttattatacatgtatatatctttacaataacttcttatgtatatggttatattgcaaatactattgtctctttactgtctcccgatggggcgtccgaatggatgcctcctcttctag

SEQ ID NO: 212870 - DNA, 1069 bp, Zea Mays
taatatacttgcctcttctgaagtaagcaaaatattttagtataagacaggataattatcgatcataaatacatatgcatgcttataatataattttagctgatagtagcgattgtttgcaatagattttatcgaaaaacagaccattcagtagttatagattctctaatatgtcagccaaatgaactaagaattctgtccagatgaaaataaaagattaaagatgttctcaaagacaaataaaatatgttcgttgggtaattcactgaaaagttttctgctcccgaagccagctatggtgtgacaaaaaatatagcaagtaaatagactccactatgcagcgctataaaatcagaagacaagatgatacgacccaacatgtaatcttgtttgttgcaggtctttactatgactgcaactttgaagtttggtattcatataatcaataggctcaacagtatgtcccttgtaaatgttcttgtttcttacaagtggtgatggtggtagtggtctggtctctgtgtgagcattggtctagaggatcgtgaagctatgcggctcttctttcatgttcaagatgaagttcatgaagcttggatcgaatctggatacctttaatgatgatggcaatgaagtcagaggttataatcactcctgagcacaacgaagaagggatttacacgatcagattctacattcagatgcaggctatctcctgctaatgttgctgccgaagaaatgaacttcttacttttatgtagaggcaacacttactaatatgatgctcgaatttgcaatgaatgatgtgtgtgtgtgctatttttggaccactggtatttaaaactgacaaccatgaagttttggtacacatgaatcccaagcaatttgtgtaaaatatggctaaacaaaacattgatgcctgatttatgatccagctgattttgatgtcaatttattatacatgtatatatctttacaataacttcttatgtatatggttatattgcaaatactattgtctctttactgtctcccgatggggcgtccgaatggatgcctcctcttctag

SEQ ID NO: 212871 - DNA, 893 bp, Zea Mays
cgcgcaccttgtctctgtcctctcccatccatctccctccgcacactccgccgcctcaccttctccccctctctctccccgccgccgtggtccccgccgccacgctgtggcccttcttcgacgccgtctgctccgacaccgccgtcaccttcggctcgctcgtcgcgctccacgagtacctttgagaattcgtcggtagtaccattgtatcattgcactggattaaatcgatgctattcagtcctatatccccgaaggagacgccttgaagttgatagccggacagttcatcagttcttgtttcttacaagtggtgatggtggtagtggtctggtctctgtgtgagcattggtctagaggatcgtgaagctatgcggctcttctttcatgttcaagatgaagttcatgaagcttggatcgaatctggatacctttaatgatgatggcaatgaagtcagaggttataatcactcctgagcacaacgaagaagggatttacacgatcagattctacattcagcgaagatgcaggctatctcctgctaatgttgctgccgaagaaatgaacttcttacttttatgtagaggcaacacttactaatatgatgctcgaatttgcaatgaatgatgtgtgtgtgtgctatttttggaccactggtatttaaaactgacaaccatgaagttttggtacacatgaatcccaagcaatttgtgtaaaatatggctaaacaaaacattgatgcctgatttatgatccagctgattttgatgtcaatttattatacatgtatatatctttacaataacttcttatgtatatggttatattgcaaatactattgtctctttactgtctcccgatggggcgtccgaatggatgcctcctcttctag

SEQ ID NO: 212872 - DNA, 793 bp, Zea Mays
cgccgcgcaccttgtctctgtcctctcccatccatctccctccgcacactccgccgcctcaccttctccccctctctctccccgccgccgtggtccccgccgccacgctgtggcccttcttcgacgccgtctgctccgacaccgccgtcaccttcggctcgctcgtcgcgctccacgagtacctttgagaattcttcttgtttcttacaagtggtgatggtggtagtggtctggtctctgtgtgagcattggtctagaggatcgtgaagctatgcggctcttctttcatgttcaagatgaagttcatgaagcttggatcgaatctggatacctttaatgatgatggcaatgaagtcagaggttataatcactcctgagcacaacgaagaagggatttacacgatcagattctacattcagcgaagatgcaggctatctcctgctaatgttgctgccgaagaaatgaacttcttacttttatgtagaggcaacacttactaatatgatgctcgaatttgcaatgaatgatgtgtgtgtgtgctatttttggaccactggtatttaaaactgacaaccatgaagttttggtacacatgaatcccaagcaatttgtgtaaaatatggctaaacaaaacattgatgcctgatttatgatccagctgattttgatgtcaatttattatacatgtatatatctttacaataacttcttatgtatatggttatattgcaaatactattgtctctttactgtctcccgatggggcgtccgaatggatgcctcctcttctag

SEQ ID NO: 212873 - DNA, 851 bp, Zea Mays
cacacgtcgtctctctcgccgcgcaccttgtctctgtcctctcccatccatctccctccgcacactccgccgcctcaccttctccccctctctctccccgccgccgtggtccccgccgccacgctgtggcccttcttcgacgccgtctgctccgacaccgccgtcaccttcggctcgctcgtcgcgctccacgagtacctttgagaattcgtcgttcttgtttcttacaagtggtgatggtggtagtggtctggtctctgtgtgagcattggtctagaggatcgtgaagctatgcggctcttctttcatgttcaagatgaagttcatgaagcttggatcgaatctggatacctttaatgatgatggcaatgaagtcagaggttataatcactcctgagcacaacgaagaagggatttacacgatcagattctacattcagcgaagctttctttcttaacatgttgctattgtgtccagcgaagatgcaggctatctcctgctaatgttgctgccgaagaaatgaacttcttacttttatgtagaggcaacacttactaatatgatgctcgaatttgcaatgaatgatgtgtgtgtgtgctatttttggaccactggtatttaaaactgacaaccatgaagttttggtacacatgaatcccaagcaatttgtgtaaaatatggctaaacaaaacattgatgcctgatttatgatccagctgattttgatgtcaatttattatacatgtatatatctttacaataacttcttatgtatatggttatattgcaaatactattgtctctttactgtctcccgatggggcgtccgaatggatgcctcctcttctag

SEQ ID NO: 212874 - DNA, 808 bp, Zea Mays
cacacgtcgtctctctcgccgcgcaccttgtctctgtcctctcccatccatctccctccgcacactccgccgcctcaccttctccccctctctctccccgccgccgtggtccccgccgccacgctgtggcccttcttcgacgccgtctgctccgacaccgccgtcaccttcggctcgctcgtcgcgctccacgagtacctttgagaattcgtcgttcttgtttcttacaagtggtgatggtggtagtggtctggtctctgtgtgagcattggtctagaggatcgtgaagctatgcggctcttctttcatgttcaagatgaagttcatgaagcttggatcgaatctggatacctttaatgatgatggcaatgaagtcagaggttataatcactcctgagcacaacgaagaagggatttacacgatcagattctacattcagatgcaggctatctcctgctaatgttgctgccgaagaaatgaacttcttacttttatgtagaggcaacacttactaatatgatgctcgaatttgcaatgaatgatgtgtgtgtgtgctatttttggaccactggtatttaaaactgacaaccatgaagttttggtacacatgaatcccaagcaatttgtgtaaaatatggctaaacaaaacattgatgcctgatttatgatccagctgattttgatgtcaatttattatacatgtatatatctttacaataacttcttatgtatatggttatattgcaaatactattgtctctttactgtctcccgatggggcgtccgaatggatgcctcctcttctag

SEQ ID NO: 212875 - DNA, 814 bp, Zea Mays
tcacacgtcgtctctctcgccgcgcaccttgtctctgtcctctcccatccatctccctccgcacactccgccgcctcaccttctccccctctctctccccgccgccgtggtccccgccgccacgctgtggcccttcttcgacgccgtctgctccgacaccgccgtcaccttcggctcgctcgtcgcgctccacgagtacctttgagaattcgtcgttcttgtttcttacaagtggtgatggtggtagtggtctggtctctgtgtgagcattggtctagaggatcgtgaagctatgcggctcttctttcatgttcaagatgaagttcatgaagcttggatcgaatctggatacctttaatgatgatggcaatgaagtcagaggttataatcactcctgagcacaacgaagaagggatttacacgatcagattctacattcagcgaagatgcaggctatctcctgctaatgttgctgccgaagaaatgaacttcttacttttatgtagaggcaacacttactaatatgatgctcgaatttgcaatgaatgatgtgtgtgtgtgctatttttggaccactggtatttaaaactgacaaccatgaagttttggtacacatgaatcccaagcaatttgtgtaaaatatggctaaacaaaacattgatgcctgatttatgatccagctgattttgatgtcaatttattatacatgtatatatctttacaataacttcttatgtatatggttatattgcaaatactattgtctctttactgtctcccgatggggcgtccgaatggatgcctcctcttctag

SEQ ID NO: 212876 - DNA, 989 bp, Zea Mays
tcacacgtcgtctctctcgccgcgcaccttgtctctgtcctctcccatccatctccctccgcacactccgccgcctcaccttctccccctctctctccccgccgccgtggtccccgccgccacgctgtggcccttcttcgacgccgtctgctccgacaccgccgtcaccttcggctcgctcgtcgcgctccacgagtacctttgagaattcgtcggtagtaccattgtatcattgcactggattaaatcgatgctattcagtcctatatccccgaaggagacgccttgaagttgatagccggacagttcatcaggtctttactatgactgcaactttgaagtttggtattcatataatcaataggctcaacagtatgtcccttgtaaatgttcttgtttcttacaagtggtgatggtggtagtggtctggtctctgtgtgagcattggtctagaggatcgtgaagctatgcggctcttctttcatgttcaagatgaagttcatgaagcttggatcgaatctggatacctttaatgatgatggcaatgaagtcagaggttataatcactcctgagcacaacgaagaagggatttacacgatcagattctacattcagcgaagatgcaggctatctcctgctaatgttgctgccgaagaaatgaacttcttacttttatgtagaggcaacacttactaatatgatgctcgaatttgcaatgaatgatgtgtgtgtgtgctatttttggaccactggtatttaaaactgacaaccatgaagttttggtacacatgaatcccaagcaatttgtgtaaaatatggctaaacaaaacattgatgcctgatttatgatccagctgattttgatgtcaatttattatacatgtatatatctttacaataacttcttatgtatatggttatattgcaaatactattgtctctttactgtctcccgatggggcgtccgaatggatgcctcctcttctag

SEQ ID NO: 212877 - DNA, 2916 bp, Zea Mays
atccggtaaggcgacgaaatgtacggcgacacaatgaagggtcaccaacccaaaggggacaagggcaatagggacgactacaccttcaattcagaaggctcgcggatgtctggccgacatactttcccgaggaggccgaggtcgggctgtcagaatccgaccagaaggtccgcctcaccaccgccctggctgatttcttctccacgcccgagatggcggaagtccttcgctcacgggttgaagatgatggcaacgacatcttgtgtcttccaattgatttccagcagcttcaggagttacgcatgtttattgaagataaactcaatgagtccccaaaagaagccttgctttgcatgggagttgcagctcatctggctctgtgctcggacaaggacaacaaaaggaacaagataaatatcaggctttacaacacgggagcagctattgcattaaagaaactaaaagcagcctttattaagaaacttgtcacagtgcgtggtactgtgctcaaagtcagcactgtaaaacctcttgttttgtggttgaaattccgatgcatgaagtgccgtaaagaaataccccgtgtgttttgtgatggaaaattttctcctccaatgtcctgtaccatccagggatgcaagagcagaagctttatcccagatagatctagtgcacagctgatggattttcaaaaaataagaatacaggagcttgcaagcgctgacaaccatgaagaaggccgagtgccacgcacagtggagtgtgagcttacagaagatctcgttgattgttgcatccctggagaaattgtaacggtaactgcaattgtgaaagtgctcaacaaccatatggatgttggtggagggaagtccagaatcagcagtcaaggtttatactacctgtatctggaggcagtttcagtgagaaagttgaagtcccatgctgtttctgacaaagaaattcaagctagtggaatttgtcattctcagtcttctactgtaaatgatgattttgctgtcaaatataaagaaaaatatggcaccgatgtttttcgcagaatacttcaatccttttgtccctctatctatgggcatgaacttgtaaaagctggtatcacacttgctctttttggcggtgtgcagaagaactcaatggatcaaaacatggtccctgttcgaggagatattcatgttattgtagttggtgatccagggctaggcaaaagccaactcctccaagctgcagcagctgtttccccacgaggaatatatgtatgtgggaatacgacaacaaaggctggcctaactgttgctgtggttaaagattctatgacaaatgattatgcatttgaggctggtgccatggtccttgctgatcgtggaatatgctgtattgatgagtttgataaaatgtttacagagcatcaggctttacttgaagccatggagcagcaatgtgtttctattgcaaaggctggtcttgtagcaagtttgtcagctcgaacttcagtgttggcagctgcaaatcctattggtggccattatgaccgagcaaaaacagtgaacgagaatctaaaaatgagtgctgccctcctttctcgatttgacttggtgtttattctacttgacaagccagatgagtcactagataaaagagtgtcagaccatataatagctctccataccaatgatgttgataatttcagacccaacaagaggaccagaacagggtcacattttgatggtgatccggggcttggagttggtggaaattcagtagcttcaaggctgaggctacacccagagaaagacaaggacttcactccattatctgggcaacttcttcgcaaatatatatcttattcaagagaacatgtcttccccagaatgtcaaaggcagcagctgcaattttgaaagaattttatttgaagctgagaaaccgcagtgcttctgctgatggtacacccatcacagccaggcagttagaaagcctagtcagattagccgaagctcgtgctcgcgtggatctaagagatgaagtgactgaagaagatgctcaggatgttgtcgatatcatgaaagaatctctgtatgacaaatatgttgatgaacatggttttgttgattttactcggagcggtggaatgagccaaccgaagcaggcaaagaagtttctgaatgcattaaacaaggaatctgagttgcagcaaaaggactgcttctcgagaactgaactttacaccatagctgataagatcagcttgcaagttccagacttggacactcttgtagaaaagatgaacattgccggttaccttattcaaaaaagatcagggatgtatcagctggtgactgcgccatattaacaatgcagccaacgaggtcaagatggagagttttcttgaatgaaactagaatttgcacctgctttgtctgtactagtgcctgctctagatctccagacactctggaaggccttaatccatttcaacataattgacatgtacctttcagctcatttccccccgtcccgtgagagatgtatggtttggaagctatgcgtatcgtcatggctgcgcacatacgtgctgcagtgtacaggcgactgaagtgcacgcgtcgcaggatgagcactaactttggtagcttggtgtatgccatggttgcgatatgatatattattgtgaaacaggaacctctagcggttattagtttatagatattcaagtttgccaatgaaacatccagaatagcatatgatgcattttacaccccttacacccgatcactcggaaaacatctagcacgctgtaaattactccctcagcaatagtaattattgctgttactgcgctgcactgcttgggaacactccttttcaaagccacattttataatacactagcacaatgtttg

SEQ ID NO: 212878 - DNA, 2786 bp, Zea Mays
atccggtaaggcgacgaaatgtacggcgacacaatgaagggtcaccaacccaaaggggacaagggcaatagggacgactacaccttcaattcagaaggctcgcggatgtctggccgacatactttcccgaggaggccgaggtcgggctgtcagaatccgaccagaaggtccgcctcaccaccgccctggctgatttcttctccacgcccgagatggcggaagtccttcgctcacgggttgaagatgatggcaacgacatcttgtgtcttccaattgatttccagcagcttcaggagttacgcatgtttattgaagataaactcaatgagtccccaaaagaagccttgctttgcatgggagttgcagctcatctggctctgtgctcggacaaggacaacaaaaggaacaagataaatatcaggctttacaacacgggagcagctattgcattaaagaaactaaaagcagcctttattaagaaacttgtcacagtgcgtggtactgtgctcaaagtcagcactgtaaaacctcttgttttgtggttgaaattccgatgcatgaagtgccgtaaagaaataccccgtgtgttttgtgatggaaaattttctcctccaatgtcctgtaccatccagggatgcaagagcagaagctttatcccagatagatctagtgcacagctgatggattttcaaaaaataagaatacaggagcttgcaagcgctgacaaccatgaagaaggccgagtgccacgcacagtggagtgtgagcttacagaagatctcgttgattgttgcatccctggagaaattgtaacggtaactgcaattgtgaaagtgctcaacaaccatatggatgttggtggagggaagtccagaatcagcagtcaaggtttatactacctgtatctggaggcagtttcagtgagaaagttgaagtcccatgctgtttctgacaaagaaattcaagctagtggaatttgtcattctcagtcttctactgtaaatgatgattttgctgtcaaatataaagaaaaatatggcaccgatgtttttcgcagaatacttcaatccttttgtccctctatctatgggcatgaacttgtaaaagctggtatcacacttgctctttttggcggtgtgcagaagaactcaatggatcaaaacatggtccctgttcgaggagatattcatgttattgtagttggtgatccagggctaggcaaaagccaactcctccaagctgcagcagctgtttccccacgaggaatatatgtatgtgggaatacgacaacaaaggctggcctaactgttgctgtggttaaagattctatgacaaatgattatgcatttgaggctggtgccatggtccttgctgatcgtggaatatgctgtattgatgagtttgataaaatgtttacagagcatcaggctttacttgaagccatggagcagcaatgtgtttctattgcaaaggctggtcttgtagcaagtttgtcagctcgaacttcagtgttggcagctgcaaatcctattggtggccattatgactccataccaatgatgttgataatttcagacccaacaagaggaccagaacagggtcacattttgatggtgatccggggcttggagttggtggaaattcagtagcttcaaggctgaggctacacccagagaaagacaaggacttcactccattatctgggcaacttcttcgcaaatatatatcttattcaagagaacatgtcttccccagaatgtcaaaggcagcagctgcaattttgaaagaattttatttgaagctgagaaaccgcagtgcttctgctgatggtacacccatcacagccaggcagttagaaagcctagtcagattagccgaagctcgtgctcgcgtggatctaagagatgaagtgactgaagaagatgctcaggatgttgtcgatatcatgaaagaatctctgtatgacaaatatgttgatgaacatggttttgttgattttactcggagcggtggaatgagccaaccgaagcaggcaaagaagtttctgaatgcattaaacaaggaatctgagttgcagcaaaaggactgcttctcgagaactgaactttacaccatagctgataagatcagcttgcaagttccagacttggacactcttgtagaaaagatgaacattgccggttaccttattcaaaaaagatcagggatgtatcagctggtgactgcgccatattaacaatgcagccaacgaggtcaagatggagagttttcttgaatgaaactagaatttgcacctgctttgtctgtactagtgcctgctctagatctccagacactctggaaggccttaatccatttcaacataattgacatgtacctttcagctcatttccccccgtcccgtgagagatgtatggtttggaagctatgcgtatcgtcatggctgcgcacatacgtgctgcagtgtacaggcgactgaagtgcacgcgtcgcaggatgagcactaactttggtagcttggtgtatgccatggttgcgatatgatatattattgtgaaacaggaacctctagcggttattagtttatagatattcaagtttgccaatgaaacatccagaatagcatatgatgcattttacaccccttacacccgatcactcggaaaacatctagcacgctgtaaattactccctcagcaatagtaattattgctgttactgcgctgcactgcttgggaacactccttttcaaagccacattttataatacactagcacaatgtttg

SEQ ID NO: 212879 - DNA, 2761 bp, Zea Mays
atccggtaaggcgacgaaatgtacggcgacacaatgaagggtcaccaacccaaaggggacaagggcaatagggacgactacaccttcaattcagaaggctcgcggatgtctggccgacatactttcccgaggaggccgaggtcgggctgtcagaatccgaccagaaggtccgcctcaccaccgccctggctgatttcttctccacgcccgagatggcggaagtccttcgctcacgggttgaagatgatggcaacgacatcttgtgtcttccaattgatttccagcagcttcaggagttacgcatgtttattgaagataaactcaatgagtccccaaaagaagccttgctttgcatgggagttgcagctcatctggctctgtgctcggacaaggacaacaaaaggaacaagataaatatcaggctttacaacacgggagcagctattgcattaaagaaactaaaagcagcctttattaggatgcaagagcagaagctttatcccagatagatctagtgcacagctgatggattttcaaaaaataagaatacaggagcttgcaagcgctgacaaccatgaagaaggccgagtgccacgcacagtggagtgtgagcttacagaagatctcgttgattgttgcatccctggagaaattgtaacggtaactgcaattgtgaaagtgctcaacaaccatatggatgttggtggagggaagtccagaatcagcagtcaaggtttatactacctgtatctggaggcagtttcagtgagaaagttgaagtcccatgctgtttctgacaaagaaattcaagctagtggaatttgtcattctcagtcttctactgtaaatgatgattttgctgtcaaatataaagaaaaatatggcaccgatgtttttcgcagaatacttcaatccttttgtccctctatctatgggcatgaacttgtaaaagctggtatcacacttgctctttttggcggtgtgcagaagaactcaatggatcaaaacatggtccctgttcgaggagatattcatgttattgtagttggtgatccagggctaggcaaaagccaactcctccaagctgcagcagctgtttccccacgaggaatatatgtatgtgggaatacgacaacaaaggctggcctaactgttgctgtggttaaagattctatgacaaatgattatgcatttgaggctggtgccatggtccttgctgatcgtggaatatgctgtattgatgagtttgataaaatgtttacagagcatcaggctttacttgaagccatggagcagcaatgtgtttctattgcaaaggctggtcttgtagcaagtttgtcagctcgaacttcagtgttggcagctgcaaatcctattggtggccattatgaccgagcaaaaacagtgaacgagaatctaaaaatgagtgctgccctcctttctcgatttgacttggtgtttattctacttgacaagccagatgagtcactagataaaagagtgtcagaccatataatagctctccataccaatgatgttgataatttcagacccaacaagaggaccagaacagggtcacattttgatggtgatccggggcttggagttggtggaaattcagtagcttcaaggctgaggctacacccagagaaagacaaggacttcactccattatctgggcaacttcttcgcaaatatatatcttattcaagagaacatgtcttccccagaatgtcaaaggcagcagctgcaattttgaaagaattttatttgaagctgagaaaccgcagtgcttctgctgatggtacacccatcacagccaggcagttagaaagcctagtcagattagccgaagctcgtgctcgcgtggatctaagagatgaagtgactgaagaagatgctcaggatgttgtcgatatcatgaaagaatctctgtatgacaaatatgttgatgaacatggttttgttgattttactcggagcggtggaatgagccaaccgaagcaggcaaagaagtttctgaatgcattaaacaaggaatctgagttgcagcaaaaggactgcttctcgagaactgaactttacaccatagctgataagatcagcttgcaagttccagacttggacactcttgtagaaaagatgaacattgccggttaccttattcaaaaaagatcagggatgtatcagctggtgactgcgccatattaacaatgcagccaacgaggtcaagatggagagttttcttgaatgaaactagaatttgcacctgctttgtctgtactagtgcctgctctagatctccagacactctggaaggccttaatccatttcaacataattgacatgtacctttcagctcatttccccccgtcccgtgagagatgtatggtttggaagctatgcgtatcgtcatggctgcgcacatacgtgctgcagtgtacaggcgactgaagtgcacgcgtcgcaggatgagcactaactttggtagcttggtgtatgccatggttgcgatatgatatattattgtgaaacaggaacctctagcggttattagtttatagatattcaagtttgccaatgaaacatccagaatagcatatgatgcattttacaccccttacacccgatcactcggaaaacatctagcacgctgtaaattactccctcagcaatagtaattattgctgttactgcgctgcactgcttgggaacactccttttcaaagccacattttataatacactagcacaatgtttg

SEQ ID NO: 212880 - DNA, 1586 bp, Zea Mays
atccggtaaggcgacgaaatgtacggcgacacaatgaagggtcaccaacccaaaggggacaagggcaatagggacgactacaccttcaattcagaaggctcgcggatgtctggccgacatactttcccgaggaggccgaggtcgggctgtcagaatccgaccagaaggtccgcctcaccaccgccctggctgatttcttctccacgcccgagatggcggaagtccttcgctcacgggttgaagatgatggcaacgacatcttgtgtcttccaattgatttccagcagcttcaggagttacgcatgtttattgaagataaactcaatgagtccccaaaagaagccttgctttgcatgggagttgcagctcatctggctctgtgctcggacaaggacaacaaaaggaacaagataaatatcaggctttacaacacgggagcagctattgcattaaagaaactaaaagcagcctttattaagaaacttgtcacagtgcgtggtactgtgctcaaagtcagcactgtaaaacctcttgttttgtggttgaaattccgatgcatgaagtgccgtaaagaaataccccgtgtgttttgtgatggaaaattttctcctccaatgtcctgtaccatccagggatgcaagagcagaagctttatcccagatagatctagtgcacagctgatggattttcaaaaaataagaatacaggagcttgcaagcgctgacaaccatgaagaaggccgagtgccacgcacagtggagtgtgagcttacagaagatctcgttgattgttgcatccctggagaaattgtaacggtaactgcaattgtgaaagtgctcaacaaccatatggatgttggtggagggaagtccagaatcagcagtcaaggtttatactacctgtatctggaggcagtttcagtgagaaagttgaagtcccatgctgtttctgacaaagaaattcaagctagtggaatttgtcattctcagtcttctactgtaaatgatgattttgctgtcaaatataaagaaaaatatggcaccgatgtttttcgcagaatacttcaatccttttgtccctctatctatgggcatgaacttgtaaaagctggtatcacacttgctctttttggcggtgtgcagaagaactcaatggatcaaaacatggtccctgttcgaggagatattcatgttattgtagttggtgatccagggctaggcaaaagccaactcctccaagctgcagcagctgtttccccacgaggaatatatgtatgtgggaatacgacaacaaaggctggcctaactgttgctgtggttaaagattctatgacaaatgattatgcatttgaggctggtgccatggtccttgctgatcgtggaatatgctgtattgatgagtttgataaaatgtttacagagcatcaggctttacttgaagccatggagcagcaatgtgtttctattgcaaaggctggtcttgtagcaagtttgtcagctcgaacttcagtgttggcagctgcaaatcctattggtggccattatgagtgcttggctggttaaggccgggccgacggcggcggttgc

SEQ ID NO: 212881 - DNA, 1630 bp, Zea Mays
ttaattaacggtgaagtagttggagttgataggttcccaatcaagtgacggttacattcttatcgtaaatagtttttgcacaaacagagcggaaaaaaggaacagtttttgtggaggtgactcctcgcctgtgtcgtcaaatcctccacaccctggactggagtggctgctgctcgtggccggcgatgagcggcggcgggcccggaggtgcgtgcgggccggactcccgcgtggagaccatctcccggctggcgcagtggcgcatcgataccttcggcccctgctcctaccgccggtcggacccctttaagctcggcatctggaactggtacctgtcggtggagaagagccgctccatcgttgtgcgcctcttcccggagcccggccgggtggccaaggagcagccccctctcgcgcgcttcctgctccgcgtctcctgggccggcccgccgcgacgctcctgcgtctcccctgtgcacgagcatcttctgcgtaccagcgatgattttgtatggcaagtcgatgcgatgtcccatgggcgttttacgattgatgttgagtttctagacctgaggatagccacgaacaatgcaagctacggaatcgtcatcggtgtggccaaacgaaggcatggtgcagaagatcgcgagcaagagcgccctgggctgcctgtcgcgcatgctggcggactccatccacgcggacgtgaccatcaacacgacggacggggtgctgaaggcgcacaaggcggtgctggcggcgtgctcccccgtgttcaagagcatgttcgtgcacgacctgagggagaaggagtcgtcgacggtggacatcggcgacatgtgcgtggagtcgtgctcggcgctgctgggcttcgtgtacgggacgatcgagcagggacagttctggaagcaccggctgccgctgctggcggcggcggacaagtacgggatcggcgacatcaaggactgctgcgaggagagcctgctggaggacataggctcgggcaacgtgctggagcggctccacgtggcgtggctgtaccggctggagcggctgaagaaagggtgcctcacctacctgttcgtgttcgggaagatctatgacgtgagggacgagatgcacggcttcttccaccacgcggaccgcgagctcatgcacgacatgttccaggaggtgctcagcgtgtggaagcccatgtgaatggaagtgtccctttccacgcgagctgtgtgtgtgtgtgtgtgtcgtgcttgttcagtcagcagtgtgtggagagcatgctggttatgcatatttgaaacgaaaaggatgctcagaatttgaatggaagctaaattatacatgatgagacagacagtgaggtagtcaatccagatgtgttcaagtctaatagatcttgtgtgggtacgaatggaagcagccaacttgggcttgaatgctccctagttggctgagaaatgttgacattgtttgttctagatgagggttacctggcctgggaaatgttgtagctaggctagatgttgaattggtagcaaggtatgtatgtatattgaatttgtcgtgtgtcatggacagtgggcgtttgctgatgatgacaggcagcaggagaagacggagttgtgatttg

SEQ ID NO: 212882 - DNA, 1736 bp, Zea Mays
gtgtcaccgagcgccaaaaacagaaaaaacccctgaactccgaagacgggcagggcaggcaccattggcatcagccatgccgccggcgccgccaccgcaacaacctaagaatcgcagccgtgttcccacgccgaccggagagaaccgtcggcctcagcgtcggatggagagccggaacgcgtcggagcgggccgcgttcttcgcgcggcgagaggcagcggcggtgctccggcgcgtgcttcgcggggacgccaccaggcgcgccgccggctccataaaatcccttgtatactccccaaccgtccgcaacaagcgcgccaccttcgctctcgtctgccagaccctcaagtacctaccaattcttaaagaggttttagcatcgagtgaaatactgagcagcaaatggaagaaacaagaggaattggtttatgtgactacctatgacattctctttggtcagggaattgcggtttctgggtcagtcgagcaattaattatgctacaaaaggattctcttaggactactcttgataaagtttgtgcgagaaagagagtccgctgcgttgaagacctattgagcaataaatcagccgtcaaaccaaagccccgatttcttcgtgttaacacactcaaggtcactacagagtctgtcattgaagaattgaacaaaatgcacatggttgacaaagatgaaatggttccagatatgttggtactcccacctggaactgatttgcataaccatccgttggttacagatgggaaagtgtttttacaggttattgatgcatgtgcggctccagggaacaaaacagtccaccttgctgcactcatgaatggagaggggagtattatagcttgtgaacttaacaaagagagggccaagacattgcaacatactgtcagaagatctggagcaaacaatattcgaatagttaatggcgactttctggaagtagatagaaatgatccatcatatgctgaggtccatgctattctattggacccctcgtgctctggttctggaatatctacagagagacttgattatttgcttccctcacattctagagatagtcaggatgatgcgggtacaagctcaagggtcatgaaactctccgcttttcagaagaaagctctctcccatgctctatcatttccgtcagtggagagggtggtctacagtacttgctcaatccaccaggcagagaacgaggatgtcataaactctgtcttgcccttagctacatccctcggatttgagctcgctacaccgttccctcagtggcaccgccgtggccttccagttttccaaggatctgaacatttgcttcggacggatcctgaagatggcctggagggcttcttcattgcattgtttgtcaggaaagcaggccctacttcagaagagcctagcgaagatgccacggtagaagtaagaaccaaacaagtgcgcgggaggcgaaatggggtcagggcgttcagctccttgaggctgtccaggatgatcctctggtgaccaaaggcgttctggatttaatttgatgtatcattgctatttttggtagtcaatgtggtaacaggtaggtttgaatctgttctgaattttggactcatttttttcttctactccagataatatgttgccatactccatgtccatttcagattataagacattttagctaatatatatatatatatatatatatatatttgtcatcgaaggtgatgta

SEQ ID NO: 212883 - DNA, 2444 bp, Zea Mays
atttcgggactgttcctcattcacgtgtctcctcccctcccctcccctccccttcccccatgacctgtccgtctcaatctccctcttccccgcaccaaatcgaagctacccctgttcctctgcgatttgggctcgtcctgtgtccttcctgttgctcaaaagctcgctcattcgatgtccctgtctgaaaggcgacaaatcccactggaattcggagcacagagctttgaatccaggggccaaaactttttgctcatctcccttgcggaaaagcgcctcctctgcgtctgaaagtcggatcttttttcacagattcgatttgaagttcccgagcagctcgaggaccgcggtgtcggtaagacttgctttgaagatcttgatcaccacaagagatttgctgaatttccggtcactgtactttttccactggacatgtcctttcgcagcatagtccgtgatgttagggaaagctttggtagcttatcaagacggagccttgaggtcaggatttctggtttgcctggtctgtctggtggtcatcatagagggaaatctgttggatctgtgagtgacctgcgcgacagacctgtagtagttgatcaaagcaggtgggttggtcttcctcctgaattgcttcgagatgtaatgagaaggcttgaggaaggtgagagcaattggccatcccggaaaaatgttgttgcctgtgcagccgtctgtggaacatggagagagatatgcaaggatatagtgctgagcccggagttctgcgggaagctcacttttccagtatcacttaaacagccgggaccaagaaatggaataatccagtgtttcataaaaagggacaaatcgacatcaacttattatctttacctatgtcttagccctggtaagcatacaacatgtgcactgtttttctcattaatatccttctgaatgatcctacaaggtgacctcgaaatagagcagtaccggatttaacttctgcgtgtgccacgatgcatgcggatatacagtttcttgttccattaatgcttcttctcagttatctaacattgatgacaatggtaaatttaagaaggattagacttactctttgacacccttagtgagatcagataaactgttatcatgaataactttgcttaacgctttgatggtttggatcatctagttgtcctcagcgaggatgggaagtttctgctagcagctaagaggaatcgccgtacaacatatactgagtacatcatttctgtggatcctaaaagtatatcacgatcaagtgatggctgtgttggaaaaatgaggtggagtatcttacctgactacactatttctgtctaacctcaaatgatttttgagctgttttctgtttggacctgacattgtaatggcaacaggtcaaattttcttggcactaaattcatcgtgcatgacactcgagcaccacacaatgctgggagccttgtctcctgtgagcgcggcagccgcagaatctcctctaggagggtttcccccaaggtacccactgccagctaccccattgcccgggtgaactatgagctaaacctgcttggcacaagggggcccaggcgtatgaattgcacgatgcattccatcccagcctcaacgctggaccctcaaggcatggtgcctgagcctggccaacccaagcagatcttcgtccctggctcgtcgtccttcgaagattcctttcgcagtgcaaacaacaccccttccagctcaaggttctcggtcgcagaccgctccttggattggagctcctctcgattctcagagacgagcggattggctcagcaggacgacgatgacagtgaccaggctaaggagaggcctttggttctctgcaacaaggagccaaggtggcacgagcagctgcagtgttggtgcctcaacttccatggtcgggtgaccgtggcttctgtgaagaacttccagttgatagctgcaccacaactagattctgaaccgtcacagcaagctcagcagcaaacccagccttcgaattcgtcttcagcatcggatcatgacaaagtgatcctgcagtttggtaaggtcgccaatgacatgttcactatggactaccgatacccactctcggcattccaggccttcgccatctgtttgaccagcttcgacagcaagctggcttgtgaataaattgtacataaagaacaggaatacatgtagattgtatctctgcagtaagtatttacagtgtgtgtgctggtgtagtttattgccgcgttgattcagtcctttgttggctttagtctaagctcaaagctaagaatcggcactaattatgacttatgagctgcagttgtgtatcacttttatgtctgtaacttggtaacacgaattatcggcactaattatcacttttcagccttacacctgtgtaaagctatatattattggct

SEQ ID NO: 212884 - DNA, 1820 bp, Zea Mays
caatcattaacgagagtgctctggcctctggctagctatctcgtccggtcctgcatcaggtcgtagatatagtggggatagttttgttgttggtctggaaagaagagagggaaaaaaaaagatccatggcgacggaggaggccggccgtgccctggcgacgaaggcgaagctggtggcggcggtgctggtgctggagctgctcgtcgcgggcttccacgtcgtgtcgagggcggcgctcgacatgggcgtcagcaagatggcgttcctcgtctaccggaacgccgcagccctgctcgtggtcgcccccgtcgcctacttcctcgacaagaaagataggccgcccttcacgctacgcttgctgatggacttcttcttgctggctgcagtcggggtaaccttcacacaggggctctacatcctcggcctgtactacctgtcaccaacctacgtctctgtcatccagaactcagtccctgcgatcaccttcgtcatggccgctagtttgagaatcgaacaggtaaatgtgaggagcagatacgggctggcaaagatgctaggcacggtggtcaccatagcgggggcaaccgtcataaccctctacaaagggacgccattattgacagaaacagctcatgcagagggcaccacgcacacgctggaaggcacccacacgctcggaggatgggtcgcaggatgcctcatcatgttcgcgaactgcatttgcttgtctgcgtggatggttctgcaggtcccggttctgaagaaatacccagctaagctgtcgtctttcaccatcactctggcgttgggtttcgtccagctcgctgtcgtcgcgccgtttttcgagagcgacgttgagaggtggaagatcagctcaggaggcgagcttttcaccatcctgtatgctggcgttgtggtgcttggaatcgcctggtatctcatgatctggtgcataaacaaaggagggcctcacttcgtttccgtcttccagccactgcaaaccgtcatggtcgccatcatggccgccatcttccttggcgacacactctacattggagggtgcggtgatcatagtcgcgggtctgtactgtgtactgtgggcgaagagcaaggagaccaaaagcagcggcgatctcctagtccttcctgaaagaagccccgcgcagcagaatctcctccagcgtgaagattgaagcgagaccactcactgtactgtacggttctcggccggctgtagctgccccaacaagaaatatgggggtgtttggtttgagaaatcacttcatccaaaatgtggtggtgcatcatgagtccattactcaaatttggtgggatgaccttatgcctcatattagtactaactaaataactataagaaatggggtgatgatggatcaactcaatccattccacaaaccaaacaaaaaagtgaggagtgagaagacgatggactagatcattcctcaaaccaaacagcttatatattccttgtatcgtcagttggacaggccaatagatgatgtcgcctgtgcaaccttgttggccgagggccactttcgattttgtctattggttcttttagagcaaccatcccgatgcgatgacactgtagctctcttaggatgtgtttggttgcaatgacagaacgggacgggataggacgatctctcgaataaggttgtttggttcagagccaaaggttaggacataactatccgaatgttgtccccagttgtccctcaattttggagggacgggagaggacgccaggggacgtctctgtcctagcttgatgcaaataagaaattttaaaatttca

SEQ ID NO: 212885 - DNA, 1905 bp, Zea Mays
aaaaaaacggagacgtgcagcagtgacagcgtcatatgcatctaatctgctggccgccttccattccagtccacacacacacaacaatcattaacgagagtgctctggcctctggctagctatctcgtccggtcctgcatcaggtcgtagatatagtggggatagttttgttgttggtctggaaagaagagagggaaaaaaaaagatccatggcgacggaggaggccggccgtgccctggcgacgaaggcgaagctggtggcggcggtgctggtgctggagctgctcgtcgcgggcttccacgtcgtgtcgagggcggcgctcgacatgggcgtcagcaagatggcgttcctcgtctaccggaacgccgcagccctgctcgtggtcgcccccgtcgcctacttcctcgacaagaaagataggccgcccttcacgctacgcttgctgatggacttcttcttgctggctgcagtcggggtaaccttcacacaggggctctacatcctcggcctgtactacctgtcaccaacctacgtctctgtcatccagaactcagtccctgcgatcaccttcgtcatggccgctagtttgagaatcgaacaggtaaatgtgaggagcagatacgggctggcaaagatgctaggcacggtggtcaccatagcgggggcaaccgtcataaccctctacaaagggacgccattattgacagaaacagctcatgcagagggcaccacgcacacgctggaaggcacccacacgctcggaggatgggtcgcaggatgcctcatcatgttcgcgaactgcatttgcttgtctgcgtggatggttctgcaggtcccggttctgaagaaatacccagctaagctgtcgtctttcaccatcactctggcgttgggtttcgtccagctcgctgtcgtcgcgccgtttttcgagagcgacgttgagaggtggaagatcagctcaggaggcgagcttttcaccatcctggcgttgtggtgcttggaatcgcctggtatctcatgatctggtgcataaacaaaggagggcctcacttcgtttccgtcttccagccactgcaaaccgtcatggtcgccatcatggccgccatcttccttggcgacacactctacattggaggagtcataggtgcggtgatcatagtcgcgggtctgtactgtgtactgtgggcgaagagcaaggagaccaaaagcagcggcgatctcctagtccttcctgaaagaagccccgcgcagcagaatctcctccagcgtgaagattgaagcgagaccactcactgtactgtacggttctcggccggctgtagctgccccaacaagaaatatgggggtgtttggtttgagaaatcacttcatccaaaatgtggtggtgcatcatgagtccattactcaaatttggtgggatgaccttatgcctcatattagtactaactaaataactataagaaatggggtgatgatggatcaactcaatccattccacaaaccaaacaaaaaagtgaggagtgagaagacgatggactagatcattcctcaaaccaaacagcttatatattccttgtatcgtcagttggacaggccaatagatgatgtcgcctgtgcaaccttgttggccgagggccactttcgattttgtctattggttcttttagagcaaccatcccgatgcgatgacactgtagctctcttaggatgtgtttggttgcaatgacagaacgggacgggataggacgatctctcgaataaggttgtttggttcagagccaaaggttaggacataactatccgaatgttgtccccagttgtccctcaattttggagggacgggagaggacgccaggggacgtctctgtcctagcttgatgcaaataagaaattttaaaatttca

SEQ ID NO: 212886 - DNA, 4967 bp, Zea Mays
ggttcaagctgatcaatctaatgttgatgtgtccttttttccttttttggttgtgtatcttgatatcagcgtggtgaccgactcccgcctgaagttcttgaattaattgtatctggtcggccacctgattcacaaggacagcagcaagtttcgggaccccaggtaacacataaccgtgaaagacctactgtaagcaatgctgatgaacatggaaagcagatggagagtggtggtaaagctcctgaaaaacctgcattgttgaaaggaccctgtttaccaaaggtggaggtttctacttcagaagacaaagctagtcctgccagtggtcctggtcccgcgcaagtgatgaaagcttcaccaaaagagcctcttaaaattggaccagtgtctgtaccagaacattgtaacactactgtgattaaatctgagcaggatctggaacggaacatccagagaacacctgggcgaagtgattacaatgctgagaggggtaaatctgtaccagcagaaagtggttcagtggatgttgagcaggcaaaaaggactggctccacaagcagtgcccctgttccaagagatgttcccagaaaataccatggcccattattcgatttcccatccttcactaggagacacgattccatgggatctgcaaattacaacagcaatctgtcactaggttatgatgtgaaagatttattagctcaggaggggatgatagttcttggtaggaaacgtgaggataacttaaaaaagataagtggtttgcttgcaatcaatctagagaggaaaagaatccgacctgatcttgtcttgaggctacagatcgaagaaaagaagctcaaactcctagagcatcaggctcgtctaagggatgaagttgagcatgaacaacaagaaatcatggcaatgccagataggatatacagaaagtttgtcagacaatgtgaacgccaacgtgttgagcttgtaaggcaagttcagcagatgcagagagcttcaagagagaaacagctgaaatccattttccagtggcgcaagaagcttttggaggcacattgggccattcgtgatgctcgaataactcgtaatcgtggggtggccaagtaccatgaaaggatgttgagagaattctcaaagaagaaagatgatgaccggaacaaaagaatggaggcattgaaaaacaacgatgtggaaagataccgtcaaatattgttggaacagcagactagtgttcctggtgatgcagctcaaagatacaatgttctatcttctttcttgacccagactgaagagtatctttataaactaggaggaaaaataactgctaccaagagtcagcaacaagtagaagaggcagcaaatgctgctgcagcagctgcacgggcacagggcctgtctgaggaagaagtgaaggctgctgcacaatgtgctggtcaggaggttatgataaggaacacattctctgagatgaatgcaccaagggataatacatctgttaacaagtactatactttagcccatgctgtgagtgagagagttactaagcagccatcactgttgcgagcaggaactttaagggactaccaattggtgggcctacagtggatgctttctttgtacaataataagttgaatggcattttggctgatgagatgggtcttggcaagactgtacaggtcatggcattggttgcgtacctgatggaatttaaagggaattatggccctcatctcataatagtgccaaatgctgtcttagtcaattggaagagcgaactgttaaattggttaccatctgcatcttgtatcttttatgttggtgcaaaggaccaaaggcagaagttgttctctcaagaggttatggccatgaaatttaatgttcttgtaacaacatatgaatttgttatgtttgatcgttccaagctttcaagggttgattggaagtacattataattgatgaggcacagaggatgaaggacagagactccgtcttggcgcgtgatcttgatcgctatcgctgccagcggcgcctccttctcaccggtactcctctacagaatgatctcaaggagctttggtccctcttgaatttgttgcttccagaagtatttgacagtagcaaggcattttcagattggttctctaagccttttcagagggatggtcctacacataatgaagaagaagacgattggcttgagacagagaagaaagtaataataattcacaggctgcatcagattttggaacctttcatgctacgtaggcgtgtggaagatgttgaaggatcacttccacggaaggattccattgttttgagatgcagaatgtctgccgttcaaggagctatatatgattggatcaagtctactggtaccattagagttgatcctgaagatgagaaaaggcgtgcacaacggaatcccatgtaccaggtcaagacatacaagaatctcaataacaagtgcatggagctgaggaaagtttgtaatcatcctctgctgtcatatccattcttaaatcatgggaaagattttatgatcagatcttgtgggaagttgtggaatcttgatagaattttaattaagcttcacaagtcaggccatcgtgtacttctttttagcaccatgacaaagcttcttgacatcatggaggactatttgcagtggagacgacttgtttataggcgaattgatggaacaacaagcctggaagatcgagagtcagcaattgttgacttcaacaggcctggttctgattgttttatattcttgcttagtattcgtgctgctgggaggggtctgaatcttcagagtgcagacactgtcgtaatatatgaccctgatccaaatccacaaaatgaggagcaagcagttgctagggcccatcgtatagggcagacaagggaggtaaaggttatttacatggaggctgttgttgataacatatcaagttatcagaaagaggatgaattgagaaatggagggagtggagatttggaggatgatcttgctggaaaagatagatacatgggatcaattgaaagtctcatccgcaacaatatccaacaatacaaaattgatatggcagatgaggtcattaatgctggtcgttttgatcaaagaacaacccatgaggaaagacgaatgactctggagacactcctgcatgatgaagagagatatcaagactctgttcatgatgttccttcattgcaggaagtgaaccgtatgattgctaggactgaaagtgaagtcgagctttttgatcagatggatgaagactttgattggacaggtgatatgacgaagcatcatcaggttccaaagtggcttcgtgttaactccaatgaagtagatgctgtggtggctagtctgtccaaaaagccgtcaagaaatatgtcatctgggggcattgctttagacactaacgaaacacttgagaaaagaagggggcggccaaggggtacgggcaagtactccatctacagggagatcgatgatgaagatcttgaagaatctgatgaagattctgaggagaggaatactgcatccctacctgaagaaggggaagtaggggaattcgaagatgaagaagacaatgatgactcagtacctgataacaaggatgaatcagaggaagaagagcctatgaatgatgatgtatatgaatttactgaaggattaagaggcagaaaagctaataggatggaagaagctggttcaacaggctcttcttctggaagcaggagattaccaccacctgtaccttcctcatcttcaaaaaaattgcggtctctatctgcattagatgcccgcccaggcactttgtcaaagagaactccggatgacctagaggaaggtgagattgcaatgtctggggactcacatatggacctccagcagtcagggagctggaaccatgaacgtgatgacggtgaggatgaacaagtactacaaccgaaaataaaacgcaaacgaagtattcgtcttcgtccaaaacctaatgcagaaaagcaggaagatagatctggagaaggggccttccctcagcgtgctgccaggcagcaagacgcggttcatcctatagtgaaacagaagcgcaacatgtcatctaggaaggtttcaccggcttctaggtctgggaaattgagtcacttgtctgggtctggtgaggggtctgctgaactctccaaggaaaattggagcagtaaggccattgattccactgcccctgagttcggtggcacaaagatgtctgacagtatgcaaagaaagtgcaaaaatgtgataagcaagctttggaggaggattgacaaagaaggtcatcaaatgatacctaacatatcttcttggtggcggaggaatgagaattcgtcgttcagaggtccggctggtagcacacttgacctacaaaaaatcgagcagcgagtcgatgggttggagtacggcgctgtaaccgagttcatagcggacatgcagcagatgttgaaaagcgtggtccagcacttcagctataggcatgaggtccggatagaggccgagaccctccacaacttgtttttcaacataatgaagatcgccttcccagactcggacttcatggaagctaagaacgccatgtcgttttcgaatcctggaagcggtgcgcattcggatcatcaagcgggggcaagctcgtcagcacccggcatcggagacatccagtgggcgaagcctgccaagaggctgaggaccgacagagcaggcagaggcggccgagcctaacggttggttcttctttagcgtcatatggatgtgtaaatgcatccacgtagcggatggaggcgtttgataataatcgtcagtgtatttagttcatcgtcctagcaagtcaaactttgctggcagtttttaaaacagttttttaaggaaaatcaggttatatttcagacctctttaattaatttgctggttcgttccta

SEQ ID NO: 212887 - DNA, 906 bp, Zea Mays
caaacttgaaggcgaatggctgcgggggcgccggaacaacaaccaacttcttggacgtccccggaatcgccacatggctgacggccaggaatcaaggaccgcatcgcggaaggtaagaggaggtttggccttctggagcctgctccttccagaatccggcgagggtgatgaggtcagactggagtccttccaccgctcaaaatggaagcggccacaagaaccaaaggggccaggctcagagaacaaaggggaggtggaaaccaacgtcgagagaaaagggggccaccgcaaaaggcaatcaaacaggacctcagacagagtcaacgcatacggtggtctaagacgagacgatgcgggtaaccaaacatatggtttgtgattcagtccagactcaccgctgaatagagggagtggtaacccaatgggtgacggatctagaatttgactatagggtgatactatctaccatggctagtgcatcacttcttcagtcccgtagtgaatagtgattgagtagaggctggtggactcagttaaatccctcttatgcttttggtgaactgagatggttatcaaactagctatatttggacttatcttgttgtaagactttttaaatatgttgtttatctatcggatttggaacatgtaatatactagctacttatgaacctgaacttataaaataaatgtaatatactagctgtacatgtgaatctgaacttataaaataaattgtgttggatgtatgttgacgtttaattatgtatgatcttggttatgatgttgattatttgagatctttcgtgatacatgatggactactaaatttatacgagactaagtgcaaacgagcatatgtctcaatagtagccgttatatctgtgttcgtgttattgaacagtt

SEQ ID NO: 212888 - DNA, 3484 bp, Zea Mays
ccatactggtggacaccgtctcaccgctactgctaggatcatagtcgtctccctgtcctcccacctctgcccacggtccacgggacgacatccagtccagccatggtcggccccgagatgctcgtcgccgcgacggtgaaccaggtcgttcggaagatcaacgagatcatcggcgtcgcgcagggcgagacgaagctgtgctgcagcttcagcgacgacctcgagggcatcaaggacaccctggtataccttgaaggcctcctcaagaacgcggagagcaactcctttgggagcgatagggcgaacctgcggcactggctgggccagatcaagtctctggcttacgatatcgaagacattgttgatggctactactcctccaaggagcaatatgagggaagcaactatgctcagaagggatctttactctgctctttatccaatcccatgctttcgaagataaatttgaaagagcttaccattatttccatagttgggcctgtgggccttgggaagacaacccttgcacaacttattttcaatgatgcaagagctgagacattcagattcagaatatgggttcatgtctccatgggcaatgtcagcctccaaaaaattgggagagatatagttttgcaaactacagaaaaaattgagggaaacatgcagatgcagtcaatcaagaatgttgttcaagacatacttaataagtatagttgcttaatagtgttagatagcttgtggggaaaagatgaagaagtgaatgagctgaagcagatgttgcttacaggtagaaagactgaaagcaaggtcatagtgaccactcacagcagtaaagtagcagagctgatatccactgtgccaccatacaaactgtctttgttgtcagaagatgattgttcagctatattctgtcaaagggcaattgcaggtcagtctatcagtgacccacttttcagggaatatggagaagaaattgttaggagatgtgaaggcatgcccttggtagccaattttcttggatctgtggtgaatgctcaaagacagaggcgtgagatatggaaagctgcaagggataaagacatgtggaagatagaggaagactaccctgaaaacaaaattgtgccaatgtttccatctttcaagatagtatactacagtatgccccatgagctaaggttatgctttgtctactgttcaatctttcctaaaggatatgtcatagataagaaaaaacttattcagcaatggattgcacttgacatgattgaatccaaacatggaaccttgccgcttgatgttactgctgagaaatacattgatgaacttaaagatatttatctccttcaagttttagagaggcatcagattgatgcagaaatatccaatacttctgaagaaaagctctacatgaataatttggcacatgatcttgctaggtcagttgctggtgaagatatccttgtgatcttagatgctgagaatgtacgctgcaatagaaattatgattaccgttatgcacaagtgtcaacttctagcttacaatcaatagatagcaaggcttggccttccaaggcaaggtcactagttttcaagtcaagtgcagaattgcagcatgtcagcgaagttctttcagtgaacaaatatttgcgtgttttggatatcagtgggtgttctgtgaaggagatgcccgctccaatttttcagatgaaacaactgagatatcttgatgcttcaacattgtccattgcagatctgcctccccaaattagtggctttcctaagctacagacactggatctgtctgatactgaagtaactgagctaccagccttcattgccaacttaaagagactgaattatttgaatctccaaggttgcaagaaacttaagcagttgaataacctagatttgctgcatgagttacattacctaaacttgtcacgttgcctggaagttagaagttttcccgcatctctgaaaaatcttaggaaacttcgttttctgaacctttcgcaatgttctaagcttccaacattacctgatgaattattgcaatcattctctagtttttcttccattgtggatttaaacttaagtggatttgagttccaaatgctacctgacttttttggcaacatttgttcacttcagtttttgagtctgtcaaaatgctcaaaacttgagctactcccccaatcatttggtcagcttgcatatttgaaaggtctggacctttcattttgttctgatcttaaactcccagagtcctttaagtacctttcttctcttcagtttctaaatctatcacactgccataatgtagaatatctgccatcttttgacaaacttagtaatttggagtatcttaatttatcacaatgtgctggactcaaagcattacctaagtcactttcaaaccaaaaaaatctccaaattgaggtttttgggtgccaggattgcatagtgcagtcatgttatttaagcccacagtcccatacatgctcacaagaagtcaaggaagttggatcaagtagtgatatctcagataccattctaaaggagtctgcaaacagagatgtggcattaggaataagttttccagaaattgatgaagttggttatccacataataatctgaaacaaaaattgacattatcttatcatatggatggacataaaagtgaagagcctaatttcattaccaagcagaactcaactacagagacggtacaactaacccccaggcaccagttcccatcatctacatgtcgtatttcttcgattgcatcaagttctagtgcactatttgcatctggctcctcttcagatgtctcgataacttacaatccagtgtccaatgacaaagcaggcaatcaaacaggacctcagacagagtcaacgcatacggtggtctaagacgagacgatgcgggtaaccaaacatatggtttgtgattcagtccagactcaccgctgaatagagggagtggtaacccaatgggtgacggatctagaatttgactatagggtgatactatctaccatggctagtgcatcacttcttcagtcccgtagtgaatagtgattgagtagaggctggtggactcagttaaatccctcttatgcttttggtgaactgagatggttatcaaactagctatatttggacttatcttgttgtaagactttttaaatatgttgtttatctatcggatttggaacatgtaatatactagctacttatgaacctgaacttataaaataaatgtaatatactagctgtacatgtgaatctgaacttataaaataaattgtgttggatgtatgttgacgtttaattatgtatgatcttggttatgatgttgattatttgagatctttcgtgatacatgatggactactaaatttatacgagactaagtgcaaacgagcatatgtctcaatagtagccgttatatctgtgttcgtgttattgaacagtt

SEQ ID NO: 212889 - DNA, 3061 bp, Zea Mays
attagctgagctcgtacacggccggccctctctcggtgcgtgcgtttgcgtggctgtggcaatatacggtgcgtgtggggcggcggcgacgagggttttgctgctccgtacaccgcgtgcagcggcgacgcgaccgcagctggtcgccgccccggatcgaggagggggaggagccggcggaggcccctgtggtggctgcgggggcgggagcgggagcgccatgaggggcggtggccgtggcggcggcgggaggcagccttcctacgcggcgccggacggggcggatgcggcggcgatcccggtcgcctcaaggaagatggtgcagagcctcaaggggatcctggccgaccgctcggagggcgagatctacgccacgctctgcgactgcggaatggaccccgacatagccgtcgagaggctcatctcccaggatacttttcatgaagtcagaagaaagcgggataggaaaaaggagactaaagttaatcacgaaacaaggcctcgacctttccagaaatatacataccgaggatataaggctgtttcagatcgaagtgggcgagaccctacaggcggtttcaaaggccctgtaaaaaaggaaccagagatgcaagctccactaaactcatcagccttggatgtcaagacaagtgacactacagaaatattttctgctactatcaatgttgcccagactgatgctaagaacaccacttctcagcctttatctaaagtgcagcatggttggggtggtattccaggtcgcccttccatggctgaaatagtgaagatgggcaggcctcaagctaaagttgggagcagatctgttgcaagtagcactgcgttgccaaccgttggtgattcagtcatttccaatacaccaaatcttgtgcctgaggaatataacagaactgtttttgcatcagaagcaggccatgtcgcagcagataaattgccaaacggtgctgttgaggtgcactctctacctaaagatgcttccgcatttgatatgttaccttcagctgagggaacagatgttgaagccccttccatgagtgctaatgcacaagggtcatcaacgccagatgccaatgaagatgacattgaaaaatatgcaaatttggaagagggcaatacagaaagcttgatatctcctggacaagtttctgcttctggtaaagatatacaatcagaatatactgaagttgtcagccatgtggatgaaggctcgatagagaaaacaaatgactttcagctcaatggccttccatttgagcacaaccaaaatctgaatggagacgtgtctacagcgacaacacaatttgatcatttgactctgcatgagggaccaaaattgtccgatgataatccggctgtaataattcctgatcatcttcaggtttcgaatgctgattgtgcgcatttgacgtttggtagttttgtgtctggaacacttgattcatccttgacaacaaaacctcttgaaagtcatggggatgctgcggcagttcctgatgatgattcaattgaccaatcagatggcagcaacgaggagaatcttgatattacatcagtacagcaatctgaagtcactagagctgatttcttggatgtcacaagcaatactgaatacaacctaacatcaactccagattatgcaacttcaagtgcaccgttgcaagattctgcttcacagagtttacaggaaaaccgacaattccagaacatctctcctttctcaagcttcatgcaaatgcaaaatggtctcctgccaccagcaattccaccattgcgtgaatttgatccagcattttcactattgctcacccatcctcctatgatgcatggtacaatgtcatcatccatgagcaatacaactgtttctacgcagccccaagagaatgccaatccagttggtttacccaaccctcaattgactcaatctcagcaaagcaccagcattgcttcagggcctccactccctcagcatcttcttcatccctatgctcaaccaacccttcctcttggctacgcaagcatgattggctatccatctcttccaccaagctatgcatatctcccgcctgccgcttttcagcaaccatacatgaacagtggcttgttccaccaggcagcagcggcagttcccacctcaagtgtgaaataccctctaccgcagtacaaaagcaacattgcccttgctagcttaccacagccaggctctttgctctcaagctacgttgggggctttggaactgcaagcaacatgcctggaaatttccctctgaatcaaagcacagcagcagcaacaacaactcttgggtttgatgggacggtcccttcacatttcaaagatggaaatcaatttatttctcttcagcagaatgagaaccctgcaatgtggatgcatggtgctagttcacgagggatgcccccacttgcagccagtaccatgtatggctatcaagggcagagtcatcaggccggccttcggcagggccaactaccttcacaatttggctctgcgcttgggcagtcacagccaggcctgggccctgaacaccgaaaccctagcgatagtaacctaagtggcgctgctcaggctaaccaaatgtggccaaatacctactgatccatcccccttgtcgacttctgtggaaggcggtcctgttgtgtgtgcaacgccggtgaggccatgcagtgcttgtgttctgatccaggcacgcggataccagctgtgcctgtgcgcatgagtcgctgtcgtgacattttgaggcacaagagacatatgttcgagcatgctctacctgtagggtttctaggatatggcaaaagaaaatgtagctcgatctatttattcaaattctgatagagaaaggacttcctcttttctattttattctcttttgtcattcacatatcatgtgacaaataaaaccgaaatatctaacagcagcgccattagttcccgaggaagtgaaactttacatcacaggtattgcgtgcctcttggcttcaattttatgattgaggtgattaattgatggatgagcatttccca

SEQ ID NO: 212890 - DNA, 2117 bp, Zea Mays
cagacagccaaaattgagagtgacaaaatagcaaatttctccacacggacacagcagcgagagaagagagtccactgtccaccccaccagaaaaacgcattccgcagacgcgcggcgagggagtaggaggggacggcgggtgccgaggcccgcaggcacggggaagctacctgcttgcgtagccgggcgggctcgcgctgtgctgtcgctccatgtcggtcgccggcgagagcggcggggatccggcggcggcacgccgccggtgggatctctccaacaagggccccgacagcactccaatgttgaaagaggctgtggaaatgtctacagatgaagaatcggatggcgttgttatatgccatccgaatggtaacactgatggatgtgacgaagccattagtggcagtcatgatgatgatagcccagaaggccaggaaactagttccatcaaggaccctgatgtagaaggtgacacacaggaagacaagtgtgtaaatcaagattcactgaagttgattgatcaagagacgtctgctccccccaagtccccagcgaagtccgcgactgcgagttctggaccagagaagcctaaacgtgttgtcacccaaccattgtctctttctactcaacgaaggtcatctggagtaaatggtggtgtgaccaatccatcacccaataaggataaatctggtgataaaagtagcatctctccagcaagcatgacaaagaagtgtacgccgttggcacctaggaagactttgcagcctgagcaagcatttcaccctctggaagaggactcttgttctgtgacttcctcgtatcctttttctgtgtgctaagattttgttgagcatctcatccctttttatgctatttcatagctatgcagctaatatttttaactttcggtatataaccttcggatgtttcatacctatacttacataaggatggaatagtaaatattcatgtttgtagatgaccataaaatcacatggtgtttttctcttaattaagcaccagattcttcgatgtttcacagtaaataatgatgaacgctcatactcatgcacttctcttctgtgaacatgaaaaagttttcaaaacgatgcttttctgtatctactgaacttacaatgttttgtggtgctcaatattttttcaagatgatgaccatttcatagttaaatgtttaaattcagaaacacatgaattttacaagtgttctgagttgcatgtggcccttttcctaagctgtgtaaaggactacaacatcatcaagagctggcagaactaagacaactgttcctgttgccccatcatttgtgtgtgctaaccgtgctgacaagaggaaggagttctacacaaaattagaggagaaacataaagctttggaagcagagaaggacgaggctgaggccaggaaaaagagcaagacgttgctataaagcaactaaggaagtcattggtgattagagcgaaacccatgccaagcttctatcaagaaggccccccaccaaaggctgaacttaagaaggtgcctcctactcgtgccaaatcaccaaagtttacaagctcaaggagaaagagctgcaatgacacaccacagacacccgagggaaaaaacaccaacgcaacatctaccacccggccacatcgtcacagcatcggggcttctaaagatgccagcagagtacagtgctcgccgaagagcggcgtggcgaccaaaactagatctgtcaagcctgagctgaaggccctctgaagcgcatgcgtagcattcaagtgctgcgattgtctctgtacaaacagaatcgcctgactcttagccgtttccatttgcatgcattttttttgttttgttttgttctatacccagcatctccaccaaaaagaaggctgtagggccaatgacgttgttcgcgctgctggaccttgtctccattttcgtcttgtactcgttaagaactctgttgctgctgggaccatgtgacattcattccatgtaaattacctggggatcccggtagggagctcgactggtgttttggtcttgtgaagtcctcaatgccttaactaatctgtgagctgaaaaactatcgatttggcattgttac

SEQ ID NO: 212891 - DNA, 2121 bp, Zea Mays
cagacagccaaaattgagagtgacaaaatagcaaatttctccacacggacacagcagcgagagaagagagtccactgtccaccccaccagaaaaacgcattccgcagacgcgcggcgagggagtaggaggggacggcgggtgccgaggcccgcaggcacggggaagctacctgcttgcgtagccgggcgggctcgcgctgtgctgtcgctccatgtcggtcgccggcgagagcggcggggatccggcggcggcacgccgccggtgggatctctccaacaagggccccgacagcactccaatgttgaaagaggctgtggaaatgtctacagatgaagaatcggatggcgttgttatatgccatccgaatggtaacactgatggatgtgacgaagccattagtggcagtcatgatgatgatagcccagaaggccaggaaactagttccatcaaggaccctgatgtagaaggtgacacacaggaagacaagtgtgtaaatcaagattcactgaagttgattgatcaagagacgtctgctccccccaagtccccagcgaagtccgcgactgcgagttctggaccagagaagcctaaacgtgttgtcacccaaccattgtctctttctactcaacgaaggtcatctggagtaaatggtggtgtgaccaatccatcacccaataaggataaatctggtgataaaagtagcatctctccagcaagcatgacaaagaagtgtacgccgttggcacctaggaagactttgcagcctgagcaagcatttcaccctctggaagaggactcttgttctgtgacttcctcgtatcctttttctgtgtgctaagattttgttgagcatctcatccctttttatgctatttcatagctatgcagctaatatttttaactttcggtatataaccttcggatgtttcatacctatacttacataaggatggaatagtaaatattcatgtttgtagatgaccataaaatcacatggtgtttttctcttaattaagcaccagattcttcgatgtttcacagtaaataatgatgaacgctcatactcatgcacttctcttctgtgaacatgaaaaagttttcaaaacgatgcttttctgtatctactgaacttacaatgttttgtggtgctcaatattttttcaagatgatgaccatttcatagttaaatgtttaaattcagaaacacatgaattttacaagtgttctgagttgcatgtggcccttttcctaagctgtgtaaaggactacaacatcatcaagagctggcagaactaagacaactgttcctgttgccccatcatttgtgtgtgctaaccgtgctgacaagaggaaggagttctacacaaaattagaggagaaacataaagctttggaagcagagaaggacgaggctgaggccaggaaaaaggaagagcaagacgttgctataaagcaactaaggaagtcattggtgattagagcgaaacccatgccaagcttctatcaagaaggccccccaccaaaggctgaacttaagaaggtgcctcctactcgtgccaaatcaccaaagtttacaagctcaaggagaaagagctgcaatgacacaccacagacacccgagggaaaaaacaccaacgcaacatctaccacccggccacatcgtcacagcatcggggcttctaaagatgccagcagagtacagtgctcgccgaagagcggcgtggcgaccaaaactagatctgtcaagcctgagctgaaggccctctgaagcgcatgcgtagcattcaagtgctgcgattgtctctgtacaaacagaatcgcctgactcttagccgtttccatttgcatgcattttttttgttttgttttgttctatacccagcatctccaccaaaaagaaggctgtagggccaatgacgttgttcgcgctgctggaccttgtctccattttcgtcttgtactcgttaagaactctgttgctgctgggaccatgtgacattcattccatgtaaattacctggggatcccggtagggagctcgactggtgttttggtcttgtgaagtcctcaatgccttaactaatctgtgagctgaaaaactatcgatttggcattgttac

SEQ ID NO: 212892 - DNA, 1639 bp, Zea Mays
cagacagccaaaattgagagtgacaaaatagcaaatttctccacacggacacagcagcgagagaagagagtccactgtccaccccaccagaaaaacgcattccgcagacgcgcggcgagggagtaggaggggacggcgggtgccgaggcccgcaggcacggggaagctacctgcttgcgtagccgggcgggctcgcgctgtgctgtcgctccatgtcggtcgccggcgagagcggcggggatccggcggcggcacgccgccggtgggatctctccaacaagggccccgacagcacatgaagaatcggatggcgttgttatatgccatccgaatggtaacactgatggatgtgacgaagccattagtggcagtcatgatgatgatagcccagaaggccaggaaactagttccatcaaggaccctgatgtagaaggtgacacacaggaagacaagtgtgtaaatcaagattcactgaagttgattgatcaagagacgtctgctccccccaagtccccagcgaagtccgcgactgcgagttctggaccagagaagcctaaacgtgttgtcacccaaccattgtctctttctactcaacgaaggtcatctggagtaaatggtggtgtgaccaatccatcacccaataaggataaatctggtgataaaagtagcatctctccagcaagcatgacaaagaagtgtacgccgttggcacctaggaagactttgcagcctgagcaagcatttcaccctctggaagaggactcttgttctgtgacttcctcgactacaacatcatcaagagctggcagaactaagacaactgttcctgttgccccatcatttgtgtgtgctaaccgtgctgacaagaggaaggagttctacacaaaattagaggagaaacataaagctttggaagcagagaaggacgaggctgaggccaggaaaaaggaagagcaagacgttgctataaagcaactaaggaagtcattggtgattagagcgaaacccatgccaagcttctatcaagaaggccccccaccaaaggctgaacttaagaaggtgcctcctactcgtgccaaatcaccaaagtttacaagctcaaggagaaagagctgcaatgacacaccacagacacccgagggaaaaaacaccaacgcaacatctaccacccggccacatcgtcacagcatcggggcttctaaagatgccagcagagtacagtgctcgccgaagagcggcgtggcgaccaaaactagatctgtcaagcctgagctgaaggccctctgaagcgcatgcgtagcattcaagtgctgcgattgtctctgtacaaacagaatcgcctgactcttagccgtttccatttgcatgcattttttttgttttgttttgttctatacccagcatctccaccaaaaagaaggctgtagggccaatgacgttgttcgcgctgctggaccttgtctccattttcgtcttgtactcgttaagaactctgttgctgctgggaccatgtgacattcattccatgtaaattacctggggatcccggtagggagctcgactggtgttttggtcttgtgaagtcctcaatgccttaactaatctgtgagctgaaaaactatcgatttggcattgttac

SEQ ID NO: 212893 - DNA, 984 bp, Zea Mays
ataaaccagagcagcagagcgctctgtatcgttggttccgcctagggttttagcttctgccgccgtaacctcacctcccggcccttgtcgccgcaagtccgcaacctcaccatccttcgaatcccatacgaatccctagcccgcaacccgccgggcgacgagcggcggagcccgcagccaacatggaccggtaccatagggtggagcgggcgcggaaccagtcgaccatcgaagagaacgagatccgcatcaccgcgcagggcctcatccgcaactatgtctcatatgctaccttcctcctccaggaaaggagaattaaagagattgttttgaaggccatgggacaggcaatcagtaagtctgttgctgttgcagagattatcaagaaaagggcccctgagttacaccaggataccaacatcagctctgtcagcatcactgatgtctgggaacccatagaagaaggacttgtcccattggagatgactcggcatgtttctatgatatcaattactttgtcccccagagagctggacaagcacactcctgggtaccaagctccagcatatgttgaacatcccaggcaacagcaggtgccaccactgcagcgccaacctcgcagaccatcaggacaacaattccagcagctggagtatgaagattcctatgcacggggtcgaggaagagggaggggccgtgggcgtggaaggggttgggctagaggtggctatggtggatatggaaacaatcaaggtggctataaccaaggtggtgggtattacgacaatcaaggtggatatggtggctatgatgatcaaggtgggtatggtggtggatatggctacaaccaaggcagatatggaaactatcaagaaaatggtggatataaccgaggtagaggaggtggtatgcgaggaagaggcaattggggttaccgtggaggatgtggcttgccagtcgagccagcttcgttcttgagctcgt

SEQ ID NO: 212894 - DNA, 2600 bp, Zea Mays
cagagccagtctctactcgcctctctctcgcgcaagccacagtagagcaaccaaccataccaccggcccgtgtcgatctctggcctctctcgtgcaaggaattaagcaggcaagaggccaaccttcttccagcatggccaaggcgagcagcaggctgctcttctcgctctcgctcgtcgtcctgctgctcctcgtggagctgttgtgtgcagaccactacttctccccatggacaggctgacgccatcgactgcggcgcgagctgctcgtaccggtgcagcaagtcgggacggcccaagatgtgcctgagggcgtgcggcacctgctgccagcgctgcggctgcgtcccgccgggcacctccggcaacgaggacgtctgcccctgctacgccaacatgaagacccacgacggccagcacaagtgcccgtgatccatccaccgtggttcccagcatcagcagctttgccaaaaagacatgatacctacatatatataagagtacctagctgctgctgctctactaccttgttggttcattatattgtgcgcgtgcatgcatgaataaataaatgaacatattagggcatgtacaacccagatacggctgcacggtactccaagtacaagatacaactaaaacacaacacaatacagtggtcatgtctaaaacatgtgtcttacgatattcattgtaccaatcagagtattcaataaattaaagtgaccaatcagatagtctcctgtctcgaacatagagctaagacactgtgtcttcgtcaagatacgtgtcttgagtttttttacattcacccccctagacacaccgtaagacacaacttaaaatacccactgtacatgcccttatataatagtatatatatatatgtgatgtttggctggctgacgctgacgctagctgatacaatagtgagttagtgacagcatgcatgcatgcatggtaacttgaagcagcagcacttgtgtgcgtgtactactcgcgcatagtgcggcgttccagtggcattttccttggcacgccccacgagaaaaaaattaaagctcgctgctggtggtacacgggcgccttgtacgcttgctgcatgtgtgtgtgggatcgatcgacatgatgcgacgcgaccaccgcgcacactacagttcagttcagggcgcttccatcagtcgattacaatcgtggcaggcaggcaggccgatccaggagcactggagcaggcaaaagccagccatggccatgcaacgtggaacgctagctgcgctgcacgtggcagattagcggtttggcttgattcagcgctcggcggcgttaccgccgttcatccccgtacgtggcatcggtcggtatcgccagtcacagctccaacatcggtaggtagaggcatgcacggtcgtctaggctgctgaccagccgggcgccagaatcgatattttgaccgtacgtgttggtcccgtgccagtctgtattattaatcggtcgataccggcctaattgatcggtatagtctacttggtgccatgcgatacgttctgattagtacgcactattttaaaatttttatttttttaaaaaaaaataaaaatatttcgaaatctgatctataaatagtgtttgagttcattcccataaactcacacgtggaatttctctaacaccttacacctccttattatactcctctcacgctcgttccgttcgaataaaaattgttattgtgtctatctcggatatcaacatgaccgaagtagagttgtctgtgttgctgttagctaagtgggaggaaagaggatttcctagtaccatagagagtatagatggcatgtatatattggaagcggaggaactgtcctattggatggggaggacagttcacaaggaggacattaagtcaccgatcatcatgctcaaggcgattgccgcgtatgacttgcggatctaacatgttttttggatggtaggatcgaacaacgacgtgaacaagttcaaccaatcaccgttgttcgctgatgcactcaagggtgaagcaccaaatataaacttcgcgttgaatgggcacgggtataaccatgggtattacctcgacgatggcatctaccttctgtggctagtgctcgtgaaaacatttcacgttgaaggacgcacagaaggacatgatgaggccattttgggtgttcaaggcttgatttcatattctcacaaccccagatcgttttttttcactagatactcagcgtgatcatgcatacatgtatcattctacacaatataatcattaaggatgacatgaacaactataatacagtcgagtcccctgttgcaacaccaaccatcacccccgaagaaccgatgagctttgaagtcatccttcagcatgaggttgcactcgatacagcccgatacatgatcaactttaaaatgatttaatgggatatatttgagatttgtactataaaaattagattttattttttatgagtgtgtatttttaagtaatgtaagttttatgtattatgcaatgtgtaatttttattttaatttgacctatacattgtgtaatcttttaagtaatgtaatttttaattttct

SEQ ID NO: 212895 - DNA, 2616 bp, Zea Mays
acgctagctctgtatgcaaacatgcctgactcgcccgttcgcctatctcgcccccccccccccccccccccagcatcggagaacggagggaaccagggagctccggccgcctagaaccggagctcccaaatagatcgatccatcggtcgttgagcggacacggcaatggaagcccacgcctcgcggggccgccgcaccctggaggagatccggcagaagagagccgccgagaggatgcagcacgccctcccgatcgcggcgtctcacgtcgactctcacgggaaccaaagagccggagctgagcttcttgctcgagttcaagaacttgaaaatgggaacacggaattgattgatgagaagggagttgagaaggatgcccttgtaaaccgtttgaatgatctcgagcggaatgtagttccctctttgcaaaaaaacttgaatgacatttctttggagaaagatgctgctgtagttgctaaggaggatgctctagctcaactcaggagcatgaagaaacggctcaaggaagcagaagaagaacagtataaggcagaagaagactcagcctccttgagagcacagctaaacaccctgcagcagcaagtaatgggacactcttacagtggatatacaatgggaatatcgactgaggaatctgttgccatggaaaaggagatacaagatttacaggcacagctaaagcaagagtcactgctaagacaacaggagcaacaaaaattagctgaagagtcgcagctgaggcaacaagagcaagaaaaactagccaaagaacaaatccatattgcttctctggaggctgaaaagcaacagctggaagaccaaattactatgttgacaaagaaagctacaggtatggaggatacatatacttatgctaatctgtcctttataatgtcaggaaaaacaacagtccatgctagtaaacatgtaagttcactctacttactagcatgcgttttcttccatatttatattctgcagtgtctttgattgcttcactgtacatgctatagtagcattactgccacatgctaggtagttcttattttgtgacatccaaaattaagcatgcacaacactctagatataatatttgctgagaactgcaacaactttgtcttcaatggtgcaaatccagtatctcaatggtgctgcgaagtcacaattcacaaatgaatgcatccttcgctatactgctggagtagaaggcctccaggagttccttgccagttccattaggctagtgcagtagtgctcttgacttatggtcatcttgggtgtgtattttggggttttctataatcccttttgcactctcttctttcttaatcgaatgatatgcaattttcttgcatgttcgagaaaaaaaatatatttgcgaggattgtagccttgaattaaatcttctctttctgtgcagaggacgcttctgagtttgctgcacacaaggcattttcaatgcaagatagggaaaaacttgaaaaccagttgcatgacatggctttgatgattgagaggctagaggggagtcgtcaaaaactgctaatggagattgattctcaatcgtcagaaatagagaaactgtttgaggagaattcggccttatctacttcttatcaagaagccatagctattacagtacaatgggaaaaccagaaaattccaggttagagattgtctgaagcaaaatgaagagctccgttctcacttggagaaactaagacttgaacaagctagcctgttggaagtaagcaatatcactaccaaatcagatggacaaattgaaaacagtatctcaaacctaccagaaatggtcaccgagaatatttctctgaagggtcagcttataaaagaacagagcagatctgagagtttgttggcagagataatgaaactttcagctgagcttaggaaagcagtccaagcacagaataaccttgtacgcttgtacaggcctgtattaagagacattgagagcaatctgatgaaaatgaaacaagaaacttatgcgacgatccaatgatacatggtgtcaaactcaatccacgatactgtggaatggccgcatagtcacaagctccaccgtaggcctggttcggttgcatctgaattggagacgcaaccaacaagcccttgctcaagatgctggtgaatgtattggtctcatgccattttcaagatgctggtggaaagcagttctttcggtggctaccattcataagtagagttctgtcgagatcgttcaacctgtatcatactcttgtatacccgattcccaccggttcatcttataaactgggggcaaatggagaaaaagattggttagggcttgtttggtgaaaaagattggttagggcttgtttggttacaacttacaagggaggtggaggggactggagggaaataaactaatttttcccttaatccccacatttcccttctaaccaaaacaaattattatccctgctctcagtccacaaattgggcgcaacaactttttaaatcatgtcatttgcgtccgcatgttcgtttggccgttggatgggtccgcatgtagggtgtatttggtttggtgaatgaggtggtctatttctc

SEQ ID NO: 212896 - DNA, 1098 bp, Zea Mays
aaggggataggacgggaggaggagcacgactgcttaccacgggtcgcagaggtagcaaggaagcttggaatactagtcatcgctgatgaagtgtatggaaacctggtgtttggggacaccccttacgtcccaatgggtgtctttggccacattgccctgtcttgagcataggatcactatcgaagagatggatagtgcctgggtggcgacttggttgggtagttgtatgtgatcccatcaggattctgcaagaaaccaagatcattgcatcaataacaaacttccttaacgtttcaactgatccggcaacttttgttcagggagcacttccccatattcttgggaacacaaaggaagatttttttcaggaggatcattggtctgctagcagaaacctcagagatatgttacagagaaataaaggacatcaagtgcatcacctgccctcacaagccaaaaggttccatgtttgtcatggtgaaattaaatttgtatcttttggaggggattcatgacgatattgatttttgctgcaagctggcaaaagaagagtctgtgattttgtgtccaggtgagatggatttgatttgttggaaaaaatcatatctgacaaaaactcattttggctctagcagttgtctgttttgggttacaggtattccaggcctaaactgtatgtttgcgctcagaaatgctttaagaaaacagtgaattaatgctggaatacaatcatgaatcatcttttgttcatatgagaaaaatgtaatataggagattcactaatatataaatgaggggtgattctcctttatcaacaacttataaatgttactgacgaatagacagagagatatactccttggtaacttgtgagattttgggagtagcttttacaactaggcttaagtgtctaactgtttaggatagacatttggatatttgttactctgaggcactggttaagattctcatcttaaattgatatcagcatttaatcatacatacatgtgttactctgaggcattatttggcgttttttatggatatggagcatgaaaaactaaatgcaaagaatagtactttttacgtctatgattt

SEQ ID NO: 212897 - DNA, 801 bp, Zea Mays
atggcggcatttgaactggacagcgtatggctctacgacagattgttgggtgaaatacaactccatggtggcatgaaggttaaagctgatcgtgatgagtcctcgccttatgctgctatgcttgcctcacaggatgtcacgcaaagatgcaaggagcttggaattactgcattgcacattaagctccgtgctactggtggaaacaagaccaaaacccctggccctggtgctcagtctgctcttagagctcttgctcgatctggcatgaagataggtcgtattaatccaaaaaagaaggaaaagaagcatttgagaattaagaatgaggaatttgaagtgttagcaaagtcacatcaactgcaagcaaacaactatgagaaacaaatttattctctgcaagagaaaaaccattatatggaggaggtgcttgaacaggaacaacagaaaaacgtaaatgcttctattagtatagatgagcaagacaagaaggctgctcttttcactgaatgccaaaagtatgctgtggaaaatcattcagccaatatgttggtttcacagttgatgggggaagctagatatcatggggaggagagaaaaacattgctaaagcacaaagaaaaaccgaggcaagggatttcaaagcaaatgaaggttttgaatatctgcaaagatctagcatctaccgatttagctgaggacgaagttctgccgcaaactgttttagatgaaaccattaacactctgagacttaagtttgaaaagattctgggaattcttcacggatcacctagaattagttga

SEQ ID NO: 212898 - DNA, 3404 bp, Zea Mays
gtgaacacgacggcctgacccggtttccttctctcgccttctcttttctgtaacgcgcagtatacggcgccgttgtttctccccacggcggcatctcctgcgtggcgccgccttccggcgagagctgcgacggcggcgcactaggcgagttactggacacgagagcgatgggggacggcgccagcggccgcggcggcggaggcggggccgggcggcgggtgggggagtacgagctgctgcgaccgatcgggtcgggggcgtactcgcaggtgtggctggggaggcaccgggcgcggggcacggaggtggcggtgaaggagatcgccatggagcgtctcagcaacaagctccgcgagagcctcctctccgaggtcgacatcctccgtcgcatcagacacgataacgtcattgcactccacgaatccatcaaggaccatgggagcatatatctcatattggagtattgtcgaggtggtgacttacatgcataccttcaacgtcataaaagagtttctgaaaaggttgctaggcatttcatccgtcagttagcatctggtctgcaaatgcttcgcgataataacgtggttcaccgagacctaaaacctcagaacattcttcttgttgaaaataatgaaaattctctgttgaagatcgctgactttggatttgcaaaatttttgcaaccttttgccctagctgaaactctttgtggttcgccactttacatggctccagaagtcatgcaagctcagaagtatgatgcaaaggcagatctgtggagtgtcggtgtcattctatatcaacttgttactggaagaccaccttttaatgggggcaatcagatccagttgcttaaaaatatactcaggacatgtgaaatacgcttcccatctgattgtgacttgagccatggctgcattgacttgtgcagaaagttgctgcggctcaattcaggttaaatcactaatttgtagttacatcgagttcctatggtatccgcactgagcacatagagctttatgatattgtcattgatggttcaaagaagttttccctgcgttattattcttatgttgtgacttggaatggggaaatggcacaagtattgttgtattgatgtattacatttgttctttcgaaaatgaatggtaccatgcaagggcagttttataccctgccatttgtccttttattttactatatgactctgttagtacctgtttttcagatttgatgttcaactcagactattccttaacattaagaaattctctagcggatatttaacctgttttagataaaagtgtttttagaataccacttttttcaaggcatactttcttctgcaaaagtatgtttaggaaataagaacatcaaaggtgtgttgtttttgtttttgcatttgatcatagcactagtgcctaaactgataatgtacagctgtagcataacctcatatctagtatttaacagaggctaaaatgtaatgttctactattgctgttatcacatacagttatcggctaacattaatggtgctgtgctaatctgtgtaattgatccagtggagcggcttacagttgaagaatttgtgcaccacccatttctttctgaacatgctccagagaagactttgagccttacacaatctgacataagagatggctttccaagaaataatagcagtccaacaaggcattcaaaccatagttcacaagaagattgtatgccttttcctttagatgatgagtcaagtggacaggacgagggtccagttcctgacagtatgtcttgggcaataatcatgcacctagtagccaacaccatggccattctggtaaagtgaccaaggaaagcaagattcatgaagtacaaggtcaaaaggttgtttatccagaagattcccctatcattgattcattagagtttgtagatcaggaatacgtcttcgtgtctggaccacacctggagggatcatcatcttcaacaaatgcctctcagcagcttaatgtaccagcaaaatatgataattcgtctgtttcaccaccaaagttaactttcatgagtgcaccaatgccgataaatggtttgccgattaatagacaacaacttgctgggactggtagctttgacagccactgttctcctgcatctggcacttcacagggatctgcagatataagtgatgccatggatcagcccccatctgattatctgacgaggattagattgttggagcaatatgcatcagccatagcagggttggtcagagatgagatcaaaggtggcagacacttggaagcgttctctattcagctaattgttcttgcaacctggaagcaagcaattcatataggaaatacctttgtagcttcacctgcaagggagagtccctcacaggatatccctatgaaggggcatattgctggtgcttcccatttgcctgcgaactcaaagctagctgatgatgcctgcatgcagatagagaaacagtttctctctgaagttgaatatgctgaagaactagccagcattgtgggacagatagctgatggtacagagatgccagatgcaattgaaatgatatttcagtcggctttactcataggaaggcgaggcggtgttgatgaaatgtttgggaaagccgcggatgccatgactgggtatatgagggcggtatccatgctgcggtttctcctggtcgaggcaccatcactcgccctcaacccccctttgactctaacgagatccgatcggaatcgactgcgcacatacattgacgctctcaacaccaggctctgtcagatgcagagccagaggcattgactgctgccatgcgccctcaaatcttgtccaggtgttgtacaatattctttcatttgtaaatatatttgttggcccaaactagggcatatgtaacatgtcagaactgtggaactaggcagagcagcgaaaatctattgtaaatatatttgtagtgtggaattaggcagagtgtacgtggtaggttcattctgtgtcgattcaggcagaagcttgaaaaccgaataaccaataatagtcacgtgtggaaatgtaaacagctcggcctctacttcgtagattctttattatatattagtaaattagctcgataaaaaaaattatgcacctaatatcatctcatctatgttgtcaaatttatcatgctggatgtctccgatcactatatcaacaacgtgttgatcttcttgatcaccattttgccttcgtctaagtctctattgcatcatttgaactatatccataaacactagcaaagaatattagttcaaatggttatataggtcatcaaacactaaaactttataatcaaataatcaaatgggtctctatccatttttcttacaatattccaatctttg

SEQ ID NO: 212899 - DNA, 1878 bp, Zea Mays
aatcagcagaatctaatagatatgagttgtccaggaaacgttgaagaatgcatgcacaaagtacagtctgttaaatatggagaggaggtttgcttcaatggcatatttatgctgaaagcttctagttcaggccttgaacttggcaattctacctggacaatacaaagtccaagagctagcattacctacctaccaagttcagtatttgtgtcggctcatgcattagattttgattacagctctctgaaggaaaatgatgtgattttgttttcggatttctcatccttgaatgacacggacgaggataatgagaaactgaatgagcattcaatggatgaaacggactcttctctatgtcgctactcagtgtttagggatgacggcgctgatgcagatgaaagggtgccattcgtgtgcaacaatgatgatatcacagaggagattgagagaatcagctttatatgctcatgtatttttggtgcagtaaaatctggaggctctgttctaataccaattggccgccttggtgttattcttttacttttggagcttatatcagaaatgctacattcttccagcctgaaggtgcccatatttgtgatttctgaaacagcagaagaaatatttgcttttaccaataccttgcctgaatggctatgcaagtcacgtcaagaaaagttattcgctggtgaagcattgtttggccatgtcgagcttttgaaggagggcaaattatttttgttcccgcatctacattcaaagggtttgctcatggaaggagccttgtattgtgctatgtccacactggagccttagactcggcccagctgttcatttgcttcgtcgctggcatgcagacaaacggtgccttcttgttgtggagcaaggaaatggtgctgagttgagtcttaagcctttcatgcccttggcaattcaagtccttgagtgttctttcctttcgggcgtaagggcggggaaaattgatccattactgggagtgctcaaaccgaagtttgttatgcttccagaaggtcttaagtcgcggtgttcaataaagggggtgccatggtcattcttgtattactccaaggcctagacaactgaacgaaaccactgcagtggcgagattgagaacaaagctgcttgtaagcaatggacggtaccagctggcctctgcagaaaagcaaccagatcaatcaaagcgtcacttgctacactgtagcactattgaccctggtcgcttgctgtcagctttgcgagagaaggggatggtatgttcatttgctgcagatgatagccccactgctagtgaatcctcagttctggtcactagtcctggagatgctttggtgaggataacgcccgacacgactgttatatactgcgacgacgagagaacatccaatcaaatttatgatgcgcttagcagtgtttgtaaagggatctgactgcatcatgtgtaattgttgttcgttatggggtgtttggtttttagggactaatttttagtactccattttaatctataaattgctaaatgcggaaaataaaacttttatttttcgtacttggtaatttatgaactaaaataaaataggggactaaaaattagcctctagaaaccaaacattcccgaagttgtgcgtgtgcgttaaattgtgaattgccatgtggtggtttagtggttgaaaaaaggttaagttttttcttccagaacggagaaagtgagttatttcagtttgtgagaagcatgtttcgttctcgtttggcacaactgctgcttgttgaaaaagcagcttatctgagaagccggtgaaaaacaatttctacttgttggttgtttttagttcaatatgagaaacaactgaactgataagc

SEQ ID NO: 212900 - DNA, 2738 bp, Zea Mays
ccttcgccagttcaccccccacagaccacaactgtcgcgtcgccggctcgccgctcgccctatcccccaccgccaccggccacgcttccgtactgagccgctgagggggccagtcaggcgcgccgaccgccgaaactgccatgaagctgacctgcttgtccgccgccgccggcggcggcggcggctaccactcgccagcgagccatctcctggagctggagggggtccgcttcctcctcgactgccccatcgacctctccgctctcgcggccttcgcgccggtgcccctcgccggtgacgcaggaggtctcatccgcgcggtgccgcgctactggttgccagcggccgtgaaagaaggcggcgtggacgccgtgctcgtgtcttccgctacggggatgctcggactccccttcctcaccgggctccccggattcaccaacacgaaggtatatgtgacagaggtagcagcaaggatcggaaagccaatgatggaggagctggtggagatgcatcgtgagtttgtgaggtactatgggccagatacggatgcatcacccaagtggatggaaggggaggaactcaatgaactcatgtcaatgtcgcaaaaggcagtgattgaaggcagggaaaatgatttgacttctctggtgcctttatacagtccaggaaacgttgaagaatgcatgcacaaagtacagtctgttaaatatggagaggaggtttgcttcaatggcatatttatgctgaaagcttctagttcaggccttgaacttggcaattctacctggacaatacaaagtccaagagctagcattacctacctaccaagttcagtatttgtgtcggctcatgcattagattttgattacagctctctgaaggaaaatgatgtgattttgttttcggatttctcatccttgaatgacacggacgaggataatgagaaactgaatgagcattcaatggatgaaacggactcttctctatgtcgctactcagtgtttagggatgacggcgctgatgcagatgaaagggtgccattcgtgtgcaacaatgatgatatcacagaggagattgagagaatcagctttatatgctcatgtatttttggtgcagtaaaatctggaggctctgttctaataccaattggccgccttggtgttattcttttacttttggagcttatatcagaaatgctacattcttccagcctgaaggtgcccatatttgtgatttctgaaacagcagaagaaatatttgcttttaccaataccttgcctgaatggctatgcaagtcacgtcaagaaaagttattcgctggtgaagcattgtttggccatgtcgagcttttgaaggagggcaaattatttttgttcccgcatctacattcaaagggtttgctgtaagaatttgataaaatatgatttacagctaatacataggaagacttagaacaggcttgaaattcttttgtcatctttgctactcttcttataaagaatcagtaaaggctttgttcttatatttttaatttagcacaatttgtggggcatacatcttatgtatcctgtatccatatgagctcacttgtacttgggttgctgttttctgtcatatcttgacagggcagcatggaaggagccttgtattgtgctatgtccacactggagccttagactcggcccagctgttcatttgcttcgtcgctggcatgcagacaaacggtgccttcttgttgtggagcaaggaaatggtgctgagttgagtcttaagcctttcatgcccttggcaattcaagtccttgagtgttctttcctttcgggcgtaagggcggggaaaattgatccattactgggagtgctcaaaccgaagtttgttatgcttccagaaggtcttaagtcgcggtgttcaataaagggggtgccatggtcattcttgtattactccaaggcctagacaactgaacgaaaccactgcagtggcgagattgagaacaaagctgcttgtaagcaatggacggtaccagctggcctctgcagaaaagcaaccagatcaatcaaagcgtcacttgctacactgtagcactattgaccctggtcgcttgctgtcagctttgcgagagaaggggatggtatgttcatttgctgcagatgatagccccactgctagtgaatcctcagttctggtcactagtcctggagatgctttggtgaggataacgcccgacacgactgttatatactgcgacgacgagagaacatccaatcaaatttatgatgcgcttagcagtgtttgtaaagggatctgactgcatcatgtgtaattgttgttcgttatggggtgtttggtttttagggactaatttttagtactccattttaatctataaattgctaaatgcggaaaataaaacttttatttttcgtacttggtaatttatgaactaaaataaaataggggactaaaaattagcctctagaaaccaaacattcccgaagttgtgcgtgtgcgttaaattgtgaattgccatgtggtggtttagtggttgaaaaaaggttaagttttttcttccagaacggagaaagtgagttatttcagtttgtgagaagcatgtttcgttctcgtttggcacaactgctgcttgttgaaaaagcagcttatctgagaagccggtgaaaaacaatttctacttgttggttgtttttagttcaatatgagaaacaactgaactgataagc

SEQ ID NO: 212901 - DNA, 2587 bp, Zea Mays
ccttcgccagttcaccccccacagaccacaactgtcgcgtcgccggctcgccgctcgccctatcccccaccgccaccggccacgcttccgtactgagccgctgagggggccagtcaggcgcgccgaccgccgaaactgccatgaagctgacctgcttgtccgccgccgccggcggcggcggcggctaccactcgccagcgagccatctcctggagctggagggggtccgcttcctcctcgactgccccatcgacctctccgctctcgcggccttcgcgccggtgcccctcgccggtgacgcaggaggtctcatccgcgcggtgccgcgctactggttgccagcggccgtgaaagaaggcggcgtggacgccgtgctcgtgtcttccgctacggggatgctcggactccccttcctcaccgggctccccggattcaccaacacgaaggtatatgtgacagaggtagcagcaaggatcggaaagccaatgatggaggagctggtggagatgcatcgtgagtttgtgaggtactatgggccagatacggatgcatcacccaagtggatggaaggggaggaactcaatgaactcatgtcaatgtcgcaaaaggcagtgattgaaggcagggaaaatgatttgacttctctggtgcctttatacagtccaggaaacgttgaagaatgcatgcacaaagtacagtctgttaaatatggagaggaggtttgcttcaatggcatatttatgctgaaagcttctagttcaggccttgaacttggcaattctacctggacaatacaaagtccaagagctagcattacctacctaccaagttcagtatttgtgtcggctcatgcattagattttgattacagctctctgaaggaaaatgatgtgattttgttttcggatttctcatccttgaatgacacggacgaggataatgagaaactgaatgagcattcaatggatgaaacggactcttctctatgtcgctactcagtgtttagggatgacggcgctgatgcagatgaaagggtgccattcgtgtgcaacaatgatgatatcacagaggagattgagagaatcagctttatatgctcatgtatttttggtgcagtaaaatctggaggctctgttctaataccaattggccgccttggtgttattcttttacttttggagcttatatcagaaatgctacattcttccagcctgaaggtgcccatatttgtgatttctgaaacagcagaagaaatatttgcttttaccaataccttgcctgaatggctatgcaagtcacgtcaagaaaagttattcgctggtgaagcattgtttggccatgtcgagcttttgaaggagggcaaattatttttgttcccgcatctacattcaaagggtttgctcatggaaggagccttgtattgtgctatgtccacactggagccttagactcggcccagctgttcatttgcttcgtcgctggcatgcagacaaacggtgccttcttgttgtggagcaaggaaatggtgctgagttgagtcttaagcctttcatgcccttggcaattcaagtccttgagtgttctttcctttcgggcgtaagggcggggaaaattgatccattactgggagtgctcaaaccgaagtttgttatgcttccagaaggtcttaagtcgcggtgttcaataaagggggtgccatggtcattcttgtattactccaagggcaagaccatcgagctctcaaatttacgtgaagatattgaggtgcatcttgcaactgatgttgccttccgattgcagcctagacaactgaacgaaaccactgcagtggcgagattgagaacaaagctgcttgtaagcaatggacggtaccagctggcctctgcagaaaagcaaccagatcaatcaaagcgtcacttgctacactgtagcactattgaccctggtcgcttgctgtcagctttgcgagagaaggggatggtatgttcatttgctgcagatgatagccccactgctagtgaatcctcagttctggtcactagtcctggagatgctttggtgaggataacgcccgacacgactgttatatactgcgacgacgagagaacatccaatcaaatttatgatgcgcttagcagtgtttgtaaagggatctgactgcatcatgtgtaattgttgttcgttatggggtgtttggtttttagggactaatttttagtactccattttaatctataaattgctaaatgcggaaaataaaacttttatttttcgtacttggtaatttatgaactaaaataaaataggggactaaaaattagcctctagaaaccaaacattcccgaagttgtgcgtgtgcgttaaattgtgaattgccatgtggtggtttagtggttgaaaaaaggttaagttttttcttccagaacggagaaagtgagttatttcagtttgtgagaagcatgtttcgttctcgtttggcacaactgctgcttgttgaaaaagcagcttatctgagaagccggtgaaaaacaatttctacttgttggttgtttttagttcaatatgagaaacaactgaactgataagc

SEQ ID NO: 212902 - DNA, 2535 bp, Zea Mays
ccttcgccagttcaccccccacagaccacaactgtcgcgtcgccggctcgccgctcgccctatcccccaccgccaccggccacgcttccgtactgagccgctgagggggccagtcaggcgcgccgaccgccgaaactgccatgaagctgacctgcttgtccgccgccgccggcggcggcggcggctaccactcgccagcgagccatctcctggagctggagggggtccgcttcctcctcgactgccccatcgacctctccgctctcgcggccttcgcgccggtgcccctcgccggtgacgcaggaggtctcatccgcgcggtgccgcgctactggttgccagcggccgtgaaagaaggcggcgtggacgccgtgctcgtgtcttccgctacggggatgctcggactccccttcctcaccgggctccccggattcaccaacacgaaggtatatgtgacagaggtagcagcaaggatcggaaagccaatgatggaggagctggtggagatgcatcgtgagtttgtgaggtactatgggccagatacggatgcatcacccaagtggatggaaggggaggaactcaatgaactcatgtcaatgtcgcaaaaggcagtgattgaaggcagggaaaatgatttgacttctctggtgcctttatacagtccaggaaacgttgaagaatgcatgcacaaagtacagtctgttaaatatggagaggaggtttgcttcaatggcatatttatgctgaaagcttctagttcaggccttgaacttggcaattctacctggacaatacaaagtccaagagctagcattacctacctaccaagttcagtatttgtgtcggctcatgcattagattttgattacagctctctgaaggaaaatgatgtgattttgttttcggatttctcatccttgaatgacacggacgaggataatgagaaactgaatgagcattcaatggatgaaacggactcttctctatgtcgctactcagtgtttagggatgacggcgctgatgcagatgaaagggtgccattcgtgtgcaacaatgatgatatcacagaggagattgagagaatcagctttatatgctcatgtatttttggtgcagtaaaatctggaggctctgttctaataccaattggccgccttggtgttattcttttacttttggagcttatatcagaaatgctacattcttccagcctgaaggtgcccatatttgtgatttctgaaacagcagaagaaatatttgcttttaccaataccttgcctgaatggctatgcaagtcacgtcaagaaaagttattcgctggtgaagcattgtttggccatgtcgagcttttgaaggagggcaaattatttttgttcccgcatctacattcaaagggtttgctcatggaaggagccttgtattgtgctatgtccacactggagccttagactcggcccagctgttcatttgcttcgtcgctggcatgcagacaaacggtgccttcttgttgtggagcaaggaaatggtgctgagttgagtcttaagcctttcatgcccttggcaattcaagtccttgagtgttctttcctttcgggcgtaagcttccagaaggtcttaagtcgcggtgttcaataaagggggtgccatggtcattcttgtattactccaagggcaagaccatcgagctctcaaatttacgtgaagatattgaggtgcatcttgcaactgatgttgccttccgattgcagcctagacaactgaacgaaaccactgcagtggcgagattgagaacaaagctgcttgtaagcaatggacggtaccagctggcctctgcagaaaagcaaccagatcaatcaaagcgtcacttgctacactgtagcactattgaccctggtcgcttgctgtcagctttgcgagagaaggggatggtatgttcatttgctgcagatgatagccccactgctagtgaatcctcagttctggtcactagtcctggagatgctttggtgaggataacgcccgacacgactgttatatactgcgacgacgagagaacatccaatcaaatttatgatgcgcttagcagtgtttgtaaagggatctgactgcatcatgtgtaattgttgttcgttatggggtgtttggtttttagggactaatttttagtactccattttaatctataaattgctaaatgcggaaaataaaacttttatttttcgtacttggtaatttatgaactaaaataaaataggggactaaaaattagcctctagaaaccaaacattcccgaagttgtgcgtgtgcgttaaattgtgaattgccatgtggtggtttagtggttgaaaaaaggttaagttttttcttccagaacggagaaagtgagttatttcagtttgtgagaagcatgtttcgttctcgtttggcacaactgctgcttgttgaaaaagcagcttatctgagaagccggtgaaaaacaatttctacttgttggttgtttttagttcaatatgagaaacaactgaactgataagc

SEQ ID NO: 212903 - DNA, 2582 bp, Zea Mays
ccttcgccagttcaccccccacagaccacaactgtcgcgtcgccggctcgccgctcgccctatcccccaccgccaccggccacgcttccgtactgagccgctgagggggccagtcaggcgcgccgaccgccgaaactgccatgaagctgacctgcttgtccgccgccgccggcggcggcggcggctaccactcgccagcgagccatctcctggagctggagggggtccgcttcctcctcgactgccccatcgacctctccgctctcgcggccttcgcgccggtgcccctcgccggtgacgcaggaggtctcatccgcgcggtgccgcgctactggttgccagcggccgtgaaagaaggcggcgtggacgccgtgctcgtgtcttccgctacggggatgctcggactccccttcctcaccgggctccccggattcaccaacacgaaggtatatgtgacagaggtagcagcaaggatcggaaagccaatgatggaggagctggtggagatgcatcgtgagtttgtgaggtactatgggccagatacggatgcatcacccaagtggatggaaggggaggaactcaatgaactcatgtcaatgtcgcaaaaggcagtgattgaaggcagggaaaatgatttgacttctctggtgcctttatacaggaaacgttgaagaatgcatgcacaaagtacagtctgttaaatatggagaggaggtttgcttcaatggcatatttatgctgaaagcttctagttcaggccttgaacttggcaattctacctggacaatacaaagtccaagagctagcattacctacctaccaagttcagtatttgtgtcggctcatgcattagattttgattacagctctctgaaggaaaatgatgtgattttgttttcggatttctcatccttgaatgacacggacgaggataatgagaaactgaatgagcattcaatggatgaaacggactcttctctatgtcgctactcagtgtttagggatgacggcgctgatgcagatgaaagggtgccattcgtgtgcaacaatgatgatatcacagaggagattgagagaatcagctttatatgctcatgtatttttggtgcagtaaaatctggaggctctgttctaataccaattggccgccttggtgttattcttttacttttggagcttatatcagaaatgctacattcttccagcctgaaggtgcccatatttgtgatttctgaaacagcagaagaaatatttgcttttaccaataccttgcctgaatggctatgcaagtcacgtcaagaaaagttattcgctggtgaagcattgtttggccatgtcgagcttttgaaggagggcaaattatttttgttcccgcatctacattcaaagggtttgctcatggaaggagccttgtattgtgctatgtccacactggagccttagactcggcccagctgttcatttgcttcgtcgctggcatgcagacaaacggtgccttcttgttgtggagcaaggaaatggtgctgagttgagtcttaagcctttcatgcccttggcaattcaagtccttgagtgttctttcctttcgggcgtaagggcggggaaaattgatccattactgggagtgctcaaaccgaagtttgttatgcttccagaaggtcttaagtcgcggtgttcaataaagggggtgccatggtcattcttgtattactccaagggcaagaccatcgagctctcaaatttacgtgaagatattgaggtgcatcttgcaactgatgttgccttccgattgcagcctagacaactgaacgaaaccactgcagtggcgagattgagaacaaagctgcttgtaagcaatggacggtaccagctggcctctgcagaaaagcaaccagatcaatcaaagcgtcacttgctacactgtagcactattgaccctggtcgcttgctgtcagctttgcgagagaaggggatggtatgttcatttgctgcagatgatagccccactgctagtgaatcctcagttctggtcactagtcctggagatgctttggtgaggataacgcccgacacgactgttatatactgcgacgacgagagaacatccaatcaaatttatgatgcgcttagcagtgtttgtaaagggatctgactgcatcatgtgtaattgttgttcgttatggggtgtttggtttttagggactaatttttagtactccattttaatctataaattgctaaatgcggaaaataaaacttttatttttcgtacttggtaatttatgaactaaaataaaataggggactaaaaattagcctctagaaaccaaacattcccgaagttgtgcgtgtgcgttaaattgtgaattgccatgtggtggtttagtggttgaaaaaaggttaagttttttcttccagaacggagaaagtgagttatttcagtttgtgagaagcatgtttcgttctcgtttggcacaactgctgcttgttgaaaaagcagcttatctgagaagccggtgaaaaacaatttctacttgttggttgtttttagttcaatatgagaaacaactgaactgataagc

SEQ ID NO: 212904 - DNA, 2155 bp, Zea Mays
ttctgtgctccggagctcggtcggaggctaggggccgttaatgggcggctgctgttgtgttggttggaggatcctgcttagatcggcccaggaattagtggtggcttcggatgggatgcgttaaatctccatgatgcggaatttactgccttccagatcagtgcaaatatagtcttgactgttgacatcatctcagcaatagagttcaataaatcaggacatcatcttgccactggagacagaggtggacgagttgttttatttgaaaggaccgatgtcaaagatcatgcttgtagaaaagatgctgagaaagctgatcattctatcagcaggcatcctgaatttcgctacaaaactgagtttcaaagccacgaaccagagtttgattatcttaagagcttggaaattgaagagaagattaaccaaataaaatggtgtcaagcagcaaatggtgcattgtatcttctatccacaaatgacaaaacgataaagttttggaaggtccaagaaaagaaggtaaaaaagctatctgagatgaatttggaccgttcagctgctcctgcaaatggtagtcctggtggcgtgggatatctgagcccatctctctcaaatggcaatgctctaaaacctggcaggcttcctttgcttcgcctgcctgtggttacaagccaagaaacaagtcttgccacaagttgccgaagagtatatgctcatgcacatgactaccatataaattcgatatcaaataacagtgatggtgagacatttatatcagctgatgatttgcggataaatctatggaatttggaaatcagcaatcaaagtttcaatattattgatgttaagcctacaaacatggaagatctcaccgaggtgataacatctgctgaattccatcctacccactgcaatacgttggcatatagtagctctaagggatccattcgacttgttgatctgcgccaatcagccctttgcgacactcattatcaaatctttgagcagcatgaggccccaggctcaagatcatttttcactgagattatagcctcaatttcggacataaagttttcgaaggatgggaggcatcttctcagtcgcgactacatgactctgaagctttgggatgttaagatgaattccggtccagttgcaacattccaggttcatgagtatctaaggcctaagttatgtgatttatatgaaaatgactcaatttttgacaaatttgagtgttgtcaaagtggtgatggattaagagtagcaactggttcctacagcaacattttccgtgtgtttggttgtggtactggtaacagtgaggcgacaacacttgaagcaacccgaaaccctacaaggaggcagctccagaatcccactagagctaccagatccctaagttctctgacaagggcagttagacgaggtggagaaagcactggaatagatgtcaatggaaattcttatgatctgagcacaaagttgcttcatttggcttggcacccatctgaaaatctaattgcatgtgctgcagccaatagcttgtacatgtactatgcataaacaagccaaatgaacagagcgacagtatttttggtggttgctcccggtgagaaagacacttttagctcctggtggatttgaagccaggagttgctggggagatggtgtatcttgtgccagtcagatgcagttcttttcggtgccatatagagctgtccagagtccaagaggaagtgactcgatcattcccgggaagcagctttgattctgatttatttttttgtggggaaaggcttgtctttcccccataggtccatttagatttaaagataaggccctagtttggcaatttgtagtagatgttaagaggatgacgatgatccaccgttgtattcatgttgggcatgggtttgtaacttcagggtggccgttgaagctttcgataattttatcttacatacggatcaaccttttttttttctatcttatgtgaggaaccttattttcgaggaataccaggaccttcgccatgtttaatgcgaaccctagaataggtaatatgctgtgtcattttattgtacgtacattttaaaatagctgcaagtggttctactgtttagttattataagtatattcttttagcggacggac

SEQ ID NO: 212905 - DNA, 1851 bp, Zea Mays
tatgcatattgaactgtacaccaaacaggcatcctgaatttcgctacaaaactgagtttcaaagccacgaaccagagtttgattatcttaagagcttggaaattgaagagaagattaaccaaataaaatggtgtcaagcagcaaatggtgcattgtatcttctatccacaaatgacaaaacgataaagttttggaaggtccaagaaaagaaggtaaaaaagctatctgagatgaatttggaccgttcagctgctcctgcaaatggtagtcctggtggcgtgggatatctgagcccatctctctcaaatggcaatgctctaaaacctggcaggcttcctttgcttcgcctgcctgtggttacaagccaagaaacaagtcttgccacaagttgccgaagagtatatgctcatgcacatgactaccatataaattcgatatcaaataacagtgatggtgagacatttatatcagctgatgatttgcggataaatctatggaatttggaaatcagcaatcaaagtttcaatattattgatgttaagcctacaaacatggaagatctcaccgaggtgataacatctgctgaattccatcctacccactgcaatacgttggcatatagtagctctaagggatccattcgacttgttgatctgcgccaatcagccctttgcgacactcattatcaaatctttgagcagcatgaggccccaggctcaagatcatttttcactgagattatagcctcaatttcggacataaagttttcgaaggatgggaggcatcttctcagtcgcgactacatgactctgaagctttgggatgttaagatgaattccggtccagttgcaacattccaggttcatgagtatctaaggcctaagttatgtgatttatatgaaaatgactcaatttttgacaaatttgagtgttgtcaaagtggtgatggattaagagtagcaactggttcctacagcaacattttccgtgtgtttggttgtggtactggtaacagtgaggcgacaacacttgaagcaacccgaaaccctacaaggaggcagctccagaatcccactagagctaccagatccctaagttctctgacaagggcagttagacgaggtggagaaagcactggaatagatgtcaatggaaattcttatgatctgagcacaaagttgcttcatttggcttggcacccatctgaaaatctaattgcatgtgctgcagccaatagcttgtacatgtactatgcataaacaagccaaatgaacagagcgacagtatttttggtggttgctcccggtgagaaagacacttttagctcctggtggatttgaagccaggagttgctggggagatggtgtatcttgtgccagtcagatgcagttcttttcggtgccatatagagctgtccagagtccaagaggaagtgactcgatcattcccgggaagcagctttgattctgatttatttttttgtggggaaaggcttgtctttcccccataggtccatttagatttaaagataaggccctagtttggcaatttgtagtagatgttaagaggatgacgatgatccaccgttgtattcatgttgggcatgggtttgtaacttcagggtggccgttgaagctttcgataattttatcttacatacggatcaaccttttttttttctatcttatgtgaggaaccttattttcgaggaataccaggaccttcgccatgtttaatgcgaaccctagaataggtaatatgctgtgtcattttattgtacgtacattttaaaatagctgcaagtggttctactgtttagttattataagtatattcttttagcggacggac

SEQ ID NO: 212906 - DNA, 1388 bp, Zea Mays
ccatttccttgcaagtgaataacatattgttgaacgaagttaattcttttttgttgaaatggttgtcatgaatgaatgaagtcggttcaaacatggggtttcagaggtgataacatctgctgaattccatcctacccactgcaatacgttggcatatagtagctctaagggatccattcgacttgttgatctgcgccaatcagccctttgcgacactcattatcaaatctttgagcagcatgaggccccaggctcaagatcatttttcactgagattatagcctcaatttcggacataaagttttcgaaggatgggaggcatcttctcagtcgcgactacatgactctgaagctttgggatgttaagatgaattccggtccagttgcaacattccaggttcatgagtatctaaggcctaagttatgtgatttatatgaaaatgactcaatttttgacaaatttgagtgttgtcaaagtggtgatggattaagagtagcaactggttcctacagcaacattttccgtgtgtttggttgtggtactggtaacagtgaggcgacaacacttgaagcaacccgaaaccctacaaggaggcagctccagaatcccactagagctaccagatccctaagttctctgacaagggcagttagacgaggtggagaaagcactggaatagatgtcaatggaaattcttatgatctgagcacaaagttgcttcatttggcttggcacccatctgaaaatctaattgcatgtgctgcagccaatagcttgtacatgtactatgcataaacaagccaaatgaacagagcgacagtatttttggtggttgctcccggtgagaaagacacttttagctcctggtggatttgaagccaggagttgctggggagatggtgtatcttgtgccagtcagatgcagttcttttcggtgccatatagagctgtccagagtccaagaggaagtgactcgatcattcccgggaagcagctttgattctgatttatttttttgtggggaaaggcttgtctttcccccataggtccatttagatttaaagataaggccctagtttggcaatttgtagtagatgttaagaggatgacgatgatccaccgttgtattcatgttgggcatgggtttgtaacttcagggtggccgttgaagctttcgataattttatcttacatacggatcaaccttttttttttctatcttatgtgaggaaccttattttcgaggaataccaggaccttcgccatgtttaatgcgaaccctagaataggtaatatgctgtgtcattttattgtacgtacattttaaaatagctgcaagtggttctactgtttagttattataagtatattcttttagcggacggac

SEQ ID NO: 212907 - DNA, 1493 bp, Zea Mays
cgataggacacctatcaagcccgtattgactcaccccctcgctttcctctttgaaattgatatgtactcggacccaggcgcaatctccaactaataaattgcgatcatctggggcgcactttacccacggggtcattagaaaatctcattttcgaaatgttaggcttcggtagacaaaccgtgctctcaaatccatggcgacaaaaggatcaagcaccctgagtcaagtcttcagcctgaaggagacatgtcggatgaagatagagatagagaaagagatagagatagagtctggttgcacggagagaaggttggcgcaggtttcaaatgcaagtattgtagagaaacaaagagcggagggggtggtacccgattgaaggagcatctcgcgcatagagggaagaatgtcaagaaatgtccctctgttcctccagacataaaggcatacttccagcttgacatagataagacaaaggaaaaaaagagttctaggttcaggcagcagctgagggcagatgaggcagcacaaacccattttggggacgatgagtatgaggatgaccttaaagcggctctgcatcagtcacgtgtggagcacgaatttagtcagagggctggtgcaaggcataatgaagccattagagattggatggaaagaggaagatccaatgcacctccaacattggatgaagactcacctatcagtgacactcctcttcctagcacgctttttacatcgcttgtacgtgaacaaggaggcacagaggaagtgcaagaatgggccgatgaaacaattggtgacacccaccttggtaagcggaagacaagacttggtccatcagataggaaaggaaaaagggtcaaaatcatcgatcaaatcgaagaggaagatgaggatgaagacagtgatgataacacaaccgatcctagtgctggtgatgatggcagccatggtgatgctggattatatggtgtaggagggagtggtgcaggagggagtggtatgggagggagtggtgcaggagattggaggtccactggaggaagtcggttcacccattccacacaagattcttaccatgatgcacctcattcacagcgggagacaataagtggtcgacgtcgttcggtttcatttcctgtccaagatggaatccgtagctcaagtagctctggttcttctaactatccgactggacaagacccagtctataacccttatgcatggcaatggcaaccgagtcaaggaacctatggacctcctccaccatcaggcgaagcaccaccatcgatcatgtatgggtatggaaactatggacctcctccaccaccatattcaaatttatcaaatatgtatccaccaggaccacaatatgggtatggacaagttcccgctgcaccggcctatcactatcagtatgacggattggatcaatatcacgacccttccaacatgcctgagtactatcactatgactcgagctgaacatgtg

SEQ ID NO: 212908 - DNA, 3058 bp, Zea Mays
gtaggttcttgcccattaacatacccgtggcggctggagatatcatcccgtatccgtctttgtatgggggtaaaaccgtcggttattcgggtttccgttatgtattgccatcgtctatgcactgcatttcccttcctcacctccggcgcaaaaccgcagcagtaggatcccagccggtcggccgcccaggatgccggagcctgcgtccccgccctcagcggcgggagccggccgccacatatccactccacatcaacaagggagtggagaatgctcccggcgcctcttcgatctcgacctccggccggcctcatgtgggagacgagggacgatgggctcccttccctcagcgtcagcgggttgtgaccccatatagccggatgtcagtcaattcatccatggcgatcaatccattcctcgagcaggccaaggttcttctctgggttttgaggaaggacccatctgcgatgctcatctaattaaggttacctggtcatcttgctactcggtcgcctacaggatcggatagcttactctatctataatcacaccgagcaaactgtccatcctagctacaatgggtagcacgcacaaggaagaagtaggtgtcctggaggaaatacttgacgggagaaaagagccgaggaagctatctttatcagttctaaaacacatcacaaatgacttctcgcacgagcgaataatcggttatggtgggtgcggagaggtttacaagggcatcctgcaaaacggaagcgtcgctgtgaagaaaatcttcagcaacctaaatgttgaagataaggaatttgatcgagagattcagagcatgatgcaggtgaagcatccaaacgtagtgcggtttattggctactgttctaacacagagcatgaactgatgagaaaagaaggcaagtatattaaggtcgaggtgcgagaaaggctgctctgtttcgagcatatcagcaacggaagcctccgcagccacattacaggtgtcataatgctggagctggtgaccgggagcaaggaggagccggacattactaatgtacttcgacggtggagccataggtggaaaaaatcaggacagcgtacaccatcatttcaacgccatcaagtgagtaaatgcataggtttggctaagagatgcaaagaagtagaaccaacaagaaggccttctatatgtgatatacttgctgccctaggcaaaatggaagatatgaattgcagtgatcaacaagtggacgaggaagtcacttatctggaggacatgctaggaatcgagcctcttgatctgcatttcctagtcgaacctaccaagcagatatcctgctcagtccatctgaccaacgctacgaatgactgtttcgccttcattgttcagacgacgaacccgaagcagtactgcatacagccggacagaggcgtcgttccaccacgatctgagtgtagtgttgccatcgtattatcgcaagaaccgacgcataataagcgatgcagcatggaggacgagctaagcgtgcagagcaccagagtggatgagggtgtgacagctgcggatgtgagtgaagcgttgttcactggaaaggaagatagaacggtcgatcacgtgagcctgatggtcggtttcgacatgtcgccatcgccacctgaggaacaaacggaggacttcacgtttgcaccactggcgtcgttgtacgacgaggagccacagttaagcgcggcgaaggtatcagtatggacatccaatcagttggggcgttctggtcgcttctctaagaagaagctagtgtctattctgaaatcctggcgagcaagattaaaggtatcatcccataagaaactcgagactccaaagcatgactgtgagattcctgaagctgtagagcatgaagaagttgccgcgcccaggtgtcccaaaggaccactgccacagcgcgatctttctccactgggcgaagcatgttctaggatgaacatgacggcgatccatgagatcctagtgaacagacattacagagatgatgacctagacccaaacgtgccgtcgctcgaggaatggacacagcagagcagggatatgttggatgataggaaacgtggggacttcacttttcgtgataaagatttccgagcagccatagactggtataccaagtgtatggatgtggggccaaagaaggcgtcaccaacagttctcgttcgacgcagttgctgccacctcatgtgcggcaacctggacgccgccctccgcgatgcaatgcaagcgcagcgtcagtatcccgactgcccaacctcactgtacatgcaagcagtggcactttcaaagctagggatgcatagtcaagccatgggcatgctgattgaggcgtcggagatggaagcgaatcagaaaaagacccgaaaagcagcttaagaagactcaacatgggcgaaacctatataccttcgttttgtttctgtaagctattcttgattgttgtatctgcttgccaaattgtctaggttggagtggaattgggaagctttacctcttggggataatgcatttcttgttgtattcccctctgaggatgaaatgctccgtatggctgatattgagtataagctcaagagtggaatttctattcatatggattaggcctggagatgctaatccggcctattttttttggatgagatttgggtgcatgtttctggtgttccgcatgaatggctgacacttcttggcattctgggcactactcttgacatacaggaaggggattattcgcctgctggttactcttgacatacaggaaggggatctatgattggcactactattgacaaagtggggtatgagattacaatcactcccgagccgtcggattttgaaccagcaatgcctcccaaatttgacaaggaggatggggattcaggcgggggagagagaatctggtacgtcgagaaagaagcaaaaaagtgcgacaagctcctttcaaatttgtaagatagctcccatgagaagctagatagggttctcatgacaaccaacccacttgtctctgtacaggct

SEQ ID NO: 212909 - DNA, 3617 bp, Zea Mays
gtaggttcttgcccattaacatacccgtggcggctggagatatcatcccgtatccgtctttgtatgggggtaaaaccgtcggttattcgggtttccgttatgtattgccatcgtctatgcactgcatttcccttcctcacctccggcgcaaaaccgcagcagtaggatcccagccggtcggccgcccaggatgccggagcctgcgtccccgccctcagcggcgggagccggccgccacatatccactccacatcaacaagggagtggagaatgctcccggcgcctcttcgatctcgacctccggccggcctcatgtgggagacgagggacgatgggctcccttccctcagcgtcagcggtgagttctaagcccaaaaggtatttcagagttgggctttggacgatatgcagcagaaagggaacctaggtcgtcccgactctcttcttcctacttcctcaaaacaattagtgcgagaatcctactaagtcaagtcctcgagtattttagtatcgactaacactcaattttttttcacgaatcaacggaagacaaatttttttagaaaagggaagctttattcagaagtctaggatataaaaacaaactctcaaaaacggccacccatgtttgggtggatctccactgctgataccgatgctgatggttctttttctagtttattagcatggtgatagcccaatcgattatcgttcattccttttgtagtttattactattattattgatgacgcctgtttctgaccactcctttcggccggccaaattaactctggaatttattccatgccttcctcggccctgtttgttctgcatgtcttcaaagggttgtgaccccatatagccggatgtcagtcaattcatccatggcgatcaatccattcctcgagcaggccaaggttcttctctgggttttgaggaaggacccatctgcgatgctcatctaattaaggttacctggtcatcttgctactcggtcgcctacaggatcggatagcttactctatctataatcacaccgagcaaactgtccatcctagctacaatgggtagcacgcacaaggaagaagtaggtgtcctggaggaaatacttgacgggagaaaagagccgaggaagctatctttatcagttctaaaacacatcacaaatgacttctcgcacgagcgaataatcggttatggtgggtgcggagaggtttacaagggcatcctgcaaaacggaagcgtcgctgtgaagaaaatcttcagcaacctaaatgttgaagataaggaatttgatcgagagattcagagcatgatgcaggtgaagcatccaaacgtagtgcggtttattggctactgttctaacacagagcatgaactgatgagaaaagaaggcaagtatattaaggtcgaggtgcgagaaaggctgctctgtttcgagcatatcagcaacggaagcctccgcagccacattacaggtgtcataatgctggagctggtgaccgggagcaaggaggagccggacattactaatgtacttcgacggtggagccataggtggaaaaaatcaggacagcgtacaccatcatttcaacgccatcaagtgagtaaatgcataggtttggctaagagatgcaaagaagtagaaccaacaagaaggccttctatatgtgatatacttgctgccctaggcaaaatggaagatatgaattgcagtgatcaacaagtggacgaggaagtcacttatctggaggacatgctaggaatcgagcctcttgatctgcatttcctagtcgaacctaccaagcagatatcctgctcagtccatctgaccaacgctacgaatgactgtttcgccttcattgttcagacgacgaacccgaagcagtactgcatacagccggacagaggcgtcgttccaccacgatctgagtgtagtgttgccatcgtattatcgcaagaaccgacgcataataagcgatgcagcatggaggacgagctaagcgtgcagagcaccagagtggatgagggtgtgacagctgcggatgtgagtgaagcgttgttcactggaaaggaagatagaacggtcgatcacgtgagcctgatggtcggtttcgacatgtcgccatcgccacctgaggaacaaacggaggacttcacgtttgcaccactggcgtcgttgtacgacgaggagccacagttaagcgcggcgaaggtatcagtatggacatccaatcaggtgcgtgtgtgtgctttctcgctctggattccttcgcctgattggatcatgcatgactcgctctcagagtgcgcgtttacagttggggcgttctggtcgcttctctaagaagaagctagtgtctattctgaaatcctggcgagcaagattaaaggtatcatcccataagaaactcgagactccaaagcatgactgtgagattcctgaagctgtagagcatgaagaagttgccgcgcccaggtgtcccaaaggaccactgccacagcgcgatctttctccactgggcgaagcatgttctaggatgaacatgacggcgatccatgagatcctagtgaacagacattacagagatgatgacctagacccaaacgtgccgtcgctcgaggaatggacacagcagagcagggatatgttggatgataggaaacgtggggacttcacttttcgtgataaagatttccgagcagccatagactgtgtatggatgtggggccaaagaaggcgtcaccaacagttctcgttcgacgcagttgctgccacctcatgtgcggcaacctggacgccgccctccgcgatgcaatgcaagcgcagcgtcagtatcccgactgcccaacctcactgtacatgcaagcagtggcactttcaaagctagggatgcatagtcaagccatgggcatgctgattgaggcgtcggagatggaagcgaatcagaaaaagacccgaaaagcagcttaagaagactcaacatgggcgaaacctatataccttcgttttgtttctgtaagctattcttgattgttgtatctgcttgccaaattgtctaggttggagtggaattgggaagctttacctcttggggataatgcatttcttgttgtattcccctctgaggatgaaatgctccgtatggctgatattgagtataagctcaagagtggaatttctattcatatggattaggcctggagatgctaatccggcctattttttttggatgagatttgggtgcatgtttctggtgttccgcatgaatggctgacacttcttggcattctgggcactactcttgacatacaggaaggggattattcgcctgctggttactcttgacatacaggaaggggatctatgattggcactactattgacaaagtggggtatgagattacaatcactcccgagccgtcggattttgaaccagcaatgcctcccaaatttgacaaggaggatggggattcaggcgggggagagagaatctggtacgtcgagaaagaagcaaaaaagtgcgacaagctcctttcaaatttgtaagatagctcccatgagaagctagatagggttctcatgacaaccaacccacttgtctctgtacaggct

SEQ ID NO: 212910 - DNA, 2701 bp, Zea Mays
tgttcaggaaggacccatctgcgatgctcatctaattaaggttacctggtcatcttgctactcggtcgcctacaggatcggatagcttactctatctataatcacaccgagcaaactgtccatcctagctacaatgggtagcacgcacaaggaagaagtaggtgtcctggaggaaatacttgacgggagaaaagagccgaggaagctatctttatcagttctaaaacacatcacaaatgacttctcgcacgagcgaataatcggttatggtgggtgcggagaggtttacaagggcatcctgcaaaacggaagcgtcgctgtgaagaaaatcttcagcaacctaaatgttgaagataaggaatttgatcgagagattcagagcatgatgcaggtgaagcatccaaacgtagtgcggtttattggctactgttctaacacagagcatgaactgatgagaaaagaaggcaagtatattaaggtcgaggtgcgagaaaggctgctctgtttcgagcatatcagcaacggaagcctccgcagccacattacagatggactaagagggcttgaatggcacgcacggtataaaataattaagggaatttgtgagggcctacatcatcttcacatggaaaaaaacatcattcacatggatcttaaacctgccaacatactagtacatgatcaaatggtaccaaagattgcagactttggtctatcaaggctggctgaagtatcacgtactatgagcaatgaacggcttttatccctaggatactgcgctccagaataccaataccatggcaaaatgtcccttaagtctgacatctatagtttaggtgtcataatgctggagctggtgaccgggagcaaggaggagccggacattactaatgaagtcacttatctggaggacatgctaggaatcgagcctcttgatctgcatttcctagtcgaacctaccaagcagatatcctgctcagtccatctgaccaacgctacgaatgactgtttcgccttcattgttcagacgacgaacccgaagcagtactgcatacagccggacagaggcgtcgttccaccacgatctgagtgtagtgttgccatcgtattatcgcaagaaccgacgcataataagcgatgcagcatggaggacgagctaagcgtgcagagcaccagagtggatgagggtgtgacagctgcggatgtgagtgaagcgttgttcactggaaaggaagatagaacggtcgatcacgtgagcctgatggtcggtttcgacatgtcgccatcgccacctgaggaacaaacggaggacttcacgtttgcaccactggcgtcgttgtacgacgaggagccacagttaagcgcggcgaaggtatcagtatggacatccaatcagttggggcgttctggtcgcttctctaagaagaagctagtgtctattctgaaatcctggcgagcaagattaaaggtatcatcccataagaaactcgagactccaaagcatgactgtgagattcctgaagctgtagagcatgaagaagttgccgcgcccaggtgtcccaaaggaccactgccacagcgcgatctttctccactgggcgaagcatgttctaggatgaacatgacggcgatccatgagatcctagtgaacagacattacagagatgatgacctagacccaaacgtgccgtcgctcgaggaatggacacagcagagcagggatatgttggatgataggaaacgtggggacttcacttttcgtgataaagatttccgagcagccatagactggtataccaagtgtatggatgtggggccaaagaaggcgtcaccaacagttctcgttcgacgcagttgctgccacctcatgtgcggcaacctggacgccgccctccgcgatgcaatgcaagcgcagcgtcagtatcccgactgcccaacctcactgtacatgcaagcagtggcactttcaaagctagggatgcatagtcaagccatgggcatgctgattgaggcgtcggagatggaagcgaatcagaaaaagacccgaaaagcagcttaagaagactcaacatgggcgaaacctatataccttcgttttgtttctgtaagctattcttgattgttgtatctgcttgccaaattgtctaggttggagtggaattgggaagctttacctcttggggataatgcatttcttgttgtattcccctctgaggatgaaatgctccgtatggctgatattgagtataagctcaagagtggaatttctattcatatggattaggcctggagatgctaatccggcctattttttttggatgagatttgggtgcatgtttctggtgttccgcatgaatggctgacacttcttggcattctgggcactactcttgacatacaggaaggggattattcgcctgctggttactcttgacatacaggaaggggatctatgattggcactactattgacaaagtggggtatgagattacaatcactcccgagccgtcggattttgaaccagcaatgcctcccaaatttgacaaggaggatggggattcaggcgggggagagagaatctggtacgtcgagaaagaagcaaaaaagtgcgacaagctcctttcaaatttgtaagatagctcccatgagaagctagatagggttctcatgacaaccaacccacttgtctctgtacaggct

SEQ ID NO: 212911 - DNA, 514 bp, Zea Mays
gttgcttagggaagctgaaccttgttcttctgccatcatctagcatgcggcttacctttgtttgtgatgatggttatccagagcaactagctctcttgagcaacgactttgaattttcggaagttatgattgaagaaatatcagctgataattctagacgctctttcctaatcagaatttcagaatctaaagtgttttactactggtgtgctgagaagtcgaaggaagattgaatggaacttcttgcaaaggcttacacatacctgttttgacaagagccgagcagcgatgcttccatttcgggccacgacctagctaaaggctaatggttccaaatgtatgaagtaccgaagacagggttggctcctcgttttttgtcatgtcaaaaaatcgtgtatgattgcgacaatattggcaaaatatcgttgtactttatattttgatatactgtgaacaaaacaagtgccctatgagaccatcgtgatttatgcattttcaaactaaatttgcgaca

SEQ ID NO: 212912 - DNA, 2229 bp, Zea Mays
acgtgcgcgccaccacctcccatgcaagggcagtcgtagcagcacggccgtctcgtgcccgtgcccgtgcccgccgcgccgcttttcgatcgacgcgatacgcccacccgcagcgccgttctctttggcagatccatggccgtggatagtcccccgccggcgtcaccgcagcgacggcagtccgaggccggcgcgggcgggcggcggacggacaggcacggccgacgcctcgaggtgtacaacgaggtgctcgtccgcctgcgctcctccgccgcggtctctccggccttcgaggacgcgctctgggcccacttccaccgcctccccgcccggtacgcgctggatgtgaacgcggagagggcggacgatgtggtcacccaccagcggctgctccaggaggcgcgcgatccggaacgccggcccgccttgtccgtgcgcgtcgtgcaggtttctaggattatcgatactgatgtgggcgatccatatgatcctgacatggaggcagttgcttcgaatcgtcctgaggctaatgaaacggttcacccacctccagcatttggttcttcctccaatctagaggcgcttgcgcttgaaacaagtgagagtgatgtaaggagcactggtgatactgatcacagtgtacatctaatttccaggccgatgcacgagataacttttgcaacgattgataagccaaagctccttagtcagctgacttgtttgcttgctgagctcggtcttgacatccaagaagcacatgcattttcaacaattgatggctactcattggatgtatttgttgtcactggatggcatcttgggagtactgagcagctacaaggagatttgcttcagaaatttcacaaaatcgagctttctgtacagacacaagcttggcctttatccagctcattatcaccgtcatcagaaggtcagcaaggtggagaaagtatgtcatctgcaagtgttgaaattccaacagatggtgtagatgtttgggaacttgaccttaagctgctcaagtttggaagcaaagttgcttccggatcaaatggtgacctgtaccgtggaacatactgcaatcaggatgtggccatcaaagtagtgaggcctgagcgcatcagtgcagatatgtaccgagattttgcacaagaagtgtacatcatgagaaaggtccgtcacaagaatgtagtgcagtttatcggtgcatgcacaagacaaccaacactgtatattgtaacagatttcatgccaggagggagtgtctatgattacctccataaaaataataatgctttcaagcttcctgaaatactgaaagtggcgaccgacatcactaaaggaatgaactacctgcaccagaacaacataattcaccgcgatctcaagactgcaaatcttctcatggatgaaaacaaggttgtaaaggttgcagactttggtgttgcacgagtgaaagaccaatctggagtgatgactgcagaaactggaacttaccgttggatggcacctgaggtcatagaacataagccctacgatcacaaagcggatgtttttagctttgctattgttctttgggaactgctaaccggcaagatcccttacgagtaccttacaccactgcaagcagcaataggtgttgttcagaagggtattaggccaacaattccaaaagacacacatcccaagctcatcgagcttcttcagaaatgttggcatcgagatccagctgagaggcccgacttctccgagatactggagatccttcagaaactctccaaagaggtgagaactgacactgagggtcgccacaaaacgaagtcagggttcctttcagcgctgaagagaagccactgaagggcactgggcacccagccacctatgatagtttactccaatgtaatgttggtgattgatgcacgctgtaatcacaatcacagcatgattctgaagttctgatgcaagttgaatagtgcgctgtagttgtacagtcacgattttctcgtgtaattgcagttgtctctctctttttggctcaatttgcccttttgttttgttgctttgccctcatgtaatcgtagatgatatttgttggatgttctaacgactggcatagattgaagtgtgctgaaataaattcctgctggtgagaaacagcgcgcttcgtgtcagttaactcggagatttatcatagatgagatgaatttactgatgcagttgactacttgt

SEQ ID NO: 212913 - DNA, 1256 bp, Zea Mays
cctcgggcgagccggagatgtgtccgccgttggaggggggccttgggcgagacggaaatcctccggggtcagctgcccctgtccgagtctaggctcggacgagacatgatcgagtcgctcgaatttactgatccctgacttaatcgcacccatcaggcctttgcagctttatgctgatggagttaccaactgagaattaggcgtcttgaggttacccataattatggttcccgacagacctaaaccacattccttcctttcatcgttgcatcttccctccgatccttccggtgggggcggccagatgcgaccaaattcctcctattccctctcctctccgcccacccttctctcgcccgcgtaactcctctctgtcgcctaccaaaagcggagcaaccgaggcaagaggaagggggtgggcgaggaaaagcgatttggcttctcttccagttccggattcatcgtaagaaacacatgactgcagtggatatttgaagcatgaaaaggcaaaccatctcactcttcaaacagttcacttagcacacttaatgacggaggtgtttgcatgacattctctttgagctgatatatatgggtggctgcattggtaatttaagaaaatctcagtcacttccagattctaagccgaaacgatctttaagaaagaaatctctggattcatctactggaaacagaagacgatggcaatcgagtctagaagcaatggagaagaatgttagcatatcagtttctcttgaggggaatatctcttctattcccaactcgatagtcaacgattctaaaacgttaatggaaaatggggtagatacatcatttatcaaccatgttggtccgcaacatatgatgatctcttgtcgacaagtgagcgttttccacagcgaatcccactatctgagatggttgattttttggtcgacatatggcacgaagaagggctctatggttagctgacgtctggctttctttccgccttgcatttagaatgtggtcaacttcctccccacaaaagatgtaatcttttgaagaaatgaaaaaaaaactacttagtcgcaaaattagttttagcatttgatttttttttaaaaaaactgttatttggaaagatactacagtggtttggtatatttggtgatgagctgtcagaggtttgtttatgttaaatgactcgatgacctgtcattcctgaatgggcggttgcttaagaatagaagagggagcattttctgtagtatcat

SEQ ID NO: 212914 - DNA, 2645 bp, Zea Mays
cgcgtttccaaatccaaaaggaaaacaatcgcgagcacgagacggggacgagcagctccacaacaattcgtgcctgcctgccctgcctctcggacacctccctcgtcctccccctcctacgccgcccccgtcctcggcccccacgcgctcgcgcggcgcacgaggcgacgaacccgacctcctcctccgcgcccgtccctgccaccggtcgccgatattggaaggagctcggagggctggggcgctgacctgagttttatggagagaggatgccagagctgcgaagcagtactcgccaagcatgcctaaggtcgaagaagcttgaagatctgcagctaggagagccgcctgcgaaaccggtctcacctgctccgccgagggcaggaaagcgtgctcctacacgtgctgctaggggcagaaagggtgccactgggaaaggagtgccccctgcacctacgactagaagaaagcggggtaatattgtcgacttggaagctgatccagcttgtgaagacccccctaaagctgtcaagggactggaagttgctgctgctgctgcacccaagaaccttcctttgaaggaggtagccgaggttggtgttctgaaaatgaatggtgtgagtgcagagaagattattggggctgaagatgaatcaacagcgacacctgtgccagagagggttcaagtaggtaattctccagagtacataactgacaggaagttaggtaaaggtggttttggtcaggtctatgttggtcgaagggtttctggtggagctgcccgcactggtcctgatgcatatgaggtcgcattgaaattagagcatcgaaacagtaaaggatgcaattatggccctccatatgagtggcaggtttataacactctcaatggttgctatggcataccatcggtccactacaagggtcgtcagggcgactactatatacttgtaatggatatgcttggtcccagcctttgggacgtgtggaattcaatggggcaggcgatgactccaaatatggctgcttgcattgctgtagagagcatatcgattcttgagaagctccattctaaagggtttgtgcatggtgatgtgaaaccagagaattttctgcttggtcagcctggatcgcctgacgataagaaactttaccttatagatctcggtttagcatccaagtggaaagagaataatggtcatcatgttgattatgatcaacggcctgatatctttaggggaacaattagatatgcgagtgtccatgctcatttggggcgcactggtagtaggagggatgatttagagtcactggcatacacccttattttcctgattagaggaagattgccttggcaaggctaccagggagataccaagagtttccttgtttgcaagaagaaaatggctacttctccagagatgctttgttgtttctgtccagctccattcaaacagtttcttgagattgtcacaaatatgaaatttgatgaagagccaaattatgccaagcttatctctatttttgatggtttgattgaagcacctgcgtcgagaccagtcagaattgatggggccctcaaggttggacagaaacgtggaagattgcatgcaaatctagaagatgaacaacctaaaaagaaggtaccattacaatgtggctgactcaaggctaagtcaacatatagaaaagggtaatgatgacgggctttacgttagttgtgtggcttcctcggcaaacctttgggcactcatcatggacgctggaactggtttctgttctcaagtttacgagctctcaccagtttttctccacaaggactggataatggagcagtgggagaaaagttactacataacagcaattgctggatcaaccaatgggagttcattggttgtcatgtccaaaggaactccttacacacagcaatcatacaaggttagcgaatcgttcccttacaagtggatcaataaaaagtggaaagaagggttccatgtaacatctatggccactgctggaaatcgctggggcgtagttatgtcaaggaactcagggttttctactcaggttgtagagttggacttcctgtaccctagcgaaggcattcatcggcgatgggagagtggttacaggataacttccacagcggccaccaatgaccaagctgctttcatcttgagcatgccaaagcggaagccgatggacgagacgcaagaaaccctccggacctctgcctttcccagttcacatgtcaaggagaaatgggcgaagaatctctacatagcctcgatctgctacggacgaacagtgtgctgatagtcgaagagaggggcggccgcgctgactcaatacggtggcttgcgtcaagagattagagatgtgagatgaacattaaatcaaaaccagttctaatgatgataggatcagtagatctgatgatacggtatggtatcctaccgtagctgtaaagaaatgttgtacccagtgccggccgcgagaccgttactgccatgaagtgaagctaatgcattttggagtctcttcccgggaaaatggaacacaatataatgctcatgtgcaaatcatataggtttaatttcttgcgcactagagtttgcacgtcaaaaaaaatcataatctgaaaa

SEQ ID NO: 212915 - DNA, 2652 bp, Zea Mays
gcagctccacaacaattcgtgcctgcctgccctgcctctcggacacctccctcgtcctccccctcctacgccgcccccgtcctcggcccccacgcgctcgcgcggcgcacgaggcgacgaacccgacctcctcctccgcgcccgtccctgccaccggtcgccgatattggaaggagctcggagggctggggcgctgacctgagttttatggagagaggatgccagagctgcgaagcagtactcgccaagcatgcctaaggtcgaagaagcttgaagatctgcagctaggagagccgcctgcgaaaccggtctcacctgctccgccgagggcaggaaagcgtgctcctacacgtgctgctaggggcagaaagggtgccactgggaaaggagtgccccctgcacctacgactagaagaaagcggggtaatattgtcgacttggaagctgatccagcttgtgaagacccccctaaagctgtcaagggactggaagttgctgctgctgctgcacccaagaaccttcctttgaaggaggtagccgaggttggtgttctgaaaatgaatggtgtgagtgcagagaagattattggggctgaagatgaatcaacagcgacacctgtgccagagagggtaattctccagagtacataactgacaggaagttaggtaaaggtggttttggtcaggtctatgttggtcgaagggtttctggtggagctgcccgcactggtcctgatgcatatgaggtcgcattgaaattagagcatcgaaacagtaaaggatgcaattatggccctccatatgagtggcaggtttataacactctcaatggttgctatggcataccatcggtccactacaagggtcgtcagggcgactactatatacttgtaatggatatgcttggtcccagcctttgggacgtgtggaattcaatggggcaggcgatgactccaaatatggctgcttgcattgctgtagagagcatatcgattcttgagaagctccattctaaagggtttgtgcatggtgatgtgaaaccagagaattttctgcttggtcagcctggatcgcctgacgataagaaactttaccttatagatctcggtttagcatccaagtggaaagagaataatggtcatcatgttgattatgatcaacggcctgatatctttaggggaacaattagatatgcgagtgtccatgctcatttggggcgcactggtagtaggagggatgatttagagtcactggcatacacccttattttcctgattagaggaagattgccttggcaaggctaccagggagataccaagagtttccttgtttgcaagaagaaaatggctacttctccagagatgctttgttgtttctgtccagctccattcaaacagtttcttgagattgtcacaaatatgaaatttgatgaagagccaaattatgccaagcttatctctatttttgatggtttgattgaagcacctgcgtcgagaccagtcagaattgatggggccctcaaggttggacagaaacgtggaagattgcatgcaaatctagaagatgaacaacctaaaaagaaggttagattagggagcccagcggctcaatggatttcagtttataatgctaggcgacccatgaagcagaggtaccattacaatgtggctgactcaaggctaagtcaacatatagaaaagggtaatgatgacgggctttacgttagttgtgtggcttcctcggcaaacctttgggcactcatcatggacgctggaactggtttctgttctcaagtttacgagctctcaccagtttttctccacaaggactggataatggagcagtgggagaaaagttactacataacagcaattgctggatcaaccaatgggagttcattggttgtcatgtccaaaggaactccttacacacagcaatcatacaaggttagcgaatcgttcccttacaagtggatcaataaaaagtggaaagaagggttccatgtaacatctatggccactgctggaaatcgctggggcgtagttatgtcaaggaactcagggttttctactcaggttgtagagttggacttcctgtaccctagcgaaggcattcatcggcgatgggagagtggttacaggataacttccacagcggccaccaatgaccaagctgctttcatcttgagcatgccaaagcggaagccgatggacgagacgcaagaaaccctccggacctctgcctttcccagttcacatgtcaaggagaaatgggcgaagaatctctacatagcctcgatctgctacggacgaacagtgtgctgatagtcgaagagaggggcggccgcgctgactcaatacggtggcttgcgtcaagagattagagatgtgagatgaacattaaatcaaaaccagttctaatgatgataggatcagtagatctgatgatacggtatggtatcctaccgtagctgtaaagaaatgttgtacccagtgccggccgcgagaccgttactgccatgaagtgaagctaatgcattttggagtctcttcccgggaaaatggaacacaatataatgctcatgtgcaaatcatataggtttaatttcttgcgcactagagtttgcacgtcaaaaaaaatcataatctgaaaa

SEQ ID NO: 212916 - DNA, 2534 bp, Zea Mays
gcagctccacaacaattcgtgcctgcctgccctgcctctcggacacctccctcgtcctccccctcctacgccgcccccgtcctcggcccccacgcgctcgcgcggcgcacgaggcgacgaacccgacctcctcctccgcgcccgtccctgccaccggtcgccgatattggaaggagctcggagggctggggcgctgacctgagttttatggagagaggatgccagagctgcgaagcagtactcgccaagcatgcctaaggtcgaagaagcttgaagatctgcagctaggagagccgcctgcgaaaccggtctcacctgctccgccgagggcaggaaagcgtgctcctacacgtgctgctaggggcagaaagggtgccactgggaaaggagtgccccctgcacctacgactagaagaaagcggggtaatattgtcgacttggaagctgatccagcttgtgaagacccccctaaagctgtcaagggactggaagttgctgctgctgctgcacccaagaaccttcctttgaaggaggtagccgaggttggtgttctgaaaatgaatggtgtgagtgcagagaagattattggggctgaagatgaatcaacagcgacacctgtgccagagagggttcaagtaggtaattctccagagtacataactgacaggaagttaggtaaaggtggttttggtcaggtctatgttggtcgaagggtttctggtggagctgcccgcactggtcctgatgcatatgaggtcgcattgaaattagagcatcgaaacagtaaaggatgcaattatggccctccatatgagtggcaggtttataacactctcaatggttgctatggcataccatcggtccactacaagggtcgtcagggcgactactatatacttgtaatggatatgcttggtcccagcctttgggacgtgtggaattcaatggggcaggcgatgactccaaatatggctgcttgcattgctgtagagagcatatcgattcttgagaagctccattctaaagggtttgtgcatggtgatgtgaaaccagagaattttctgcttggtcagcctggatcgcctgacgataagaaactttaccttatagatctcggtttagcatccaagtggaaagagaataatggtcatcatgttgattatgatcaacggcctgatatctttaggggaacaattagatatgcgagtgtccatgctcatttggggcgcactggtagtaggagggatgatttagagtcactggcatacacccttattttcctgattagaggaagattgccttggcaaggctaccagggagataccaagagtttccttgtttgcaagaagaaaatggctacttctccagagatgctttgttgtttctgtccagctccattcaaacagtttcttgagattgtcacaaatatgaaatttgatgaagagccaaattatgccaagcttatctctatttttgatggtttgattgaagcacctgcgtcgagaccagtcagaattgatggggccctcaaggtaccattacaatgtggctgactcaaggctaagtcaacatatagaaaagggtaatgatgacgggctttacgttagttgtgtggcttcctcggcaaacctttgggcactcatcatggacgctggaactggtttctgttctcaagtttacgagctctcaccagtttttctccacaaggactggataatggagcagtgggagaaaagttactacataacagcaattgctggatcaaccaatgggagttcattggttgtcatgtccaaaggaactccttacacacagcaatcatacaaggttagcgaatcgttcccttacaagtggatcaataaaaagtggaaagaagggttccatgtaacatctatggccactgctggaaatcgctggggcgtagttatgtcaaggaactcagggttttctactcaggttgtagagttggacttcctgtaccctagcgaaggcattcatcggcgatgggagagtggttacaggataacttccacagcggccaccaatgaccaagctgctttcatcttgagcatgccaaagcggaagccgatggacgagacgcaagaaaccctccggacctctgcctttcccagttcacatgtcaaggagaaatgggcgaagaatctctacatagcctcgatctgctacggacgaacagtgtgctgatagtcgaagagaggggcggccgcgctgactcaatacggtggcttgcgtcaagagattagagatgtgagatgaacattaaatcaaaaccagttctaatgatgataggatcagtagatctgatgatacggtatggtatcctaccgtagctgtaaagaaatgttgtacccagtgccggccgcgagaccgttactgccatgaagtgaagctaatgcattttggagtctcttcccgggaaaatggaacacaatataatgctcatgtgcaaatcatataggtttaatttcttgcgcactagagtttgcacgtcaaaaaaaatcataatctgaaaa

SEQ ID NO: 212917 - DNA, 2654 bp, Zea Mays
gcagctccacaacaattcgtgcctgcctgccctgcctctcggacacctccctcgtcctccccctcctacgccgcccccgtcctcggcccccacgcgctcgcgcggcgcacgaggcgacgaacccgacctcctcctccgcgcccgtccctgccaccggtcgccgatattggaaggagctcggagggctggggcgctgacctgagttttatggagagaggatgccagagctgcgaagcagtactcgccaagcatgcctaaggtcgaagaagcttgaagatctgcagctaggagagccgcctgcgaaaccggtctcacctgctccgccgagggcaggaaagcgtgctcctacacgtgctgctaggggcagaaagggtgccactgggaaaggagtgccccctgcacctacgactagaagaaagcggggtaatattgtcgacttggaagctgatccagcttgtgaagacccccctaaagctgtcaagggactggaagttgctgctgctgctgcacccaagaaccttcctttgaaggaggtagccgaggttggtgttctgaaaatgaatggtgtgagtgcagagaagattattggggctgaagatgaatcaacagcgacacctgtgccagagagggttcaagtaggtaattctccagagtacataactgacaggaagttaggtaaaggtggttttggtcaggtctatgttggtcgaagggtttctggtggagctgcccgcactggtcctgatgcatatgaggtcgcattgaaattagagcatcgaaacagtaaaggatgcaattatggccctccatatgagtggcagcactctcaatggttgctatggcataccatcggtccactacaagggtcgtcagggcgactactatatacttgtaatggatatgcttggtcccagcctttgggacgtgtggaattcaatggggcaggcgatgactccaaatatggctgcttgcattgctgtagagagcatatcgattcttgagaagctccattctaaagggtttgtgcatggtgatgtgaaaccagagaattttctgcttggtcagcctggatcgcctgacgataagaaactttaccttatagatctcggtttagcatccaagtggaaagagaataatggtcatcatgttgattatgatcaacggcctgatatctttaggggaacaattagatatgcgagtgtccatgctcatttggggcgcactggtagtaggagggatgatttagagtcactggcatacacccttattttcctgattagaggaagattgccttggcaaggctaccagggagataccaagagtttccttgtttgcaagaagaaaatggctacttctccagagatgctttgttgtttctgtccagctccattcaaacagtttcttgagattgtcacaaatatgaaatttgatgaagagccaaattatgccaagcttatctctatttttgatggtttgattgaagcacctgcgtcgagaccagtcagaattgatggggccctcaaggttggacagaaacgtggaagattgcatgcaaatctagaagatgaacaacctaaaaagaaggttagattagggagcccagcggctcaatggatttcagtttataatgctaggcgacccatgaagcagaggtaccattacaatgtggctgactcaaggctaagtcaacatatagaaaagggtaatgatgacgggctttacgttagttgtgtggcttcctcggcaaacctttgggcactcatcatggacgctggaactggtttctgttctcaagtttacgagctctcaccagtttttctccacaaggactggataatggagcagtgggagaaaagttactacataacagcaattgctggatcaaccaatgggagttcattggttgtcatgtccaaaggaactccttacacacagcaatcatacaaggttagcgaatcgttcccttacaagtggatcaataaaaagtggaaagaagggttccatgtaacatctatggccactgctggaaatcgctggggcgtagttatgtcaaggaactcagggttttctactcaggttgtagagttggacttcctgtaccctagcgaaggcattcatcggcgatgggagagtggttacaggataacttccacagcggccaccaatgaccaagctgctttcatcttgagcatgccaaagcggaagccgatggacgagacgcaagaaaccctccggacctctgcctttcccagttcacatgtcaaggagaaatgggcgaagaatctctacatagcctcgatctgctacggacgaacagtgtgctgatagtcgaagagaggggcggccgcgctgactcaatacggtggcttgcgtcaagagattagagatgtgagatgaacattaaatcaaaaccagttctaatgatgataggatcagtagatctgatgatacggtatggtatcctaccgtagctgtaaagaaatgttgtacccagtgccggccgcgagaccgttactgccatgaagtgaagctaatgcattttggagtctcttcccgggaaaatggaacacaatataatgctcatgtgcaaatcatataggtttaatttcttgcgcactagagtttgcacgtcaaaaaaaatcataatctgaaaa

SEQ ID NO: 212918 - DNA, 2631 bp, Zea Mays
gcagctccacaacaattcgtgcctgcctgccctgcctctcggacacctccctcgtcctccccctcctacgccgcccccgtcctcggcccccacgcgctcgcgcggcgcacgaggcgacgaacccgacctcctcctccgcgcccgtccctgccaccggtcgccgatgagctcggagggctggggcgctgacctgagttttatggagagaggatgccagagctgcgaagcagtactcgccaagcatgcctaaggtcgaagaagcttgaagatctgcagctaggagagccgcctgcgaaaccggtctcacctgctccgccgagggcaggaaagcgtgctcctacacgtgctgctaggggcagaaagggtgccactgggaaaggagtgccccctgcacctacgactagaagaaagcggggtaatattgtcgacttggaagctgatccagcttgtgaagacccccctaaagctgtcaagggactggaagttgctgctgctgctgcacccaagaaccttcctttgaaggaggtagccgaggttggtgttctgaaaatgaatggtgtgagtgcagagaagattattggggctgaagatgaatcaacagcgacacctgtgccagagagggttcaagtaggtaattctccagagtacataactgacaggaagttaggtaaaggtggttttggtcaggtctatgttggtcgaagggtttctggtggagctgcccgcactggtcctgatgcatatgaggtcgcattgaaattagagcatcgaaacagtaaaggatgcaattatggccctccatatgagtggcaggtttataacactctcaatggttgctatggcataccatcggtccactacaagggtcgtcagggcgactactatatacttcctttgggacgtgtggaattcaatggggcaggcgatgactccaaatatggctgcttgcattgctgtagagagcatatcgattcttgagaagctccattctaaagggtttgtgcatggtgatgtgaaaccagagaattttctgcttggtcagcctggatcgcctgacgataagaaactttaccttatagatctcggtttagcatccaagtggaaagagaataatggtcatcatgttgattatgatcaacggcctgatatctttaggggaacaattagatatgcgagtgtccatgctcatttggggcgcactggtagtaggagggatgatttagagtcactggcatacacccttattttcctgattagaggaagattgccttggcaaggctaccagggagataccaagagtttccttgtttgcaagaagaaaatggctacttctccagagatgctttgttgtttctgtccagctccattcaaacagtttcttgagattgtcacaaatatgaaatttgatgaagagccaaattatgccaagcttatctctatttttgatggtttgattgaagcacctgcgtcgagaccagtcagaattgatggggccctcaaggttggacagaaacgtggaagattgcatgcaaatctagaagatgaacaacctaaaaagaaggttagattagggagcccagcggctcaatggatttcagtttataatgctaggcgacccatgaagcagaggtaccattacaatgtggctgactcaaggctaagtcaacatatagaaaagggtaatgatgacgggctttacgttagttgtgtggcttcctcggcaaacctttgggcactcatcatggacgctggaactggtttctgttctcaagtttacgagctctcaccagtttttctccacaaggactggataatggagcagtgggagaaaagttactacataacagcaattgctggatcaaccaatgggagttcattggttgtcatgtccaaaggaactccttacacacagcaatcatacaaggttagcgaatcgttcccttacaagtggatcaataaaaagtggaaagaagggttccatgtaacatctatggccactgctggaaatcgctggggcgtagttatgtcaaggaactcagggttttctactcaggttgtagagttggacttcctgtaccctagcgaaggcattcatcggcgatgggagagtggttacaggataacttccacagcggccaccaatgaccaagctgctttcatcttgagcatgccaaagcggaagccgatggacgagacgcaagaaaccctccggacctctgcctttcccagttcacatgtcaaggagaaatgggcgaagaatctctacatagcctcgatctgctacggacgaacagtgtgctgatagtcgaagagaggggcggccgcgctgactcaatacggtggcttgcgtcaagagattagagatgtgagatgaacattaaatcaaaaccagttctaatgatgataggatcagtagatctgatgatacggtatggtatcctaccgtagctgtaaagaaatgttgtacccagtgccggccgcgagaccgttactgccatgaagtgaagctaatgcattttggagtctcttcccgggaaaatggaacacaatataatgctcatgtgcaaatcatataggtttaatttcttgcgcactagagtttgcacgtcaaaaaaaatcataatctgaaaa

SEQ ID NO: 212919 - DNA, 2586 bp, Zea Mays
gcagctccacaacaattcgtgcctgcctgccctgcctctcggacacctccctcgtcctccccctcctacgccgcccccgtcctcggcccccacgcgctcgcgcggcgcacgaggcgacgaacccgacctcctcctccgcgcccgtccctgccaccggtcgccgatgagctcggagggctggggcgctgacctgagttttatggagagaggatgccagagctgcgaagcagtactcgccaagcatgcctaaggtcgaagaagcttgaagatctgcagctaggagagccgcctgcgaaaccggtctcacctgctccgccgagggcaggaaagcgtgctcctacacgtgctgctaggggcagaaagggtgccactgggaaaggagtgccccctgcacctacgactagaagaaagcggggtaatattgtcgacttggaagctgatccagcttgtgaagacccccctaaagctgtcaagggactggaagttgctgctgctgctgcacccaagaaccttcctttgaaggaggtagccgaggttggtgttctgaaaatgaatggtgtgagtgcagagaagattattggggctgaagatgaatcaacagcgacacctgtgccagagagggttcaagtaggtaattctccagagtacataactgacaggaagttaggtaaaggtggttttggtcaggtctatgttggtcgaagggtttctggtggagctgcccgcactggtcctgatgcatatgaggtcgcattgaaattagagcatcgaaacagtaaaggatgcaattatggccctccatatgagtggcaggtttataacactctcaatggttgctatggcataccatcggtccactacaagggtcgtcagggcgactactatatacttgtaatggatatgcttggtcccagcctttgggacgtgtggaattcaatggggcaggcgatgactccaaatatggctgcttgcattgctgtagagagcatatcgattcttgagaagctccattctaaagggtttgtgcatggtgatgtgaaaccagagaattttctgcttggtcagcctggatcgcctgacgataagaaactttaccttatagatctcggtttagcatccaagtggaaagagaataatggtcatcatgttgattatgatcaacggcctgatatctttaggggaacaattagatatgcgagtgtccatgctcatttggggcgcactggtagtaggagggatgatttagagtcactggcatacacccttattttcctgattagaggaagattgccttggcaaggctaccagggagataccaagagtttccttgtttgcaagaagaaaatggctacttctccagagatgctttgttgtttctgtccagctccattcaaacagtttcttgagattgtcacaaatatgaaatttgatgaagagccaaattatgccaagcttatctctatttttgatggtttgattgaagcacctgcgtcgagaccagtcagaattgatggggccctcaaggttggacagaaacgtggaagattgcatgcaaatctagaagatgaacaacctaaaaagaaggtaccattacaatgtggctgactcaaggctaagtcaacatatagaaaagggtaatgatgacgggctttacgttagttgtgtggcttcctcggcaaacctttgggcactcatcatggacgctggaactggtttctgttctcaagtttacgagctctcaccagtttttctccacaaggactggataatggagcagtgggagaaaagttactacataacagcaattgctggatcaaccaatgggagttcattggttgtcatgtccaaaggaactccttacacacagcaatcatacaaggttagcgaatcgttcccttacaagtggatcaataaaaagtggaaagaagggttccatgtaacatctatggccactgctggaaatcgctggggcgtagttatgtcaaggaactcagggttttctactcaggttgtagagttggacttcctgtaccctagcgaaggcattcatcggcgatgggagagtggttacaggataacttccacagcggccaccaatgaccaagctgctttcatcttgagcatgccaaagcggaagccgatggacgagacgcaagaaaccctccggacctctgcctttcccagttcacatgtcaaggagaaatgggcgaagaatctctacatagcctcgatctgctacggacgaacagtgtgctgatagtcgaagagaggggcggccgcgctgactcaatacggtggcttgcgtcaagagattagagatgtgagatgaacattaaatcaaaaccagttctaatgatgataggatcagtagatctgatgatacggtatggtatcctaccgtagctgtaaagaaatgttgtacccagtgccggccgcgagaccgttactgccatgaagtgaagctaatgcattttggagtctcttcccgggaaaatggaacacaatataatgctcatgtgcaaatcatataggtttaatttcttgcgcactagagtttgcacgtcaaaaaaaatcataatctgaaaa

SEQ ID NO: 212920 - DNA, 2526 bp, Zea Mays
gcagctccacaacaattcgtgcctgcctgccctgcctctcggacacctccctcgtcctccccctcctacgccgcccccgtcctcggcccccacgcgctcgcgcggcgcacgaggcgacgaacccgacctcctcctccgcgcccgtccctgccaccggtcgccgatgagctcggagggctggggcgctgacctgagttttatggagagaggatgccagagctgcgaagcagtactcgccaagcatgcctaaggtcgaagaagcttgaagatctgcagctaggagagccgcctgcgaaaccggtctcacctgctccgccgagggcaggaaagcgtgctcctacacgtgctgctaggggcagaaagggtgccactgggaaaggagtgccccctgcacctacgactagaagaaagcggggtaatattgtcgacttggaagctgatccagcttgtgaagacccccctaaagctgtcaagggactggaagttgctgctgctgctgcacccaagaaccttcctttgaaggaggtagccgaggttggtgttctgaaaatgaatggtgtgagtgcagagaagattattggggctgaagatgaatcaacagcgacacctgtgccagagagggttcaagtaggtaattctccagagtacataactgacaggaagttaggtaaaggtggttttggtcaggtctatgttggtcgaagggtttctggtggagctgcccgcactggtcctgatgcatatgaggtcgcattgaaattagagcatcgaaacagtaaaggatgcaattatggccctccatatgagtggcaggtttataacactctcaatggttgctatggcataccatcggtccactacaagggtcgtcagggcgactactatatacttgtaatggatatgcttggtcccagcctttgggacgtgtggaattcaatggggcaggcgatgactccaaatatggctgcttgcattgctgtagagagcatatcgattcttgagaagctccattctaaagggtttgtgcatggtgatgtgaaaccagagaattttctgcttggtcagcctggatcgcctgacgataagaaactttaccttatagatctcggtttagcatccaagtggaaagagaataatggtcatcatgttgattatgatcaacggcctgatatctttaggggaacaattagatatgcgagtgtccatgctcatttggggcgcactggtagtaggagggatgatttagagtcactggcatacacccttattttcctgattagaggaagattgccttggcaaggctaccagggagataccaagagtttccttgtttgcaagaagaaaatggctacttctccagagatgctttgttgtttctgtccagctccattcaaacagtttcttgagattgtcacaaatatgaaatttgatgaagagccaaattatgccaagcttatctctatttttgatggtttgattgaagcacctgcgtcgagaccagtcagaattgatggggccctcaaggtaccattacaatgtggctgactcaaggctaagtcaacatatagaaaagggtaatgatgacgggctttacgttagttgtgtggcttcctcggcaaacctttgggcactcatcatggacgctggaactggtttctgttctcaagtttacgagctctcaccagtttttctccacaaggactggataatggagcagtgggagaaaagttactacataacagcaattgctggatcaaccaatgggagttcattggttgtcatgtccaaaggaactccttacacacagcaatcatacaaggttagcgaatcgttcccttacaagtggatcaataaaaagtggaaagaagggttccatgtaacatctatggccactgctggaaatcgctggggcgtagttatgtcaaggaactcagggttttctactcaggttgtagagttggacttcctgtaccctagcgaaggcattcatcggcgatgggagagtggttacaggataacttccacagcggccaccaatgaccaagctgctttcatcttgagcatgccaaagcggaagccgatggacgagacgcaagaaaccctccggacctctgcctttcccagttcacatgtcaaggagaaatgggcgaagaatctctacatagcctcgatctgctacggacgaacagtgtgctgatagtcgaagagaggggcggccgcgctgactcaatacggtggcttgcgtcaagagattagagatgtgagatgaacattaaatcaaaaccagttctaatgatgataggatcagtagatctgatgatacggtatggtatcctaccgtagctgtaaagaaatgttgtacccagtgccggccgcgagaccgttactgccatgaagtgaagctaatgcattttggagtctcttcccgggaaaatggaacacaatataatgctcatgtgcaaatcatataggtttaatttcttgcgcactagagtttgcacgtcaaaaaaaatcataatctgaaaa

SEQ ID NO: 212921 - DNA, 2734 bp, Zea Mays
ctttttacctctattggtcgccgaccctggccatgcccagtgagctcggagggctggggcgctgacctgagttttatggagagaggatgccagagctgcgaagcagtactcgccaagcatgcctaaggtcgaagaagcttgaagatctgcagctaggagagccgcctgcgaaaccggtctcacctgctccgccgagggcaggaaagcgtgctcctacacgtgctgctaggggcagaaagggtgccactgggaaaggagtgccccctgcacctacgactagaagaaagcggggtaatattgtcgacttggaagctgatccagcttgtgaagacccccctaaagctgtcaagggactggaagttgctgctgctgctgcacccaagaaccttcctttgaaggaggtagccgaggttggtgttctgaaaatgaatggtgtgagtgcagagaagattattggggctgaagatgaatcaacagcgacacctgtgccagagagggttcaagtaggtaattctccagagtacataactgacaggaagttaggtaaaggtggttttggtcaggtctatgttggtcgaagggtttctggtggagctgcccgcactggtcctgatgcatatgaggtcgcattgaaattagagcatcgaaacagtaaaggatgcaattatggccctccatatgagtggcaggtttataacactctcaatggttgctatggcataccatcggtccactacaagggtcgtcagggcgactactatatacttgtaatggatatgcttggtcccagcctttgggacgtgtggaattcaatggggcaggcgatgactccaaatatggctgcttgcattgctgtagagagcatatcgattcttgagaagctccattctaaagggtttgtgcatggtgatgtgaaaccagagaattttctgcttggtcagcctggatcgcctgacgataagaaactttaccttatagatctcggtttagcatccaagtggaaagagaataatggtcatcatgttgattatgatcaacggcctgatatctttaggggaacaattagatatgcgagtgtccatgctcatttggggcgcactggtagtaggagggatgatttagagtcactggcatacacccttattttcctgattagaggaagattgccttggcaaggctaccagggagataccaagagtttccttgtttgcaagaagaaaatggctacttctccagagatgctttgttgtttctgtccagctccattcaaacagtttcttgagattgtcacaaatatgaaatttgatgaagagccaaattatgccaagcttatctctatttttgatggtttgattgaagcacctgcgtcgagaccagtcagaattgatggggccctcaaggttggacagaaacgtggaagattgcatgcaaatctagaagatgaacaacctaaaaagaaggttagattagggagcccagcggctcaatggatttcagtttataatgctaggcgacccatgaagcagaggtaccattacaatgtggctgactcaaggctaagtcaacatatagaaaagggtaatgatgacgggctttacgttagttgtgtggcttcctcggcaaacctttgggcactcatcatggacgctggaactggtttctgttctcaagtttacgagctctcaccagtttttctccacaaggactggataatggagcagtgggagaaaagttactacataacagcaattgctggatcaaccaatgggagttcattggttgtcatgtccaaaggtctgaattttacttttcttattattgctcacacgtgcatattgaccctccattttctcaccattttcccagtagcagtacaaaatcctaatgtttctcttgtatgtcctatgcaatttccattttaagccccgtttgcatcgctcattaattatcatggtctgctatgatataatttggggtaatatattttcactactgcaggaactccttacacacagcaatcatacaaggttagcgaatcgttcccttacaagtggatcaataaaaagtggaaagaagggttccatgtaacatctatggccactgctggaaatcgctggggcgtagttatgtcaaggaactcagggttttctactcaggttgtagagttggacttcctgtaccctagcgaaggcattcatcggcgatgggagagtggttacaggataacttccacagcggccaccaatgaccaagctgctttcatcttgagcatgccaaagcggaagccgatggacgagacgcaagaaaccctccggacctctgcctttcccagttcacatgtcaaggagaaatgggcgaagaatctctacatagcctcgatctgctacggacgaacagtgtgctgatagtcgaagagaggggcggccgcgctgactcaatacggtggcttgcgtcaagagattagagatgtgagatgaacattaaatcaaaaccagttctaatgatgataggatcagtagatctgatgatacggtatggtatcctaccgtagctgtaaagaaatgttgtacccagtgccggccgcgagaccgttactgccatgaagtgaagctaatgcattttggagtctcttcccgggaaaatggaacacaatataatgctcatgtgcaaatcatataggtttaatttcttgcgcactagagtttgcacgtcaaaaaaaatcataatctgaaaa

SEQ ID NO: 212922 - DNA, 1873 bp, Zea Mays
ctccccgcaaagcgagcctctgggagactcgaggtcttaaatagtgtgcacctggtctcctcttccttcccctcctgttctgtccatctctaccgttccattccaattccatccccggaaagcgcaagccgcgggagagcggccggcgtacgtaccacgaggaccgccagccgagggccatggccgccggtctgtccggcgccgcgatgaccagcttcgtcgccaagaacccgctgctggcggccgcggcgcgccgcagggcgctgcctcccctcgccgggcgcgccctgccgttctcgccgctcaccaccgccagggccccgcgccgccgcgggctcgggaccgtcacgtgcttcgtgccgcaggacacggagcacccggcggcggcggcaccggccccggtcgctcccgtgccggagacggcgctggacgaggaggccagggccgcggcggcgcggcgcgtcgcggagaggaaggcgcggaagcggtccgagcggcgtacctacctggtggccgccgtgatgtccagcctcggggtcacgtccatggccgtcgccgccgtgtactatcgcttcagctggcaaatggagggcggcgcggtcccggtgagcgagatgttcggcacgtttgcgctctccgtcggcgcggcggtcgggatggagttctgggcgcggtgggcgcaccgggcgctgtggcacgcctccctgtggcacatgcacgagtcgcaccaccggccgcgcgagggcccattcgagctcaacgacgtgttcgccatcgtcaacgccgtgccggccatctccctcctcgcctacggcttcttccaccgcggcctcgtgcccggcctatgcttcggcgcgggcctcgggattacgctgttcggcatggcctacatgttcgtccacgacggcctggtccaccgccgctttccggtcggccccatcgccaacgtgccctacttccgccgagtggctgccgctcacaaggtacgcacggacgacggcgacgagaggccagctagcgacccctcgctcaccacctcctcatccttctcgaagcttctatacaccacatggacaagtttgagggcgtcccgtatgggctgttcctgggaccaaaggagctggaggaggtcggtggcctggacgagctggaaaaggagctcgcgcgaatcggccggaccatctgatggattcgtccggattccggcgcggcgatctccgctccgctccgtgattccggcgcagcctcatggttggggagccgacgaccagaacctccagaagggatttggtttggatgcgcgagcctagatcttgacctgcatttcggatggtctgtggaggcacagctcgtacctggagatgtctagtgccatggaattacttttcttttctttttttcctgacattttcacgccggcgtctttatttgtgaagacgtcgcacgttcgggcccctgtattactgttcttatggctaggattctgtatataacttgtagggacatgttatgaaccaccagctcaatgaagctaaaaattcggtggttggaaacagcgctgaaaaatcagaagctcctcctttcacattcagaggcgctggcgcaacgagggcacgacgaccaacgttacacaatagttccattagccttaacttaaagttgtagccacgtagagggagaagaaggcgatgcaaacagtccttaaaaaaaacaacgatgatgcaaacagtctcgcggtgcaagtagtagaagaggatatcttatgttaacccaaatgcatgtaatttgctaatttctccctttaccttgctgcttttctgctcattacttgatcagctatatggaggaataaaatattttctttcaatacata

SEQ ID NO: 212923 - DNA, 1753 bp, Zea Mays
ccgccaccgctttcttcctccccgcaaagcgagcctctgggagactcgaggtcttaaatagtgtgcacctggtctcctcttccttcccctcctgttctgtccatctctaccgttccattccaattccatccccggaaagcgcaagccgcgggagagcggccggcgtacgtaccacgaggaccgccagccgagggccatggccgccggtctgtccggcgccgcgatgaccagcttcgtcgccaagaacccgctgctggcggccgcggcgcgccgcagggcgctgcctcccctcgccgggcgcgccctgccgttctcgccgctcaccaccgccagggccccgcgccgccgcgggctcgggaccgtcacgtgcttcgtgccgcaggacacggagcacccggcggcggcggcaccggccccggtcgctcccgtgccggagacggcgctggacgaggaggccagggccgcggcggcgcggcgcgtcgcggagaggaaggcgcggaagcggtccgagcggcgtacctacctggtggccgccgtgatgtccagcctcggggtcacgtccatggccgtcgccgccgtgtactatcgcttcagctggcaaatggaggtcgggatggagttctgggcgcggtgggcgcaccgggcgctgtggcacgcctccctgtggcacatgcacgagtcgcaccaccggccgcgcgagggcccattcgagctcaacgacgtgttcgccatcgtcaacgccgtgccggccatctccctcctcgcctacggcttcttccaccgcggcctcgtgcccggcctatgcttcggcgcgggcctcgggattacgctgttcggcatggcctacatgttcgtccacgacggcctggtccaccgccgctttccggtcggccccatcgccaacgtgccctacttccgccgagtggctgccgctcacaagatacaccacatggacaagtttgagggcgtcccgtatgggctgttcctgggaccaaaggagctggaggaggtcggtggcctggacgagctggaaaaggagctcgcgcgaatcggccggaccatctgatggattcgtccggattccggcgcggcgatctccgctccgctccgtgattccggcgcagcctcatggttggggagccgacgaccagaacctccagaagggatttggtttggatgcgcgagcctagatcttgacctgcatttcggatggtctgtggaggcacagctcgtacctggagatgtctagtgccatggaattacttttcttttctttttttcctgacattttcacgccggcgtctttatttgtgaagacgtcgcacgttcgggcccctgtattactgttcttatggctaggattctgtatataacttgtagggacatgttatgaaccaccagctcaatgaagctaaaaattcggtggttggaaacagcgctgaaaaatcagaagctcctcctttcacattcagaggcgctggcgcaacgagggcacgacgaccaacgttacacaatagttccattagccttaacttaaagttgtagccacgtagagggagaagaaggcgatgcaaacagtccttaaaaaaaacaacgatgatgcaaacagtctcgcggtgcaagtagtagaagaggatatcttatgttaacccaaatgcatgtaatttgctaatttctccctttaccttgctgcttttctgctcattacttgatcagctatatggaggaataaaatattttctttcaatacata

SEQ ID NO: 212924 - DNA, 2197 bp, Zea Mays
ggtcccacctcgcacgccctcaggcctcgacatccactgccttccgttcgtctcaatcccccgtcgcattccgcaacacctgctcctcgcccccttctctcagaggcgacgcctcgggcgctcctaccctgccccgtctccggtccccccgcgccgtcggcgaggcagccggccgtcacagaagcccgatccggaccccgcgagaatgaagacatccagttgcgtctaaactccattagaagactttcaacaattgcacgggctcttggagaagaaagaaccaggaaggagctgattccttttcttagtgaaaacaacgatgatgaagacgaggtgcttcttgcaatggctgaggaattgggtgtgttcattccgtatgttggtggtgtagaacatgctcatgttttgctcccacctttggagacattgtgtacagtggaggaaacttgtgtccgtgataaagcagttgaatctctgtgccgtattggtgcacaaatgaaggaaactgacattgtcgactggttcattccagtagtaaagaggctagcagctggagagtggtttacagctcgcgtatcgtcctgtggtcttttccacatagcctatccaagtgcgtcggaccaattgaaaacagaattgaggactatctatggtcagctatgtcaggatgacatgcctatggtcagaagagcagcagcatcaaatcttggaaagtttgcagctacagttgaacagaatcatttgaagacagaaataatgtcaatatttgatgatttaacccaagatgatcaagattcagtgcgtctgttggctgttgaaggctgtgctgcccttggtaaattgttggaaccacaagattgcgtagcacacattcttccagtcattgtcaatttctcccaggataaatcatggcgtgttcgttatatggttgccaatcaattatatgagctctgtgaggctgttggccctgagcctacaagagctgatttggtgcctgcctatgttcgcctccttcgtgataatgaggctgaagtgcggatagcagctgctggaaaagtaactaagttttgccgcatattaaatcctcagctctcagtccaacatattcttccatgcgttaaggaattgtcatcagattcatcccagcatgttcgttcagctttagcctcagtgattatgggaatggctcctgtactgggaaaggatgctaccattgaacagcttgttccaattttcctctctttgttgaaagacgaatttcctgatgttcgacttaacataatcagcaaacttgatcaagttaatcaggttattggaattgacttgctatctcaatcactgctaccagcaattgtagaacttgcagaggataggcactggagagtccggcttgcaataattgagtacatcccattgttggcgagtcaattaggtgttgggtttttcgatgacaagctgggggcgctctgcatgcaatggttggaagacaaggtcttttcaatcagagatgctgccgctaacaacttgaagcgccttgcagaagagtttggtccagagtgggcaatgcagcatataatccctcaggtgctggagaagatcaacaacccacactatttataccgcatgacgattctgcaggcaatctccttgctagctcctgtcatgggtgcagaaatcacctgtcaaaagctgcttccagtcgtcattaattcttcgaaggacagggttcccaacatcaagttcaatgttgcgaaagtactacagtcacttgtaccgatcctcgaccaatctaccgtgaaaccgtgcctcgttgagctcagcgaggaccctgacgtcgacgtaaggtactatgcaaaccaggcactgcaggcgtgcgaccagatgatggtgtcaagctaactagcctttgtgtcaagtatttagagagttcgatcgatgctccatagtccaattttggattacctgtaatttggcctttagatttgaagagttgtttgtgtctagcctcggtaacagataaaaacggacggtcctgatccccttgttcgtttgtgttaattaatgttgtaattgagcaggacacaacgcgttgctgtgtgtgtttgcgtttacatggcagattgaactttacggtttgcttgcgctgtgcgatgctgctggcctatctacccttcgtcaatcatcacgtgtactagcg

SEQ ID NO: 212925 - DNA, 1164 bp, Zea Mays
ctgcaagttgcgcgcctcctctacccttgaactctgaaaaaaaagttcccgcaaagcaaaaactctctctcctcttcttcctcgaccctcgtcgtggtgcggggcatctcgcaccccaccccctgtcctcccgctcaccggtgtgcgcgctttcctagggtttccgctgcccccgccgcccaccctgttctcctctcgtcagcggcgatggcgtcggcgtcggccccggtggcaggggcagtggccgggaatgatgacgagctcgccgatctggtgaggcgcctcgtggacgccctcgctcgctacgctgatcgcctgcccttcgacctcgatcgccagaagctccgttcacttactacacttgctgcaatctcgatcacacttctgtttgcctggaaaatgttgagaggtcctcaagagcaacctccgaggcctcgtaggaggattgccccatcgtcaagcaacaccagcactagatcgcgaccaggtgctttaaccacaacagatgcttgttcatcagcagattcaagagcacacgaagcagtcaaccagctgttccaaccagtaaatgtattgcttgattttcatttgttaaatactgagatggtgcagctgttttgctagaactctccggtttgatagttgattgtttcttctgcagctgactcttgagcagcttgtcaagcataagctaagtggaggacgaaggttcacatgccgcttgcttggtgtgattttggaagaaacagctccagaggagcttcagaaccatgtcacagtgaagccttccgtggtggaggttctcctagaaattgcaaaaatttgtgatgtgtatttgatggagtgcgtccttgatgacgaaagcgagggaaaggttttatcggccctgagtgaggctggcctttttgctggtggcggcttgataaaagataaggttctcttctgtagtacagataacggccgcacatctttcgttcggcaactcgaacctgattggcacatcgacacaagtcctgaaatcgttcaccaattagctaggtttatcaaatatcaactgcacatttcaccgcagcgaccggaaagaacagcatccaatgtcttcagcgctccaagcctggaacaatattttggaggcctagaccagagatagagtttctttacctg

SEQ ID NO: 212926 - DNA, 2900 bp, Zea Mays
atgcccgcgcccccggacccgccgccgctcccgccgctggacccgtcggatcccgccgcggccacaccgcccgccgccgcggccgccgatgaggaggaggacgaccgcgtcttccttgtgccactcaggtatattgtgcctgccaagtctgcagtcaaaaacgtgtcaccagctggagagggctcagtaaatatttaccccataatgctaagagtttcagccagcagagatacatatacactaaccgtgaagatcggcaaaaaggacaactcaactgagaactttaagagagcatgcaagatcctgactgcagactctgagccggtattcctatgagaattcttttgcccacttactagtaatggtaaatagccgaagttatttttcttgtattgcatgtttgcaggttcacatatgggatttctctgggcgaacaacatacatagttatgactgaactgaaccggtcgccccatgactcaaaatctgcagatcaggagatgcctctacaaatacacatttatgatctgtcggaacctatggttaatggttctgatgggaaaagggatgagttagcattaacattgggtggctcaagttctagcaatggtggtagtatgaacatggatctggattcatcaagtggaagctctaagcaagttggatccggtttaacaggattagacaatttgggaaacacatgtttcatgaacagtgcagtccagtgcttggctcatacttcaaagctggttgactatttccttggtgatttccacaaagaagtaaacccacataacccactggggatgaagggggaacttgcatatgcatttggcgacttgttgagaaagctatgggctattgataggacccctgttgcacctcgccaattcaaggccagacttggacggtttgctccccaattcagtggctttaaccaacatgattcacaggagcttcttgctttcctattggatggactccatgaagacttgaaccgtgttaaatgtaaaccatattctgaagctaaggattcagatggccgtccggatgaagaggttgcagatgagtattggggcaaccatttagctcgaaatgactctatcatagttgatatctgccagggtcagtacaagtcaacattagtttgccccatctgcaagaaagtttctgtaacatttgacccgtttatgtatttgtctttgcccctgccttcaacaacaatgagaacaatgaccataacagtcttcagtactgatgggaccagtgggccatctccttacactattagtgtaccaaaatcgggagatacgaggacccttattaatgcgttaagcagtgcttgttcgttgagagatgatgagcgccttctagttgctgaggtctacaacaattcccttattcggtacttggatgaaccttctgaagttatctccttaatcagagatggagatcgtttggttgcatatcggcttcctaaagacaatgaagatgccccaattgtggtgttcagaaaccagcgtatggagtcatccctttccagttttgggcgtaagtcatggaagacttttggcactccactggtgtcaagccttcctgatacagtaactggaagtaatatttacaatcttttcctaaaggttatgactccattcagagtatcaagaggtgatgctgctgttgctgatcaaacacttggtgaaagcagtctggttgatgaaactgaagatatcaatatgagctctgatgcctcagagcacaccagcataaacaacaattctgtcgaggatgaaacagggactgaagatgtgatgcaatttttcctgactaatgagagaatcccagaccaacgcatgaagatagaaatggatctatccattacggtgaatgatccgcataagcgtctgcatgtggctgtgtgttgggaggacagtggactggaccaatacaactttagttctttgaattctcttccagaagtttacaaagcggtgctgttttctaggaggccacaggacacatgttctctatatgcatgtctggaagcttttattaaggaagaaccattaggcccagaagacatgtggtactgcccaggttgtaaagagcatcggcaagctagtaagaagttagacctctggagattacctgaaatccttattatacacctgaaaagattttcatacagtcggtataccaaaaacaagctggagacatttgtggacttcccgattcatgatcttgacctgtcgaagtatattggtcacagatgccaagacgttcctcacaattatcgactgtatgctactagcaaccactatggaagcttgggaggtggtcactatacggcttatgtttatcatgaagggaaaaagggttggtatgatttcgatgaccgtcatgtgggccccataaccgaggacagtataaagacatcggcagcttatgttcttttttaccggcggatacaggaggatagcttagatacagttacagacatagattctgatattccaacctgaggaggcggtggaggcaatttttgagcccaagtcccggacagtgtatagtttcattggtttagggggacagttgtgcggcaatgccgcaacggaagtgagaaatagaacaggtggggaagagtttgtgcggcaatgtggttcagaggggggagataatttgtcgcggttccttccgttgcaaattcctttgttttttttccgttcccttttagcacctgtaactgatagcggtaaaattttggctaatggcatgtggggaagatatttcgtcccagattctcaacacagttagggttagttttggaaccctatttttaaggaatttctatttttctaagagaaactagtttattttttcttggaaaaataggaaaccttt

SEQ ID NO: 212927 - DNA, 2736 bp, Zea Mays
tctggcgttgccctgtggccttcaccaggatggatggctgctgacagtatattgtgcctgccaagtctgcagtcaaaaacgtgtcaccagctggagagggctcagtaaatatttaccccataatgctaagagtttcagccagcagagatacatatacactaaccgtgaagatcggcaaaaaggacaactcaactgagaactttaagagagcatgcaagatcctgactgcagactctgagccggttcacatatgggatttctctgggcgaacaacatacatagttatgactgaactgaaccggtcgccccatgactcaaaatctgcagatcaggagatgcctctacaaatacacatttatgatctgtcggaacctatggttaatggttctgatgggaaaagggatgagttagcattaacattgggtggctcaagttctagcaatggtggtagtatgaacatggatctggattcatcaagtggaagctctaagcaagttggatccggtttaacaggattagacaatttgggaaacacatgtttcatgaacagtgcagtccagtgcttggctcatacttcaaagctggttgactatttccttggtgatttccacaaagaagtaaacccacataacccactggggatgaagggggaacttgcatatgcatttggcgacttgttgagaaagctatgggctattgataggacccctgttgcacctcgccaattcaaggccagacttggacggtttgctccccaattcagtggctttaaccaacatgattcacaggagcttcttgctttcctattggatggactccatgaagacttgaaccgtgttaaatgtaaaccatattctgaagctaaggattcagatggccgtccggatgaagaggttgcagatgagtattggggcaaccatttagctcgaaatgactctatcatagttgatatctgccagggtcagtacaagtcaacattagtttgccccatctgcaagaaagtttctgtaacatttgacccgtttatgtatttgtctttgcccctgccttcaacaacaatgagaacaatgaccataacagtcttcagtactgatgggaccagtgggccatctccttacactattagtgtaccaaaatcgggagatacgaggacccttattaatgcgttaagcagtgcttgttcgttgagagatgatgagcgccttctagttgctgaggtctacaacaattcccttattcggtacttggatgaaccttctgaagttatctccttaatcagagatggagatcgtttggttgcatatcggcttcctaaagacaatgaagatgccccaattgtggtgttcagaaaccagcgtatggagtcatccctttccagttttgggcgtaagtcatggaagacttttggcactccactggtgtcaagccttcctgatacagtaactggaagtaatatttacaatcttttcctaaaggttatgactccattcagagtatcaagaggtgatgctgctgttgctgatcaaacacttggtgaaagcagtctggttgatgaaactgaagatatcaatatgagctctgatgcctcagagcacaccagcataaacaacaattctgtcgaggatgaaacagggactgaagatgtgatgcaatttttcctgactaatgagagaatcccagaccaacgcatgaagatagaaatggatctatccattacggtgaatgatccgcataagcgtctgcatgtggctgtgtgttgggaggacagtggactggaccaatacaactttagttctttgaattctcttccagaagtttacaaagcggtgctgttttctaggaggccacaggacacatgttctctatatgcatgtctggaagcttttattaaggaagaaccattaggcccagaagacatgtggtactgcccaggttgtaaagagcatcggcaagctagtaagaagttagacctctggagattacctgaaatccttattatacacctgaaaagattttcatacagtcggtataccaaaaacaagctggagacatttgtggacttcccgattcatgatcttgacctgtcgaagtatattggtcacagatgccaagacgttcctcacaattatcgactgtatgctactagcaaccactatggaagcttgggaggtggtcactatacggcttatgtttatcatgaagggaaaaagggttggtatgatttcgatgaccgtcatgtgggccccataaccgaggacagtataaagacatcggcagcttatgttcttttttaccggcggatacaggaggatagcttagatacagttacagacatagattctgatattccaacctgaggaggcggtggaggcaatttttgagcccaagtcccggacagtgtatagtttcattggtttagggggacagttgtgcggcaatgccgcaacggaagtgagaaatagaacaggtggggaagagtttgtgcggcaatgtggttcagaggggggagataatttgtcgcggttccttccgttgcaaattcctttgttttttttccgttcccttttagcacctgtaactgatagcggtaaaattttggctaatggcatgtggggaagatatttcgtcccagattctcaacacagttagggttagttttggaaccctatttttaaggaatttctatttttctaagagaaactagtttattttttcttggaaaaataggaaaccttt

SEQ ID NO: 212928 - DNA, 2730 bp, Zea Mays
attttttatgcttcactttagttctgcttaccaccgactgcagaatgtctagtttgtcaaggttcttatcttcttttctgatgtaggtgcatttaatctgtactaagttagcacatctatgattcatattgtcaaaaaaaatctcattttttcgaattgaactcttttcctttgaattatttggctcgtatactgagcatggatgaacaccaagtcgcttcaacttctctcataatcctagagctttctccatgtccttataaaattccatgaacaaaggatgcatgttctaaagtccaaggaaaggtccaccataccttaaagaaaagatgcctctacaaatacacatttatgatctgtcggaacctatggttaatggttctgatgggaaaagggatgagttagcattaacattgggtggctcaagttctagcaatggtggtagtatgaacatggatctggattcatcaagtggaagctctaagcaagttggatccggtttaacaggattagacaatttgggaaacacatgtttcatgaacagtgcagtccagtgcttggctcatacttcaaagctggttgactatttccttggtgatttccacaaagaagtaaacccacataacccactggggatgaagggggaacttgcatatgcatttggcgacttgttgagaaagctatgggctattgataggacccctgttgcacctcgccaattcaaggccagacttggacggtttgctccccaattcagtggctttaaccaacatgattcacaggagcttcttgctttcctattggatggactccatgaagacttgaaccgtgttaaatgtaaaccatattctgaagctaaggattcagatggccgtccggatgaagaggttgcagatgagtattggggcaaccatttagctcgaaatgactctatcatagttgatatctgccagggtcagtacaagtcaacattagtttgccccatctgcaagaaagtttctgtaacatttgacccgtttatgtatttgtctttgcccctgccttcaacaacaatgagaacaatgaccataacagtcttcagtactgatgggaccagtgggccatctccttacactattagtgtaccaaaatcgggagatacgaggacccttattaatgcgttaagcagtgcttgttcgttgagagatgatgagcgccttctagttgctgaggtctacaacaattcccttattcggtacttggatgaaccttctgaagttatctccttaatcagagatggagatcgtttggttgcatatcggcttcctaaagacaatgaagatgccccaattgtggtgttcagaaaccagcgtatggagtcatccctttccagttttgggcgtaagtcatggaagacttttggcactccactggtgtcaagccttcctgatacagtaactggaagtaatatttacaatcttttcctaaaggttatgactccattcagagtatcaagaggtgatgctgctgttgctgatcaaacacttggtgaaagcagtctggttgatgaaactgaagatatcaatatgagctctgatgcctcagagcacaccagcataaacaacaattctgtcgaggatgaaacagggactgaagatgtgatgcaatttttcctgactaatgagagaatcccagaccaacgcatgaagatagaaatggatctatccattacggtgaatgatccgcataagcgtctgcatgtggctgtgtgttgggaggacagtggactggaccaatacaactttagttctttgaattctcttccagaagtttacaaagcggtgctgttttctaggaggccacaggacacatgttctctatatgcatgtctggaagcttttattaaggaagaaccattaggcccagaagacatgtggtactgcccaggttgtaaagagcatcggcaagctagtaagaagttagacctctggagattacctgaaatccttattatacacctgaaaagattttcatacagtcggtataccaaaaacaagctggagacatttgtggacttcccgattcatgatcttgacctgtcgaagtatattggtcacagatgccaagacgttcctcacaattatcgactgtatgctactagcaaccactatggaagcttgggaggtggtcactatacggcttatgtttatcatgaagggaaaaagggttggtatgatttcgatgaccgtcatgtgggccccataaccgaggacagtataaagacatcggcagcttatgttcttttttaccggcggatacaggaggatagcttagatacagttacagacatagattctgatattccaacctgaggaggcggtggaggcaatttttgagcccaagtcccggacagtgtatagtttcattggtttagggggacagttgtgcggcaatgccgcaacggaagtgagaaatagaacaggtggggaagagtttgtgcggcaatgtggttcagaggggggagataatttgtcgcggttccttccgttgcaaattcctttgttttttttccgttcccttttagcacctgtaactgatagcggtaaaattttggctaatggcatgtggggaagatatttcgtcccagattctcaacacagttagggttagttttggaaccctatttttaaggaatttctatttttctaagagaaactagtttattttttcttggaaaaataggaaaccttt

SEQ ID NO: 212929 - DNA, 2003 bp, Zea Mays
ctttgaattatttggctcgtatactgagcatggatgaacaccaagtcgcttcaacttctctcataatcctagagctttctccatgtccttataaaattccatgaacaaaggatgcatgttctaaagtccaaggaaaggtccaccataccttaaagaaaagatgcctctacaaatacacatttatgatctgtcggaacctatggttaatggttctgatgggaaaagggatgagttagcattaacattgggtggctcaagttctagcaatggtggtagtatgaacatggatctggattcatcaagtggaagctctaagcaagttggatccggtttaacaggattagacaatttgggaaacacatgtttcatgaacagtgcagtccagtgcttggctcatacttcaaagctggttgactatttccttggtgatttccacaaagaagtaaacccacataacccactggggatgaagggggaacttgcatatgcatttggcgacttgttgagaaagctatgggctattgataggacccctgttgcacctcgccaattcaaggccagacttggacggtttgctccccaattcagtggctttaaccaacatgattcacaggagcttcttgctttcctattggatggactccatgaagacttgaaccgtgttaaatgtaaaccatattctgaagctaaggattcagatggccgtccggatgaagaggttgcagatgagtattggggcaaccatttagctcgaaatgactctatcatagttgatatctgccagggtcagtacaagtcaacattagtttgccccatctgcaagaaagtttctgtaacatttgacccgtttatgtatttgtctttgcccctgccttcaacaacaatgagaacaatgaccataacagtcttcagtactgatgggaccagtgggccatctccttacactattagtgtaccaaaatcgggagatacgaggacccttattaatgcgttaagcagtgcttgttcgttgagagatgatgagcgccttctagttgctgaggtctacaacaattcccttattcggtacttggatgaaccttctgaagttatctccttaatcagagatggagatcgtttggttgcatatcggcttcctaaagacaatgaagatgccccaattgtggtgttcagaaaccagcgtatggagtactgcccaggttgtaaagagcatcggcaagctagtaagaagttagacctctggagattacctgaaatccttattatacacctgaaaagattttcatacagtcggtataccaaaaacaagctggagacatttgtggacttcccgattcatgatcttgacctgtcgaagtatattggtcacagatgccaagacgttcctcacaattatcgactgtatgctactagcaaccactatggaagcttgggaggtggtcactatacggcttatgtttatcatgaagggaaaaagggttggtatgatttcgatgaccgtcatgtgggccccataaccgaggacagtataaagacatcggcagcttatgttcttttttaccggcggatacaggaggatagcttagatacagttacagacatagattctgatattccaacctgaggaggcggtggaggcaatttttgagcccaagtcccggacagtgtatagtttcattggtttagggggacagttgtgcggcaatgccgcaacggaagtgagaaatagaacaggtggggaagagtttgtgcggcaatgtggttcagaggggggagataatttgtcgcggttccttccgttgcaaattcctttgttttttttccgttcccttttagcacctgtaactgatagcggtaaaattttggctaatggcatgtggggaagatatttcgtcccagattctcaacacagttagggttagttttggaaccctatttttaaggaatttctatttttctaagagaaactagtttattttttcttggaaaaataggaaaccttt

SEQ ID NO: 212930 - DNA, 2405 bp, Zea Mays
catgaacaaaggatgcatgttctaaagtccaaggaaaggtccaccataccttaaagaaaagatgcctctacaaatacacatttatgatctgtcggaacctatggttaatggttctgatgggaaaagggatgagttagcattaacattgggtggctcaagttctagcaatggtggtagtatgaacatggatctggattcatcaagtggaagctctaagcaagttggatccggtttaacaggattagacaatttgggaaacacatgtttcatgaacagtgcagtccagtgcttggctcatacttcaaagctggttgactatttccttggtgatttccacaaagaagtaaacccacataacccactggggatgaagggggaacttgcatatgcatttggcgacttgttgagaaagctatgggctattgataggacccctgttgcacctcgccaattcaaggccagacttggacggtttgctccccaattcagtggctttaaccaacatgattcacaggagcttcttgctttcctattggatggactccatgaagacttgaaccgtgttaaatgtaaaccatattctgaagctaaggattcagatggccgtccggatgaagaggttgcagagggtcagtacaagtcaacattagtttgccccatctgcaagaaagtttctgtaacatttgacccgtttatgtatttgtctttgcccctgccttcaacaacaatgagaacaatgaccataacagtcttcagtactgatgggaccagtgggccatctccttacactattagtgtaccaaaatcgggagatacgaggacccttattaatgcgttaagcagtgcttgttcgttgagagatgatgagcgccttctagttgctgaggtctacaacaattcccttattcggtacttggatgaaccttctgaagttatctccttaatcagagatggagatcgtttggttgcatatcggcttcctaaagacaatgaagatgccccaattgtggtgttcagaaaccagcgtatggagtcatccctttccagttttgggcgtaagtcatggaagacttttggcactccactggtgtcaagccttcctgatacagtaactggaagtaatatttacaatcttttcctaaaggttatgactccattcagagtatcaagaggtgatgctgctgttgctgatcaaacacttggtgaaagcagtctggttgatgaaactgaagatatcaatatgagctctgatgcctcagagcacaccagcataaacaacaattctgtcgaggatgaaacagggactgaagatgtgatgcaatttttcctgactaatgagagaatcccagaccaacgcatgaagatagaaatggatctatccattacggtgaatgatccgcataagcgtctgcatgtggctgtgtgttgggaggacagtggactggaccaatacaactttagttctttgaattctcttccagaagtttacaaagcggtgctgttttctaggaggccacaggacacatgttctctatatgcatgtctggaagcttttattaaggaagaaccattaggcccagaagacatgtggtactgcccaggttgtaaagagcatcggcaagctagtaagaagttagacctctggagattacctgaaatccttattatacacctgaaaagattttcatacagtcggtataccaaaaacaagctggagacatttgtggacttcccgattcatgatcttgacctgtcgaagtatattggtcacagatgccaagacgttcctcacaattatcgactgtatgctactagcaaccactatggaagcttgggaggtggtcactatacggcttatgtttatcatgaagggaaaaagggttggtatgatttcgatgaccgtcatgtgggccccataaccgaggacagtataaagacatcggcagcttatgttcttttttaccggcggatacaggaggatagcttagatacagttacagacatagattctgatattccaacctgaggaggcggtggaggcaatttttgagcccaagtcccggacagtgtatagtttcattggtttagggggacagttgtgcggcaatgccgcaacggaagtgagaaatagaacaggtggggaagagtttgtgcggcaatgtggttcagaggggggagataatttgtcgcggttccttccgttgcaaattcctttgttttttttccgttcccttttagcacctgtaactgatagcggtaaaattttggctaatggcatgtggggaagatatttcgtcccagattctcaacacagttagggttagttttggaaccctatttttaaggaatttctatttttctaagagaaactagtttattttttcttggaaaaataggaaaccttt

SEQ ID NO: 212931 - DNA, 779 bp, Zea Mays
gtggcctattttctcctcaccagagctggacatcatctcgagcctcttcagcggaagaattgtgtgggagaaagtcagtccagcgctacagcgtgcagtgcaaagccagatgagtctaatgagcacaccgttcatcgacaacagtgaccttttcgaaaccggcagtacaggaggcatgtcaagggatttgattgataggatcccaaagacgaggttcagtgctgctagcaactgtgatcaggaaactgatagcagctgctgcccagtctgcctccaggatttcggagcacggcaattcgtgagggccctgcctcagtgccaacacatattccacgtgcggtgcatcgacagttggctcctccggcacgcgtcctgcccgctatgccgggccggtgttcacatagaccatatacatatgtaaatgaactcgcagggtggcacctggtgtattttcgtagcgaatacccgtgctcctgttggatatcacaagtatagctgtatacatagggtttttttgctctctctttttgtcacttcttgagacttgcttgtgtggggctatgctttcagctgcacgtttttgtcgaagcatgatgccttgatatgtacatctggaaaatggaccgactaacaagctccctgaattctggcactgtgcttcaaaatctgtgtctgttaactgctgatgctgacatgctaatgcaatggtttgctactgggcaactaatgccaggaccattggagtgtataaccttgcaactgaaggctggatggtggaa

SEQ ID NO: 212932 - DNA, 2985 bp, Zea Mays
caaaaaggaagaaaataaaaagaaagaggacagaaaaaatcgtagcatcgcaaacgcctacgcggccgcatgcatgcccccgacgcggccgattgggcatttggggcgaacggttgtttcggcaaggaagccgcgcctacgcccgcccgcgctcgcgcctctccaccgccgccggcgtgaacctcaaccaagcaccgcgcccgcgccggcgactgtccataaggccgtgtcctgccgtcgcgcacccctgcgtcgtacgatcgtccacgataccaagtcaggtatcagcacagactgcagcatcagacttatttggctggagaaatcagggatcatcagagtcaaaggcaacaagattctgctaccatatcagtgcaagcgaatggctgactgtttaaagacatgcctggatcttctattgtgaattcgcagttctttcatgggtggattgtcaggatcccaaactggtagaggtgggggatggaattctctgctcttctgacttcagcggggataaacatcgctgtctgcgtgctcttcttgtccctctattcgatcctcaggaagcagcctcacaacttcagcgtctactttgggaggcggcttgctgaagagaggttccagaggcaggacgattacttctcgtttgagaggctactgcctactgctggttggattgtaaaggcgtactggtgcaccgaagaagagattcgacaagttgctggcttggactctgttgtgttccttcgcctcttcattttcagcatccgtatcttctcaattacttctcttgtttgtgtatttgttgtgcttcctgttaattatcatgggaaagagatgaatcacaatcatattccggaagagtcactgaatgtttttactatagccaatatcgtcgaagaatctcgaaagctttgggtgcactgctctgctttatatgtcataacaatctcagcctgcattcttcttttccacgaatacaagtatatttcgaggaagagactagcacatgttactggatatcctccaaatcctgggctttttaccgtgcttgtccgttcgattccgaggtttgacaatgagctgcttgatgacacaatcagaaatttctttgttaactatcacggatcaagttatctgtcgcatcaaatgatctttcgcaagggacattttcagaagtttgtggatagagcagagagggcttacaggagatttgtaagggtaagactctccgtatctgagcggaatgggagatctagcatgtccaggtgtggtgtctgtggtgtaagagcttcctcatttcagctttaccgcaacaagttcatcgaggccaagaagtcagacctcactaatccggaagtagtggaagctcaaaagaactgtcccggtgccttagtgttcttcaagactcgctacgcagccgtcgtcgcctcacgggtattccagtcatcaaaccctatgctatgggtgacagatctggctcctgagccacgcgatgtgtattggtcaaacctctggatcccctacagacagatctggctccggaagctagcgacactcgcagctagtatcgttttcatgttcgtgttcatcgtccccgtcgcgtttgtccagagcatgatgcagctggagcagctcaaaaggatgttcccgagcttgacaggtctcctaaataagtccttcttcgccagagtgataacgggataccttcctagcgtcaccttgctgctgtccctgtacaccgttcccccgctgatgatgctcttctcctctatagaagggtccatctctcgcagcgggaggaagaggagcgggtgcttgaaaatcctcttcttcaacatctggaacgtcttctttgtgaacgtcctgtcgggatccgtgctcaaccagctcaacgtcttctccagacccaaggacatgccgacgatgctagctgaactagtgccgaagcaggcaacctttttcatcacgtacgtgctcacctcaggctgggcgagtctgtgctcggagatactgcaggttttcaacttggtctacaacttcttcagcaggttcgtctgctgctgccatcgccagaataaggaatacgtttactctttcccgtaccacaccgaagtgcccaaagtcctcctgttcaacctgctcggcttcacgttctcgatcatggcgcccctcatactcccctttctgctcgtgtacttctgcctcggctacttggtgtatcggaaccagattctgaacgtgtactacccaaagtacgaaatggggggcaagctgtggccggtcatgcacaacgccatcgtgttctcgctggtcctgacgcaggtgatcgcgctcggcgtcttcaccatcaagcgctcccccgtgacggcgggcttcaccatcctgctgctcgtcggcacggtcctcttcaacgagtactgccggcaccgcttctcccgcatcttcgaggcctactccgcccaggacgtgatcgagctggacagggacgacgagcagtccgggaggatgcaggagatccaccagcatctgctggacgcctacagccagaccccgccgggggagggatcctccaggggcggcagccaggtgcccatcgagctcatcatggaggaccccgcgcaggaggcgtcggagtccagccaggagctctgcgacaccgtgcaggaggtgtccggggccatccacgaccacgaccacgtcgtcgaggacaaggcgcattccgtgtagactagatggtctggactctctgcgggtgcgtacgcatgtagatgctgtacagcgcgcatagcagactcgaaacccggaagcaaatacttacatttataaatctacgtgtatagaaacaacagtctaatctattggcaatcgggtactttggcccggcccaacacttcactctctgtccattggattggcacatcggaccgcccatcttaattctgatcttttatatttagttatgaaaacgccactataatttac

SEQ ID NO: 212933 - DNA, 2725 bp, Zea Mays
ctgggttttgacgcggaggtggtatcagcacagactgcagcatcagacttatttggctggagaaatcagggatcatcagagtcaaaggcaacaagattctgctaccatatcagtgcaagcgaatggctgactgtttaaagacatgcctggatcttctattgtgaattcgcagttctttcatgggtggattgtcaggatcccaaactggtagaggtgggggatggaattctctgctcttctgacttcagcggggataaacatcgctgtctgcgtgctcttcttgtccctctattcgatcctcaggaagcagcctcacaacttcagcgtctactttgggaggcggcttgctgaagagaggttccagaggcaggacgattacttctcgtttgagaggctactgcctactgctggttggattgtaaaggcgtactggtgcaccgaagaagagattcgacaagttgctggcttggactctgttgtgttccttcgcctcttcattttcagcatccgtatcttctcaattacttctcttgtttgtgtatttgttgtgcttcctgttaattatcatgggaaagagatgaatcacaatcatattccggaagagtcactgaatgtttttactatagccaatatcgtcgaagaatctcgaaagctttgggtgcactgctctgctttatatgtcataacaatctcagcctgcattcttcttttccacgaatacaagtatatttcgaggaagagactagcacatgttactggatatcctccaaatcctgggctttttaccgtgcttgtccgttcgattccgaggtttgacaatgagctgcttgatgacacaatcagaaatttctttgttaactatcacggatcaagttatctgtcgcatcaaatgatctttcgcaagggacattttcagaagtttgtggatagagcagagagggcttacaggagatttgtaagggtaagactctccgtatctgagcggaatgggagatctagcatgtccaggtgtggtgtctgtggtgtaagagcttcctcatttcagctttaccgcaacaagttcatcgaggccaagaagtcagacctcactaatccggaagtagtggaagctcaaaagaactgtcccggtgccttagtgttcttcaagactcgctacgcagccgtcgtcgcctcacgggtattccagtcatcaaaccctatgctatgggtgacagatctggctcctgagccacgcgatgtgtattggtcaaacctctggatcccctacagacagatctggctccggaagctagcgacactcgcagctagtatcgttttcatgttcgtgttcatcgtccccgtcgcgtttgtccagagcatgatgcagctggagcagctcaaaaggatgttcccgagcttgacaggtctcctaaataagtccttcttcgccagagtgataacgggataccttcctagcgtcaccttgctgctgtccctgtacaccgttcccccgctgatgatgctcttctcctctatagaagggtccatctctcgcagcgggaggaagaggagcgggtgcttgaaaatcctcttcttcaacatctggaacgtcttctttgtgaacgtcctgtcgggatccgtgctcaaccagctcaacgtcttctccagacccaaggacatgccgacgatgctagctgaactagtgccgaagcaggcaacctttttcatcacgtacgtgctcacctcaggctgggcgagtctgtgctcggagatactgcaggttttcaacttggtctacaacttcttcagcaggttcgtctgctgctgccatcgccagaataaggaatacgtttactctttcccgtaccacaccgaagtgcccaaagtcctcctgttcaacctgctcggcttcacgttctcgatcatggcgcccctcatactcccctttctgctcgtgtacttctgcctcggctacttggtgtatcggaaccagattctgaacgtgtactacccaaagtacgaaatggggggcaagctgtggccggtcatgcacaacgccatcgtgttctcgctggtcctgacgcaggtgatcgcgctcggcgtcttcaccatcaagcgctcccccgtgacggcgggcttcaccatcctgctgctcgtcggcacggtcctcttcaacgagtactgccggcaccgcttctcccgcatcttcgaggcctactccgcccaggacgtgatcgagctggacagggacgacgagcagtccgggaggatgcaggagatccaccagcatctgctggacgcctacagccagaccccgccgggggagggatcctccaggggcggcagccaggtgcccatcgagctcatcatggaggaccccgcgcaggaggcgtcggagtccagccaggagctctgcgacaccgtgcaggaggtgtccggggccatccacgaccacgaccacgtcgtcgaggacaaggcgcattccgtgtagactagatggtctggactctctgcgggtgcgtacgcatgtagatgctgtacagcgcgcatagcagactcgaaacccggaagcaaatacttacatttataaatctacgtgtatagaaacaacagtctaatctattggcaatcgggtactttggcccggcccaacacttcactctctgtccattggattggcacatcggaccgcccatcttaattctgatcttttatatttagttatgaaaacgccactataatttac

SEQ ID NO: 212934 - DNA, 599 bp, Zea Mays
tgggaccttctggttacagacgatgcaaacaaaactggagctgcccaagaagctataaatggtattagacgggctagcaaggccatgactgagcaagaagcccggcaaattcttggtatcagtgaaaattcgacgtgggaagagattgtccagaagtacgacacaatgtttgagaggaataacaaaaacggcagcttctatctccagtcaaaggttcatagagcgaaagaatgcctggaacctttatatcaaaagcctgatgtactgaactgagattttgcagacgccctagcttctgtttgaagcggtatgcctaattgatcgatttattagtgtgctcagagatcaacgttcagtttattgatcggtttgccaatgcgcccagagatcaacgttcagttttgagttatgtgttgggcgcatcaggttggttccttgtaatgccagaataatgtttaacaaacataccgaattttggctgattctcattggcaacgtctcagtcactggttttaattcatagtatgttatttcacactttgtcaaccaagcaacactttgaaactttttgtcgataataaatggttcggttcgttcat

SEQ ID NO: 212935 - DNA, 3672 bp, Zea Mays
ctcactcacttcgcctgtaaggaaggaagaaggaagggatacgattattattgcaattgaaagcgatggcatcaagcagcagcctcaatccctcctcctattcgtgcttcctcttcgtcaccgccgccgccgtcttcttcaccgcctccgatgctcaggtgcctggattcgtcagcatcgactgcggcggctccaccaactacacggacgagctgggcctgcagtggacgggcgacgccggctggttccccttcggccagacggccaccatctccgtgccctccgagaaacgcgcgcagtactccacgctgcgctacttcccatcaccgtccgccagcagcagcagcagcagcaagcactgctacacgctgcacgtccgcacccgcacacgctacctcgtccgcgccaccttcctgtacggcaacttcgacagcagcaacgtgttcccggagttcgatctttaccttggcgcctcccactggtccaccatcgtcatctacgacgactccaaggtggtcaccagggaggccgtcgtcctcgccgccgaccccgccctcagcgtctgcctgtcgtccacggggacggggacgcccttcatctccacgctggagctccggcagctgaacggctccctctactacaccgactacgaggcggacgccttcctggccctctccgccaggatcaacttcggcgcgcccaccgccgaccccgtcaggtacccggacgacccctacgacaggatctgggagtcggacatggtgaggagggccaactacctggtggacgtggccgccggcaccgtcaacgtctccaccgacaggcccgtcttcgtggccggcagcgagaggcccccgcagaaggtgatgcagacggcggtggtcgggtcgctgggcgagctcacctatcgcctcgacctcccaggcttcccgggcaacggctgggccttctcgtacctggctgagatcgaggagttcttggtcccggagacgcgcaagttcaagctctacatcccggggctggcggacgtgagcaagcccacggtggacatcggcgagaacgcgccgggcaagtaccggctctacgagccaggcttccccaacatctcgctgcctttcgtcctgtccttggcgctgaggaagaccaacgattcgtccaaggggccaattctcaacgccttggagatatacaagtacatgcacatggaactcggctcaccggatggacctgtgatggcgaccctgagcctggccctggcgtcgtcgtcgtcgtccttggctgatgttgcaatggaaggcggtgatccctgcctaccttcaccctggtcctgggtcaagtgcaattcagaagcgcaaccaagagtagtttccataaatctttcaggaaagaacttgacagggagcataccaccccaagtagcggatttgccctgcttagcagagatcggatttgctaataacatgttgacgggcccaattcctgatctcagtggctcctccaacctatccatcattcatcttgagaacaaccaactgaccggaactgttccttcctactttggcagcttgccaaaactgagcgagctgtaccttgagaacaaccggttgtctggacccattcccaaggctctgctaagtcgaagcattattttcaactactctgggaacgtgtaccttggaacagcagggaagcaaaagaagaagcatgtcatcatcattatatctgctctgcttggagcatccttgctacttgcagccgccctctgttgctatatgctgacacgcaaggccatgaattcatcatcctcaccacaagcacaagagaaggcgcttcctgcagagcagaacaagttgcagaaatacccaagcacgcagcagctgcagtcgatcgccaccgagacggctcatccctacagcctgtgtgagctggaagaggcgaccaacaagttcgcgagcaggatcggctcagggggtttcgggatagtgtactacgggaagctgagcgatggaaaggagatcgctgtgaaggtgcctagcaacgattcgtaccaggggaagaagcagttctcgaacgaggtggtcttgctctcgaggatacaccataggaacctagtggcgtttctaggctactgccatgaggatgggagaaacattctggtctacgagttcatgcacaatggaacgctcaaagagcagctgcataggcgcgacaagcacatcagttggatcaagcggcttgagattgccgaggatgctgcgaaaggcatcgagtatcttcacactggatgcacgccatcgatcatccacagagacatcaagacgagcaacatccttctggacaagcatatgagagccaaggtgtccgactttgggctatccaagttgctggcagcggagggcaaggactctcacgcgtcaaccaacgtgagagggacaatgggctacctggacccgcagtactacgtctctcagcagctgaccgagaagagcgacatgtacagcttcggcatcatcctgctggagctcatatccggctgtcctcccatctccaccatcgccttcggggacaacttccgcaacatcgggccgtgggccaagttctactacgagagcggcgacatcgaggccataatcgacccctccatctccacggcggccgagtaccaggacgtgcagtccgtctggaagatcgccgaggcggcggtccggtgcatcgacgcagagcctcggaagcggccctgcatgcctgaggtggttaaggagatccaggatgcattggcgctggagcgggcggcggcggagacgaccaccagcgacagggcgctcgcctgccctttctcccccgcggctgcgagcgtcaggtccggcgggacaatgaggtcgcacgacatggtcatggacaacctgctgctcttggacgatgacgacgactccaccttctccggttcgaccgtcaccaagctcaagtacccggagctacgatagctgtgatggaaccaagctcaagcaggattgcaattaattagtatagtagtagtcagcaattcatttgagttagactgttagagcagtggtgagatagcagattttaatttgcagttgttgttacgttacattacattacgaatgtgtttggttggctggcctaactcaggaccaggcccatttgatacatgcacattatgtttggttgtctggtctagtttggaagctggctgaggcgggcccaactgactccgtggcctggcccgatcgaaacatagataacttacttcgctggctagcctggcccgtgttcgcccggataaaaatgtgttagggtttactcgcctctctctcgtctccggcttcactcgcagccgcatctgtggttctcacctcactcgtatggtaacacaatacgtgcggtcttgtgttatcggagcagcaagatcaagccgctgtacgtgaaggcgtcccggcggtacggcgagcgcctgcggctcggcgacgcggcgagcgagggcgaggagacggacgtggagcccgacccgtcccggcgccgccgtcccagggtccttcgtcgtcggccccagcgccgcagccggtggtggttgcctgcggcgtgcgagcgccctgcgccggcgtgcccgcggggctgaggcaggtgtgcaagcggctcagggagagccgg

SEQ ID NO: 212936 - DNA, 1423 bp, Zea Mays
cctccctcgctttccggtgctgagcgtgcatcggcagagctgactgtgactggtgaactgaaggaaaggggaggagaaggggagggaagctttgggcgggagaggaagcctagcagcaacagtaggcagtagcagggttgaccggaggggcagtggagtctggagagtaacccaacaaccccctcctcccctccccttctgtcttattgccacctctccacgtctccaccaaacaaggcaacaagggagaagtagatctgcatctgcgagaggagttcacgcgcacctgcaagggcctcgtcgtcgtgctcatcggaggatacgtgctgctccagctcctcccttcgtcactcaactacctcgccatcatcccctccaagacaatcccctatgtatggaccgtctttaccgctggttacatcgagcaagtcctcccaggggccattggcagttctcttggtcttctcttttgtggaaaggacattgaaccagcatggggccgcaaggaattcttgaagttcattattttgatcaactccatctgtggcattcttgcattttgctttgctattggactctactacgtcactggaaaggagagcttccttgtcacaccactttctggtttccacggttgccttgctggctttcttgtggccctgaagcaactcttaccaaaccttgagcttcctatgtgctttttctggaaaataaaggcaaagtggatgccattctttgttgtatgtttctcaagtatcatggccttcatcgtgcctgattccattaacttcctgccaactttggtgtccgggatgtacgttagctggctttacctgagatacttccaaaggaacccactgactggacttaagggtgatcccagtgatgacttttccttccccagtttattcccagctgccatgagggagcgtggcgagagggttcttgaggaaaggttggcggctgacaatgctggtgacacagaggcctcgcctcgtggccatggcaccgcggaagactgagaactttcttgtgaccatcagctcctcttataggagccatggctttgctccctccagcgtttatagctctgcacttttgtcttctggagatggagctattcagttcacagcgaacgaataatacgatgttcttagtttctctttttttccgcttctttgtctgcgaggatttattggttaaattgtgtactagtcaattgttatggtacagcgaaaaagagagaagagggtgatggcatttgcagcgaggtgttgagattccgttgtagccatgcatttgcagccgattgtttggtactggtcaaagttctgtagtagtcatatactctgcttaaaatatagaaagaagaatggcttcgtcagtatcagatgttgagatatatatttcttttcttttagtg

SEQ ID NO: 212937 - DNA, 1615 bp, Zea Mays
cctccctcgctttccggtgctgagcgtgcatcggcagagctgactgtgactggtgaactgaaggaaaggggaggagaaggggagggaagctttgggcgggagaggaagcctagcagcaacagtaggcagtagcagggttgaccggaggggcagtggagtctggagagtaacccaacaaccccctcctcccctccccttctgtcttattgccacctctccacgtctccaccaaacaaggcaacaagggagaagtagatctgcatctgcgagaggaggcagcgggggtggtgatgatggagagccagccgctgcaggccccgacggccacggctccggcccccggatctgcggagccagccggagctccgccggccgtcacccccggcaaggagttcacgcgcacctgcaagggcctcgtcgtcgtgctcatcggaggatacgtgctgctccagctcctcccttcgtcactcaactacctcgccatcatcccctccaagacaatcccctatgtatggaccgtctttaccgctggttacatcgagcaagtcctcccaggggccattggcagttctcttggtcttctcttttgtggaaaggacattgaaccagcatggggccgcaaggaattcttgaagttcattattttgatcaactccatctgtggcattcttgcattttgctttgctattggactctactacgtcactggaaaggagagcttccttgtcacaccactttctggtttccacggttgccttgctggctttcttgtggccctgaagcaactcttaccaaaccttgagcttcctatgtgctttttctggaaaataaaggcaaagtggatgccattctttgttgtatgtttctcaagtatcatggccttcatcgtgcctgattccattaacttcctgccaactttggtgtccgggatgtacgttagctggctttacctgagatacttccaaaggaacccactgactggacttaagggtgatcccagtgatgacttttccttccccagtttattcccagctgccatgaggctgttgtgtgcaaggtccaggcctttggaagtcgccctcccgatatcagatcctaccaaggcttcaagaagaagggagcgtggcgagagggttcttgaggaaaggttggcggctgacaatgctggtgacacagaggcctcgcctcgtggccatggcaccgcggaagactgagaactttcttgtgaccatcagctcctcttataggagccatggctttgctccctccagcgtttatagctctgcacttttgtcttctggagatggagctattcagttcacagcgaacgaataatacgatgttcttagtttctctttttttccgcttctttgtctgcgaggatttattggttaaattgtgtactagtcaattgttatggtacagcgaaaaagagagaagagggtgatggcatttgcagcgaggtgttgagattccgttgtagccatgcatttgcagccgattgtttggtactggtcaaagttctgtagtagtcatatactctgcttaaaatatagaaagaagaatggcttcgtcagtatcagatgttgagatatatatttcttttcttttagtg

SEQ ID NO: 212938 - DNA, 3931 bp, Zea Mays
atgggctcatggcagaagaccccgtcgccgtcgccaccacacaaatccaaggcccaaggcccatggccggccgctactccaaacagcaacgtcctagccgacgagagcctccctccgccacctacccacccaccaactcccgcccgtcgcctccgcttggcttttcgtcgagcagttggttggcacctaaccccccagggccgcgggccagtaaggcgggagagtgaggcagaggcactgagccaaagccgggagatgaagaagctgtgccaaggcggcaagaaggggcggcgggtgcacccggcgccggcggacgcggacgcggccgtggcgctgccggccgccgtgctggccctggcgtcggcgctgacggccgaggagcaggaggtgctggcctacctcctgtcctgcggcggcgcggcggtcgtgggcggccgcccgcgccgccgccgcgggccccacccgccggagatgggctgcgcctgcttcggctgctacaagagcttctgggcgcgctgggacgcgtcgcccaacagccacctcatccaccgcatcatcgacgccgtcgaggacggcggccccccgcgccgcacgcaccggcgccggcgcggcggtgggcgccgcggtggcgacggcggcgcggggatgggcatggacatggacatgggccaccgccgccacggcgagtacgagggcgccggcgacgacgaggaggaggaggaggttgggggcagcagcatggacagcgacgtggacggggacgacgcgtcggtggccagcgagggtgactgcagcttcggcgacgccgagaagagcacggtggggaggctggtgcgcttcatcggggagaagtctgatgatgagcgtgcgaggatcgaaggtagcgccgggcgtttggaccggctgctctctgccccattggaggccgccaagggggagggagctcgcggtcgcggcggtgccatcccatgcctgcacctgcagaagccaaagcgagcagatgcagctccattgaccagccgcccagggaaaaagcaagctggtgtggctgggcagctggctgcggtcgcgcttggaaagggcgggaggcgctggcggcgtggcagcagctcgaggacaacggagcagcgactcatgctaggcggctgcgacccgctgccgcgccgccgctgcctggccccggcctccaagctcttccgccgcccgctgcccgtcaacgagtcgctctggacgctgtccgacgacggcaacgtccggtggagccgctaccactgccgtggctacaggtgcctgtccgccaggaaccagcgccgcgactacgaccgctgcgtggggtgcttcgacatggaccgcgagaggcagcggtgggccaaccgcaccgcgtcgtcgtccctcgccgacttcctcgtcgacgacgtgctcgcggcgaagccaggcgaggtgcgcatcgggctggacatgagcgtgggcacgggcagctttgcggcgcgcatgcgggagcgcggcgtgaccatcgtgtcggcggccatgaacctgggcgcgccgttcgcggagacgatcgcgctgcgcgggctggtgcccctgtacgcgaccatgagccagcggctgccgctgttcgacaacaccatggacctggtgcacacggcgaggctcttcgaggggtacaagaagcaccgctgggtcgtctccttcaagtccaaggacgaggtctacctgcaatggagatttggattgaatctgatgatagagcagaagttgaacagctggaggacaacaaaagagcagagtttgagtgcaattccgggggcaaatcgcaatatcctggactgggatactcgtgatccaagcttgggggctttacatgcaaaaaaaattcagttccgcaatatcctggactgggatactcgtgaacagctggagtttgagccatgcatgccgcgccgacatggtgagcaagagcgacggccagtagaaaccgctctcgaacgcgacgctgcagcaggcacaggcgaggtcccgctcatccagatcacaccggctcatcgacgacagcaatgccttctcgggcgccaccgccgcgacgcagtcctcgcacatgtctccggcgtccatgagccagcggtgggtcccgaagaggctgccgatgccgaggcgggagcagagcgcgcatggcggcgcgaggctgaagaagccggcgaagcgagctatgaggattaggattttggttttaagggcaatttttcccaatcactatatgctcatatactcttctcaaatattgatgtggtatgcgagtaacaaaacaaaattaaagagatcctgatatgagtttttttctctcctcaacaggtgagttgtaggtactatctgtctattgtatgatagttacgcttataaattctatatgtgcaatatattaatattgttgcttcgatgttgattgctttacaacagtttactgttgctcaagccatttattttcttttcgaaatctgcgctttcatacatattattagttgttggccacttactgttagcaaaaaaaacttacctaaaatctaagagcttagttgattgtattattaaccatacatttattgtttctctttacatcaagaattttcacttatgtgtgcttattaatttgcacagttgttagcatggcttttttatttatcttgctccctacaggtgagttgtatgtactatctacctgaccaacaacatttacgcttacgaattatttctatgtgatctattagtatttcttgttcgctattgattgcttcacacatctttgttgttgctcaggtcatatttttcaattgtacgtttgcatacagactaatagctacgcacagtccatttgttgttatcagaacaacaaaaaacttatatgtgcaccgatatatttattatttgtctttgcatcgatgattcacatggatatacacttattgagtttacaattttccataagattgttttattcctttgcaggtaagttctaaagcatgtctctttaattgacactatatacgtttatgtattttccaaacaagtttaaagtcatataggttactttgtggttgattaatatattatgtgtggtaaagtatatattctatgcgaagaagtggaaacgacctcatcgttgattgcggtgttccggtactcgctgttctaaattttttgctacagtaaggtacccctccctccttgattgtaggtaattcacacatgagtttatgttttaggttgttttttcctggaatactctatgtcgactaaacaatttaggttctttcgagttacattacatcgatgtaatcttcacacaaagtctcaacaatatttggttgctcacttacaccccaccctagattaacatgttctgaattttctttgttcactgctgcaattgacacatgctaaatggcaatttctttataatgatccaattgagtttgtaattgcacatgtttttgccaagtttcatcaagtactgctccaacagaacaagcaatcatggaatattgagctaaggcactggagtctcaagaaaaggtctaggaatcctaagaatggatggataacgatgcttaaatatggatgacatcatttatgtcttgataaccatctacaggccggtgatagtgttttttgacgttcattcatggggctcacctttctaatgtgtaagaaagaaaactacgttgatcttaatctgagttgtgtgttgatggtcgatgtagtaaagaaggggcacttagacattgttgttcatggatttatgtactgccaacaaaccctatcttctgattcttataggtggtgcctggttctaatggcttgcatgtattttatgcattgactacatgataagaaccgtgcacgttgttgatgacccaattattacctctgaatcaag

SEQ ID NO: 212939 - DNA, 4305 bp, Zea Mays
atgggctcatggcagaagaccccgtcgccgtcgccaccacacaaatccaaggcccaaggcccatggccggccgctactccaaacagcaacgtcctagccgacgagagcctccctccgccacctacccacccaccaactcccgcccgtcgcctccgcttggcttttcgtcgagcagttggttggcacctaaccccccagggccgcgggccagtaaggcgggagagtgaggcagaggcactgagccaaagccgggagatgaagaagctgtgccaaggcggcaagaaggggcggcgggtgcacccggcgccggcggacgcggacgcggccgtggcgctgccggccgccgtgctggccctggcgtcggcgctgacggccgaggagcaggaggtgctggcctacctcctgtcctgcggcggcgcggcggtcgtgggcggccgcccgcgccgccgccgcgggccccacccgccggagatgggctgcgcctgcttcggctgctacaagagcttctgggcgcgctgggacgcgtcgcccaacagccacctcatccaccgcatcatcgacgccgtcgaggacggcggccccccgcgccgcacgcaccggcgccggcgcggcggtgggcgccgcggtggcgacggcggcgcggggatgggcatggacatggacatgggccaccgccgccacggcgagtacgagggcgccggcgacgacgaggaggaggaggaggttgggggcagcagcatggacagcgacgtggacggggacgacgcgtcggtggccagcgagggtgactgcagcttcggcgacgccgagaagagcacggtggggaggctggtgcgcttcatcggggagaagtctgatgatgagcgtgcgaggatcgaaggtagcgccgggcgtttggaccggctgctctctgccccattggaggccgccaagggggagggagctcgcggtcgcggcggtgccatcccatgcctgcacctgcagaagccaaagcgagcagatgcagctccattgaccagccgcccagggaaaaagcaagctggtgtggctgggcagctggctgcggtcgcgcttggaaagggcgggaggcgctggcggcgtggcagcagctcgaggacaacggagcagcgactcatgctaggcggctgcgacccgctgccgcgccgccgctgcctggccccggcctccaagctcttccgccgcccgctgcccgtcaacgagtcgctctggacgctgtccgacgacggcaacgtccggtggagccgctaccactgccgtggctacaggtgcctgtccgccaggaaccagcgccgcgactacgaccgctgcgtggggtgcttcgacatggaccgcgagaggcagcggtgggccaaccgcaccgcgtcgtcgtccctcgccgacttcctcgtcgacgacgtgctcgcggcgaagccaggcgaggtgcgcatcgggctggacatgagcgtgggcacgggcagctttgcggcgcgcatgcgggagcgcggcgtgaccatcgtgtcggcggccatgaacctgggcgcgccgttcgcggagacgatcgcgctgcgcgggctggtgcccctgtacgcgaccatgagccagcggctgccgctgttcgacaacaccatggacctggtgcacacggcgaggctcttcgaggggtacaagaagcaccgctgggtcgtctccttcaagtccaaggacgaggtctacctgcaatggagatttggattgaatctgatgatagagcagaagttgaacagctggaggacaacaaaagagcagagtttgagtgcaattccgggggcaaatcgcaatatcctggactgggatactcgtgatccaagcttgggggctttacatgcaaaaaaaattcagttccgcaatatcctggactgggatactcgtgaacagctggagtttgagccatgcatgccgcgccgacatggtgagcaagagcgacggccagtagaaaccgctctcgaacgcgacgctgcagcaggcacaggcgaggtcccgctcatccagatcacaccggctcatcgacgacagcaatgccttctcgggcgccaccgccgcgacgcagtcctcgcacatgtctccggcgtccatgagccagcggtgggtcccgaagaggctgccgatgccgaggcgggagcagagcgcgcatggcggcgcgaggctgaagaagccggcgaagcgagctatgaggattaggattttggttttaaggtttttttagctcgagcatccttataaaaaattatttcaatggctgtttctttagagctagtttggcaactctattttcaaatagatttccattttcccaagaaaaagttaactaatttcccttgaaaaataaaaatcccttggaaaaatttagttgccaaactagcccctatattatttctctatgtgtcgcactacattataaatatcaagtaattgtaatggtgcttctttcctttaaatatgcgtattaattcttgcagcatttaagtttacatgcacatttagtgtatctatttacgtagtgaactgccaaatatcatgtgtaaagctatttttacaagtttattaaccacatttcttgtcacgcgcagggcaatttttcccaatcactatatgctcatatactcttctcaaatattgatgtggtatgcgagtaacaaaacaaaattaaagagatcctgatatgagtttttttctctcctcaacaggtgagttgtaggtactatctgtctattgtatgatagttacgcttataaattctatatgtgcaatatattaatattgttgcttcgatgttgattgctttacaacagtttactgttgctcaagccatttattttcttttcgaaatctgcgctttcatacatattattagttgttggccacttactgttagcaaaaaaaacttacctaaaatctaagagcttagttgattgtattattaaccatacatttattgtttctctttacatcaagaattttcacttatgtgtgcttattaatttgcacagttgttagcatggcttttttatttatcttgctccctacaggtgagttgtatgtactatctacctgaccaacaacatttacgcttacgaattatttctatgtgatctattagtatttcttgttcgctattgattgcttcacacatctttgttgttgctcaggtcatatttttcaattgtacgtttgcatacagactaatagctacgcacagtccatttgttgttatcagaacaacaaaaaacttatatgtgcaccgatatatttattatttgtctttgcatcgatgattcacatggatatacacttattgagtttacaattttccataagattgttttattcctttgcaggtaagttctaaagcatgtctctttaattgacactatatacgtttatgtattttccaaacaagtttaaagtcatataggttactttgtggttgattaatatattatgtgtggtaaagtatatattctatgcgaagaagtggaaacgacctcatcgttgattgcggtgttccggtactcgctgttctaaattttttgctacagtaaggtacccctccctccttgattgtaggtaattcacacatgagtttatgttttaggttgttttttcctggaatactctatgtcgactaaacaatttaggttctttcgagttacattacatcgatgtaatcttcacacaaagtctcaacaatatttggttgctcacttacaccccaccctagattaacatgttctgaattttctttgttcactgctgcaattgacacatgctaaatggcaatttctttataatgatccaattgagtttgtaattgcacatgtttttgccaagtttcatcaagtactgctccaacagaacaagcaatcatggaatattgagctaaggcactggagtctcaagaaaaggtctaggaatcctaagaatggatggataacgatgcttaaatatggatgacatcatttatgtcttgataaccatctacaggccggtgatagtgttttttgacgttcattcatggggctcacctttctaatgtgtaagaaagaaaactacgttgatcttaatctgagttgtgtgttgatggtcgatgtagtaaagaaggggcacttagacattgttgttcatggatttatgtactgccaacaaaccctatcttctgattcttataggtggtgcctggttctaatggcttgcatgtattttatgcattgactacatgataagaaccgtgcacgttgttgatgacccaattattacctctgaatcaag

SEQ ID NO: 212940 - DNA, 2341 bp, Zea Mays
tcgccactgggagttgacgccgctcggtcgtcccactttgtgacgttcaaccagagtctagagatgtaattctctgcgaatacaggactagttggagctaacaacgcagcttgacgagggtgaacccagctccacacctcgtctaccacgtcttctcctcgccatggctgctcacctaccacgcctccccgtcctcctcctcgtcctcctcgctgcccatgtcgtctccacctccacccgtgccgagcctcttcttcccagcacttacaacgtctccatgtgctcggaatcgttctggtgcggcggcgtcgagatccgctacccgttctatcttgccaacgcaaccgccgactacagcgggagctactactcctgcggctacaccgacttgagcgtttcctgcgaactcgaggtcgaggggccgccgacgacctggacccctaccatccgtctcggcggcgacaactacaccgtcaagaacatcttgtacgactatcataccatctcactggcggacagcgatgtgctcggaggcggcgagtgccccgtcgtccgccacaacgtcagcttcgacgagacgtggctgcacaacgccagcgccttcaacaacctcaccttcttcttcggatgccactgggggccacgcgatacactgcctgaatttgccggctataacatcagctgcgacgggttcagtactccaactatcagcggtggaggctccttcgtgttcaagactgaagatcttgacgaacaagaggagcaggatttcgcttcacactgcgacgaggttttctccgtgccagtgggaagcgaggctctgcgggcgaccgacaccttcagcctctcaaggtacgggtacggcgagctgcttaggcaggggttcgagttggaatggaatcggacatcggaggatcagtgtggccagtgcgagggatcgagctccggcggacggtgcgcctacaaccagaagagagaattcctgggctgcttgtgcagcggagggaaggcgggcaacccgttctgcaaaccctcaagatcaaaaaggaatgaaggacctattgttggtgctgttgttgccgttgcattcctgtgtctagtcattctcacatgcttcttggcttgtagacatggttcgctgcccttcaaatcgaagaacaaaccagggacaaggattgagtccttcctacagaagaacgagagtagtatacatccgaaaagatacacctacgcggacgtgaaaagaatgacaaaatccttcgctgtgaagctaggccaaggtgggtttggtgctgtatacaaaggcagcctccacggccgacaggtagcagtcaagatgctgaaggacacccaaggtgacggcgaggaattcatgaacgaggtggctagcatcagcaggacttctcatgtcaacgtcgtgacacttctagggttttgcttgcaagggtcgaaaagagcactgatctacgagtacatgcccaatggttcgctcgaaaggtatgccttcaccggtgacatgaacagtgagaatttgctaagctgggaaagactatttgacatagcgattggcacggccagagggctcgaatacctacaccggggatgcaacactcggatcgtgcattttgacatcaagccacacaacatcctgttagaccaggatttctgccctaagatctctgactttggactggccaagctatgtctgaacaaagagagcgctatctccattgttggcgcaagagggacgatagggtatatcgccccggaggtctactcaaagcaatttggaacgataagcagcaagtctgatgtctatagctatgggatgatggtccttgagatggttggagcaagggacaggaatacaagcgcagatagtgaccatagcagccaatatttccctcagtggctttatgaacatttggacgactattgtgttggtgcttccgagattaatggtgagaccacagagctcgtgaggaagatgatagttgtaggtctgtggtgcatacaagtgattccgactgatcggccaacaatgacgagagtcgtcgagatgttggaagggagcacaagtaatctagagttgccacccagagttctcttgagctgacaaagcgtagatatttttcctatcaaatgctgcttccaggtcacacaaatgcaaatatttgtggagacgagtgcccagtaacctcatacactgtatctgtatgacaaaagtcccacgactcactggacacggaaatgtcgcttgactacgccaattttctaaaaagattggcacaattaatggggcttatagcggtaactttggttcgcattagtctaggattag

SEQ ID NO: 212941 - DNA, 2157 bp, Zea Mays
ctccactcgtccatcccaatccacctgttcccaacttgaacttcccatataatagtcccatctcttggcacccggcccgacgttcggagcctcctgccgcaatttttttttgaggctggtctgtttcgtgacgtcccgcgagaagagaacccccgtggcccctggccgcgacggagcggtcagaagcagcggcggccggcgcggtttcggtttcctggttggcccgagaattccgattcctctcctgatttgtgcggcggagcgtctcttgttgtgcagtgctgcagcggattgtcgcggcctgcccgcggtgaggccggcatccctcttcggaaggcgtgctcgggcggggccagcccaaccgccgttcgtgcgctagagttcctcgctcagaaagtggagaaataagatacatagtggaagatgagatcagttgttcggtcacttcgccagctccgccgatttatccagcactatgcagaggggaactcacaagcaaccagattgttcgggctgcagaatgctttaatcatgtgcggatcgacaccccgttcactgagcatgttacgtcgtaatggtgaaattagcagatttgcaagccctggcatggagttgatgaggtccatgttctctaatgtagcggctggttctatcaaagatattggaagaggtggcccgatggtggaatatgagaggagaatagcatcaggagacctagtagatggcgatagctttcaggttgatacaattcaacaattacaagggctctatgaggagttgattgagaatggagaagactgccagctggatagatataagtcatctgagaaatcaggacggagtcgatggctatggtcccgcctcattactcagccttctagctttgctccagttaagggcctttacctctatggtggtgttggtacagggaagacgatgcttatggacttgttctatgaacagctgccatctaattggagaaaaaaacgtattcactttcatgatttcatgttgaacgtacatagtcgtcttcagatgcataaaggtgtttcagatccccttgatgttgtagcagctgagatttcagatgaggccatcatattatgtcttgatgagtttatggtaactgatgttgctgatgctatgattctgaaccggctgttcagacaattgttcagcaaaggcattataagctttatgaaggtggcttacaacgggaccttttcttgccatttattgacaccttgaaagaaaggtgcatcgtgcaccccattggatctgcggtggactatcgtcaactgggttctgctgaacaaggtttctattttgtcggaaagcattacagtacgcttctgaaacagaagctccagtctttaattggagatgaggaacccagcccacaaactgttgaagtaattatgggaaggaaattacaggtttctctgggagcaaatggctgtgcatattttccttttgaagatctctgtgatagacctttaggtgcagcagattactttggactcttcaaaaaatttcacaccctggcacttgatggtgttccaaagtttgggtctagtaacagaacagcagcttatcggttcgtcacactgattgatgttatgtacgagaacaaagcaaggctgttatgtacagccgaggctggaccagtagaactgtttgagaatatcatgactcttgctgaagcacagaaggtttcaccaagatcttcgcgctcacagaaaagtgacgaccctgacctatgtgtggacaatgagcttggatttgccaaggatcgtacgattagcaggttgacagagatcaacagcagagaatatttggaggacttcgaaatgagattagggcaacagcagctgctgcccttgcaagctctagataatggtggtgatgttgtactagcataataagtagaaggcttctgggcctcatttgaaattcttgtattcgcgcccacctggcttacataggcaactgagaagctatgcttttccaaccgtggtgcatgtaaatgtgcaataaagctatgaaagagtattttttgctaataggtgggtgatctataaaatggctcaatctatagggagacgtgtcaatattgatttttttaattgtgttacatatttccaaacctttagagag

SEQ ID NO: 212942 - DNA, 2253 bp, Zea Mays
cccaacttgaacttcccatataatagtcccatctcttggcacccggcccgacgttcggagcctcctgccgcaatttttttttgaggctggtctgtttcgtgacgtcccgcgagaagagaacccccgtggcccctggccgcgacggagcggtcagaagcagcggcggccggcgcggtttcggtttcctggttggcccgagaattccgattcctctcctgatttgtgtacatatagttgcctggaggccccgtcgctgtccccgcgctctctgtctcctcacgcttggctgttcgccgcggcgccaccgtcggaggcagctgctaatcgcgcgtccggtggccgcgttgcagcggcggagcgtctcttgttgtgcagtgctgcagcggattgtcgcggcctgcccgcggtgaggccggcatccctcttcggaaggcgtgctcgggcggggccagcccaaccgccgttcgtgcgctagagttcctcgctcagaaagtggagaaataagatacatagtggaagatgagatcagttgttcggtcacttcgccagctccgccgatttatccagcactatgcagaggggaactcacaagcaaccagattgttcgggctgcagaatgctttaatcatgtgcggatcgacaccccgttcactgagcatgttacgtcgtaatggtgaaattagcagatttgcaagccctggcatggagttgatgaggtccatgttctctaatgtagcggctggttctatcaaagatattggaagaggtggcccgatggtggaatatgagaggagaatagcatcaggagacctagtagatggcgatagctttcaggttgatacaattcaacaattacaagggctctatgaggagttgattgagaatggagaagactgccagctggatagatataagtcatctgagaaatcaggacggagtcgatggctatggtcccgcctcattactcagccttctagctttgctccagttaagggcctttacctctatggtggtgttggtacagggaagacgatgcttatggacttgttctatgaacagctgccatctaattggagaaaaaaacgtattcactttcatgatttcatgttgaacgtacatagtcgtcttcagatgcataaaggtgtttcagatccccttgatgttgtagcagctgagatttcagatgaggccatcatattatgtcttgatgagtttatggtaactgatgttgctgatgctatgattctgaaccggctgttcagacaattgttcagcaaaggcattataagctttatgaaggtggcttacaacgggaccttttcttgccatttattgacaccttgaaagaaaggtgcatcgtgcaccccattggatctgcggtggactatcgtcaactgggttctgctgaacaaggtttctattttgtcggaaagcattacagtacgcttctgaaacagaagctccagtctttaattggagatgaggaacccagcccacaaactgttgaagtaattatgggaaggaaattacaggtttctctgggagcaaatggctgtgcatattttccttttgaagatctctgtgatagacctttaggtgcagcagattactttggactcttcaaaaaatttcacaccctggcacttgatggtgttccaaagtttgggtctagtaacagaacagcagcttatcggttcgtcacactgattgatgttatgtacgagaacaaagcaaggctgttatgtacagccgaggctggaccagtagaactgtttgagaatatcatgactcttgctgaagcacagaaggtttcaccaagatcttcgcgctcacagaaaagtgacgaccctgacctatgtgtggacaatgagcttggatttgccaaggatcgtacgattagcaggttgacagagatcaacagcagagaatatttggaggacttcgaaatgagattagggcaacagcagctgctgcccttgcaagctctagataatggtggtgatgttgtactagcataataagtagaaggcttctgggcctcatttgaaattcttgtattcgcgcccacctggcttacataggcaactgagaagctatgcttttccaaccgtggtgcatgtaaatgtgcaataaagctatgaaagagtattttttgctaataggtgggtgatctataaaatggctcaatctatagggagacgtgtcaatattgatttttttaattgtgttacatatttccaaacctttagagag

SEQ ID NO: 212943 - DNA, 2409 bp, Zea Mays
cttcttgtcacgtgctgctggttgtagttgtaggtgctgatactgtttcgtcttcctcgatctgtagcaagtttcaatctttgagacgcactcgtaacagtactcccatcatcctggagctggcgttacctttagctcgtcgtgcaagaattttcccatctcgggcttacaaatatatatatttaatctgcccatgaaacttgtagccgatcgatggagctgtggtgatactggtcaatttgatacggattacggattcctagttcttctcgggaaactttaagtgctcttttattggtatttattttgaactaattattaattgcagagtagtaggactgtaggagtatgtactagtagctgcgtttcttttcaccgagcaccctttccatgtcattttcttgattaccttttatgatgtcatgctcccacccacatttatttaacttgtttgcttacttttgccgttcccttgtttatgccacatgattgatgcttgtttcgtcacatggccgaaagtggagaaataagatacatagtggaagatgagatcagttgttcggtcacttcgccagctccgccgatttatccagcactatgcagaggggaactcacaagcaaccagattgttcgggctgcagaatgctttaatcatgtgcggatcgacaccccgttcactgagcatgttacgtcgtaatggtgaaattagcagatttgcaagccctggcatggagttgatgaggtccatgttctctaatgtagcggctggttctatcaaagatattggaagaggtggcccgatggtggaatatgagaggagaatagcatcaggagacctagtagatggcgatagctttcaggttgatacaattcaacaattacaagggctctatgaggagttgattgagaatggagaagactgccagctggatagatataagtcatctgagaaatcaggacggtaagagcagtttccgtgcactaagatgacatattttgtattatcttaagcttagtcttttctttggaaaaaaaataactttagtctttgatattgaaggagtcgatggctatggtcccgcctcattactcagccttctagctttgctccagttaagggcctttacctctatggtggtgttggtacagggaagacgatgcttatggacttgttctatgaacagctgccatctaattggagaaaaaaacgtattcactttcatgatttcatgttgaacgtacatagtcgtcttcagatgcataaaggtgtttcagatccccttgatgttgtagcagctgagatttcagatgaggccatcatattatgtcttgatgagtttatggtaactgatgttgctgatgctatgattctgaaccggctgttcagacaattgttcagcaaaggcattattcttgtttcaacttctaaccgtgctccagataagctttatgaaggtggcttacaacgggaccttttcttgccatttattgacaccttgaaagaaaggtgcatcgtgcaccccattggatctgcggtggactatcgtcaactgggttctgctgaacaaggtttctattttgtcggaaagcattacagtacgcttctgaaacagaagctccagtctttaattggagatgaggaacccagcccacaaactgttgaagtaattatgggaaggaaattacaggtttctctgggagcaaatggctgtgcatattttccttttgaagatctctgtgatagacctttaggtgcagcagattactttggactcttcaaaaaatttcacaccctggcacttgatggtgttccaaagtttgggtctagtaacagaacagcagcttatcggttcgtcacactgattgatgttatgtacgagaacaaagcaaggctgttatgtacagccgaggctggaccagtagaactgtttgagaatatcatgactcttgctgaagcacagaaggtttcaccaagatcttcgcgctcacagaaaagtgacgaccctgacctatgtgtggacaatgagcttggatttgccaaggatcgtacgattagcaggttgacagagatcaacagcagagaatatttggaggacttcgaaatgagattagggcaacagcagctgctgcccttgcaagctctagataatggtggtgatgttgtactagcataataagtagaaggcttctgggcctcatttgaaattcttgtattcgcgcccacctggcttacataggcaactgagaagctatgcttttccaaccgtggtgcatgtaaatgtgcaataaagctatgaaagagtattttttgctaataggtgggtgatctataaaatggctcaatctatagggagacgtgtcaatattgatttttttaattgtgttacatatttccaaacctttagagag

SEQ ID NO: 212944 - DNA, 1884 bp, Zea Mays
gcttgtttcgtcacatggccgaaagtggagaaataagatacatagtggaagatgagatcagttgttcggtcacttcgccagctccgccgatttatccagcactatgcagaggggaactcacaagcaaccagattgttcgggctgcagaatgctttaatcatgtgcggatcgacaccccgttcactgagcatgttacgtcgtaatggtgaaattagcagatttgcaagccctggcatggagttgatgaggtccatgttctctaatgtagcggctggttctatcaaagatattggaagaggtggcccgatggtggaatatgagaggagaatagcatcaggagacctagtagatggcgatagctttcaggttgatacaattcaacaattacaagggctctatgaggagttgattgagaatggagaagactgccagctggatagatataagtcatctgagaaatcaggacggtaagagcagtttccgtgcactaagatgacatattttgtattatcttaagcttagtcttttctttggaaaaaaaataactttagtctttgatattgaaggagtcgatggctatggtcccgcctcattactcagccttctagctttgctccagttaagggcctttacctctatggtggtgttggtacagggaagacgatgcttatggacttgttctatgaacagctgccatctaattggagaaaaaaacgtattcactttcatgatttcatgttgaacgtacatagtcgtcttcagatgcataaaggtgtttcagatccccttgatgttgtagcagctgagatttcagatgaggccatcatattatgtcttgatgagtttatggtaactgatgttgctgatgctatgattctgaaccggctgttcagacaattgttcagcaaaggcattataagctttatgaaggtggcttacaacgggaccttttcttgccatttattgacaccttgaaagaaaggtgcatcgtgcaccccattggatctgcggtggactatcgtcaactgggttctgctgaacaaggtttctattttgtcggaaagcattacagtacgcttctgaaacagaagctccagtctttaattggagatgaggaacccagcccacaaactgttgaagtaattatgggaaggaaattacaggtttctctgggagcaaatggctgtgcatattttccttttgaagatctctgtgatagacctttaggtgcagcagattactttggactcttcaaaaaatttcacaccctggcacttgatggtgttccaaagtttgggtctagtaacagaacagcagcttatcggttcgtcacactgattgatgttatgtacgagaacaaagcaaggctgttatgtacagccgaggctggaccagtagaactgtttgagaatatcatgactcttgctgaagcacagaaggtttcaccaagatcttcgcgctcacagaaaagtgacgaccctgacctatgtgtggacaatgagcttggatttgccaaggatcgtacgattagcaggttgacagagatcaacagcagagaatatttggaggacttcgaaatgagattagggcaacagcagctgctgcccttgcaagctctagataatggtggtgatgttgtactagcataataagtagaaggcttctgggcctcatttgaaattcttgtattcgcgcccacctggcttacataggcaactgagaagctatgcttttccaaccgtggtgcatgtaaatgtgcaataaagctatgaaagagtattttttgctaataggtgggtgatctataaaatggctcaatctatagggagacgtgtcaatattgatttttttaattgtgttacatatttccaaacctttagagag

SEQ ID NO: 212945 - DNA, 2409 bp, Zea Mays
gctagttgtgccactgccgtgcctacggccgattgggcgtctatagcagcagcagtgagcacgggtgcacggccatcactcccatcggcagcagggtcaaccactgccaccggcgcacgcagctgtgcacgaggtctcctcacccaccggccgccgcgtccggacccagcccggcaactcgcacctcctcctcctgctgccgcccgcgcgcttggccccgtgctcacacggggggtcgatcagtagaacatcctgctcacggcgttccccgacgcgtggctcgtaaggcactcttcccgcggtacaagtgcgacccacggtgctggcggagaggaacctagcagcggaagatcgagttcagggatggcttctggtggaaccttccggaaccttctcctggtgctccccctctacctcgcgctcgcctcgttggtcggtggcgaggcctcgaggaggttctggatcgagaacgatacctttaggaaggatggagtaccgttccaaatcgtcggtggcgatgttcactatttccgcattgttcctgagtactggaaggatcgccttttaagagcaaaagcattaggcttgaacacaattcaaacatatgtaccttggaatttgcatgagccagaaccacagagctggaaattcaagggcttcacagacattgaatcatatctgagacttgctcaagaactagaaatgctggtcatgcttcgtgtagggccatacatttgtggagaatgggacttaggaggttttccaccttggttgctcaccatagaaccagcccttaaactgcgttcatcagattcgtcctatctttccttggtggagagatggtggggagtactacttctgaaagtggcaccattattatacaataatggaggtccagttattatggttcagattgaaaatgaatttggttcttttggagatgataagaattaccttcatcaccttgttcaactggccaggagatatcttggaaacgacattattctgactataaattcactacttctgctcctaccattctgaagtgtgcctttgagattattctttatggttaagtaaatgggccaagctcaataaattccaacaatcccccaccagatcttgaaggaacaacataaccaactctccgcatttcctcaaatattgtttatatactagttttatggtagagattgttaagttaaacatccatctagactcaagagttatacaactgatgggggcgccttgggtaatttaaagaatggatcaattcctcaagatgacgtttttgctgctgttgattttgaaactggatccaatccatggcccatattcaaattacagaagaaatacaacttgccaggaaaatcagtccctttaagttcggaattttatactggatggctaacacactggggtgaaagaatcgcaacaacagatgctactagtacagctaaagcccttaaaaccattttgtgccacaatggttctgctgtactttatgtctgtcactggagcccattcatcagtgcattgcatttgcagtctaggtctattaattctatttcttcatgaggttgtccagatggctcatggcgggaccaattttggattttataatggtgcaaacactggtcaagatgaatctgattacaaggcagacctcacttcttatgactatgatgcaccgattaaggagcatggagatgtgcataatgcaaaatacaaagcgctaagaagagtaatacatgagtgtactgggactcctctccatccacttcctgctaacattaaaaaagcaagttacgggattatgaaattacaaaaggttgtttctctgtttgacatcattgataatatcaatgatcctctgaaagtttctgtttcggagcatccactttatatggaacagataggccagatgtttggatttctcctgtacatgtcagaataccaagggaaactcccatcaagcatcctgtcaattccaaaggtacatgacagagctcaggtgtttgtgtcttgctcagctggtgttagaaccctaagatattgtggtgtaattgaaagatggtctaataaaacactagagataccgaacttaagatgttcatctaagaccagcctatatatcctggtagaaaatatgggtcgtgtaaattatgggccatatatttttgaccggaagggaatactatctcctattcaaatagatggcattactctccgtcactggaaaatgtatccactggcactcaattcactggacatccttccaaaacttcaactaatcactcaaataccttatgctggagccagtaaaatgtccattcatggagactcagaaaagattttacaggactcgtcatgctgttcaaatgttatggtctttgtaaaatagtcagg

SEQ ID NO: 212946 - DNA, 3350 bp, Zea Mays
gagatggtgtatgagcaggaccgcggaaaccaccatcagctgccgaggttctgcaccgccggcgcggcccccggcgtggcgcgggcgtccaagaagagcaagcccaagaaggccccgcagcgcggcctcggcgtggcgcagctcgagaggatcctgatcgaggaacagaagaatatggaggagggacccaccaccgccatgccggtaacgacgaggaccgcgcacctcggccccctcctcccgatgcaccctcctcctcctccgccgccgccgctctcgctcagcgccctgccgagggacgccggcgtgcactgcggctacgacccgccggtgctctgggacccggcggcggcggaccctttgaagcacccgtacaaaaagaggagcctgtgcccacagcctccaccacttcccacgtgccatgggcaggtgagcacggccttgtcgctgacggtgtccacgtcgacccacccaacggagcccccttcaatgtacagcagcaggagcagcgcgccgccgccggccgacgaggacgacagggaggcggccggcgtggatagattctgtcccttcgtgttcgagggcccgaacccggccacctaccggacgacggcggcgggcaaagcgagtttcgtcgccaggaccaggaggacgagagaggccgccggcttccctggtgtctgtcctgatcctgacctgagcagatacgagctcagagccgcaaactatttcagctcgagcgcgagttactccgagtggtcgtcagagcttgcccgccacatcaagagcagcaaggggaacgagcacgagcctgcctgctgctacctcaccttgaacgcgcagccgccgcctgcgccacgcgtgaagcagccggctgcgctccccccgaatcaccgcccggagctccgcgacttcggcggcgtcacgcagcctcagcacgggagcgcttcagcgtcgtcgtcgcggccgttctacaacttcatgccgctgccggttggtccagttcgctgtgagaggcccctgagcgagatcaaggccgacgtctccgacggcgtcgacctggaactgaagctaatctgcgttcgttgcaagattttttcgctcccaataaacgtctggccggtgagggatacctagccatcctactctgcttgtttaccgccggcctgtgctgtgcctgtgcgtgcatgatcgtgtgcaggagagagtcgccaagagaagcagtgttagatcagagtggttgtgcagtgttgaacaggctctcggaaggctcgtgcacgatcggcattacaggcttgcagatattcttcacctagtgggtctgctcattgatggaagacaaccagattttggttcagtcagagcataaccttataccaggttcgcggacccttgtcattggtcaagagtttgcagatgttgacacatgtcggagggctgtcaaggacatggccattgctttgcactatgaactccgtgtagtgaaatctgatcgtagccgtttcattgcaaaatgctcaaaagaaggttgcccttggcgtgtgcacatcgccaagtgccccggcgttccaactttcactgtccggactttgcacggagagcacaaatgtgagggtgttcttaacctgcatcatcagcaggctactgttggttgggttgctaggtctgtcgaggcaagactcagggataacccgcagattaagccaaaggagatactgcaggatattcgagagcagcatggggtcgctgtttcttatatgcaggcatggcgtggaaaggagagaagcatggctgcagttaatggtactcttgaggatggataccgacttcttcctgcatattgtgagcagattgttaagacgaatcctggtagtgttgcaacctatagaggtattggaccagggaatgccttccagcggctgtttgtctcgtttcgtgcatccatttatggtttcttaaatgggtgcaggccccttctagaaattgacaaggctgacttgaagggaaagtatcttgggacattgctgtgtgcttcagctattgatgctgatcacatgatgttccctctagcattcggtgttgttgattgcgagagcgatgataactggaattggtttatatcggaattgaggaagatgctcggagttaacacagataagatgccggtgttgactatagtttctgagagaaaacggcaagtggttgcagcggtcggatctaatttccccactgcttttcatgggttttgcttgagacacgtgagtgagaatttccgtgatgagttcaagaatactaaactgcttaacattttctggagtgctgtgtatgctctcacagcatcagaatttgatgcaaaggtaaatgaaatgatgcaggttcaggatgttatgccatggttacagcgttttccgccaaacctgtgggcattttcttacttccagggtatcagatatggccattttagtcttgggataaccgagatattgtataacttgtcccttgactgccatgaacttcccatcgtgcaaaccatcgagcacatcaggcaccaactggcttgctggtttgctgaacgccagaacctggcacagtcatacaactcggttcttgttccgtcagctgagaaagttatcctcgaagccatccatgactcacaatgctatcaagtccttcgagcaaacaaggtggagtttgagattgtgtcatcggagcgaaccaacattgtggacacccaagctaggttctgctcgtgccgccgatggcaaatttacggcatcccatgcgcacatgccgccgccgcactgctctcatgcggtgaagacccccgcctctatgctgatgactgcttcagtgtgatgaagtaccgagaaacctactcccagccaatatatcctatcccggacaggagccactggaacgattcgtctccctggtcacaaggtgcggtcagcaaggccgatgtggtgcttggcccgcccaatatccggaggcctcctggccgacccaagatgaagattctaaagatcgagagcatgaagcggccgaagcggatcgtccagtgtggccgatgccatcttcttgggcattctcaaaagaagtgctctttgcgaagctgacacgtccgttggtgtacatgaactctgttttattgacagcttagggatctcatgctttttttcgcgtcaggtgcaggtagtccttctgtacaagtacttcggtagttctgtgtagctctctgcttctggggaagcgtgtcgactttgggcaccgtctgtccatagcactcaaaagtgtcttctacgccgtttcagagcaatgataatctgccactgttttttatgatttttgcg

SEQ ID NO: 212947 - DNA, 1336 bp, Zea Mays
gagatggtgtatgagcaggaccgcggaaaccaccatcagctgccgaggttctgcaccgccggcgcggcccccggcgtggcgcgggcgtccaagaagagcaagcccaagaaggccccgcagcgcggcctcggcgtggcgcagctcgagaggatcctgatcgaggaacagaagaatatggaggagggacccaccaccgccatgccggtaacgacgaggaccgcgcacctcggccccctcctcccgatgcaccctcctcctcctccgccgccgccgctctcgctcagcgccctgccgagggacgccggcgtgcactgcggctacgacccgccggtgctctgggacccggcggcggcggaccctttgaagcacccgtacaaaaagaggagcctgtgcccacagcctccaccacttcccacgtgccatgggcaggtgagcacggccttgtcgctgacggtgtccacgtcgacccacccaacggagcccccttcaatgtacagcagcaggagcagcgcgccgccgccggccgacgaggacgacagggaggcggccggcgtggatagattctgtcccttcgtgttcgagggcccgaacccggccacctaccggacgacggcggcgggcaaagcgagtttcgtcgccaggaccaggaggacgagagaggccgccggcttccctggtgtctgtcctgatcctgacctgagcagatacgagctcagagccgcaaactatttcagctcgagcgcgagttactccgagtggtcgtcagagcttgcccgccacatcaagagcagcaaggggaacgagcacgagcctgcctgctgctacctcaccttgaacgcgcagccgccgcctgcgccacgcgtgaagcagccggctgcgctccccccgaatcaccgcccggagctccgcgacttcggcggcgtcacgcagcctcagcacgggagcgcttcagcgtcgtcgtcgcggccgttctacaacttcatgccgctgccgcgggaacagcgctcgtcgtcgtccagaagaagactgtggcggcgtgtttggttttgtaacctgaaacaccgccatgtgcatcagaatctgcgttcgttgcaagattttttcgctcccaataaacgtctggccggagagagtcgccaagagaagcagtgttagatcagagtggttgtgcagtgttgaacaggctctcggaaggctcgtgcacgatcggcattacaggcttgcaggcacgatagagcacaacacagaatgtgatcagacacaacatagtaaaaccactgggccatgtatggcccaccccagggctgtgaccttggctcactcacgccaagagtag

SEQ ID NO: 212948 - DNA, 2319 bp, Zea Mays
gacccgcccatctttcgccctccccatcccgtcgtggttgcgcgtcgacgccatcgaccgacgctgcctgcccacttcccccgctcccgtcgcggcttgttagtctcacctggtccatcggcggcccctctcaccgggacgcgaactcctccgcgcttccttccgccgaagcgaagcgctctacccaccttcgtccttctgcactcttctgtacgggcgtggaacgtagatctgtctatgctggcactggtttctgcttcccttggtcagtatttctgcagctaaacagataattcacatttgttgctatcaagttatttgaaagtttttttatggttgagagaaacagatattcttcacctagtgggtctgctcattgatggaagacaaccagattttggttcagtcagagcataaccttataccaggttcgcggacccttgtcattggtcaagagtttgcagatgttgacacatgtcggagggctgtcaaggacatggccattgctttgcactatgaactccgtgtagtgaaatctgatcgtagccgtttcattgcaaaatgctcaaaagaaggttgcccttggcgtgtgcacatcgccaagtgccccggcgttccaactttcactgtccggactttgcacggagagcacaaatgtgagggtgttcttaacctgcatcatcagcaggctactgttggttgggttgctaggtctgtcgaggcaagactcagggataacccgcagattaagccaaaggagatactgcaggatattcgagagcagcatggggtcgctgtttcttatatgcaggcatggcgtggaaaggagagaagcatggctgcagttaatggtactcttgaggatggataccgacttcttcctgcatattgtgagcagattgttaagacgaatcctggtagtgttgcaacctatagaggccccttctagaaattgacaaggctgacttgaagggaaagtatcttgggacattgctgtgtgcttcagctattgatgctgatcacatgatgttccctctagcattcggtgttgttgattgcgagagcgatgataactggaattggtttatatcggaattgaggaagatgctcggagttaacacagataagatgccggtgttgactatagtttctgagagaaaacggcaagtggttgcagcggtcggatctaatttccccactgcttttcatgggttttgcttgagacacgtgagtgagaatttccgtgatgagttcaagaatactaaactgcttaacattttctggagtgctgtgtatgctctcacagcatcagaatttgatgcaaaggtaaatgaaatgatgcaggttcaggatgttatgccatggttacagcgttttccgccaaacctgtgggcattttcttacttccagggtatcagatatggccattttagtcttgggataaccgagatattgtataacttgtcccttgactgccatgaacttcccatcgtgcaaaccatcgagcacatcaggcaccaactggcttgctggtttgctgaacgccagaacctggcacagtcatacaactcggttcttgttccgtcagctgagaaagttatcctcgaagccatccatgactcacaatgctatcaagtccttcgagcaaacaaggtggagtttgagattgtgtcatcggagcgaaccaacattgtggacacccaagctaggttctgctcgtgccgccgatggcaaatttacggcatcccatgcgcacatgccgccgccgcactgctctcatgcggtgaagacccccgcctctatgctgatgactgcttcagtgtgatgaagtaccgagaaacctactcccagccaatatatcctatcccggacaggagccactggaacgattcgtctccctggtcacaaggtgcggtcagcaaggccgatgtggtgcttggcccgcccaatatccggaggcctcctggccgacccaagatgaagattctaaagatcgagagcatgaagcggccgaagcggatcgtccagtgtggccgatgccatcttcttgggcattctcaaaagaagtgctctttgcgaagctgacacgtccgttggtgtacatgaactctgttttattgacagcttagggatctcatgctttttttcgcgtcaggtgcaggtagtccttctgtacaagtacttcggtagttctgtgtagctctctgcttctggggaagcgtgtcgactttgggcaccgtctgtccatagcactcaaaagtgtcttctacgccgtttcagagcaatgataatctgccactgttttttatgatttttgcg

SEQ ID NO: 212949 - DNA, 2205 bp, Zea Mays
tataaatgtgacatgcagtaatggcttgatgctcagatgtttgctgcgcgaaaatcttcctctcctttcaagctctcaggttgattcagaacgggaattttttagtcgtggtataaaaagagtttgtacaaagtatgttctaactttatcaactaaatcactcactttgccaagtaaagcttgggacttcctgatcaatagtaaataccattcctaatactgcaaaagggcactatcgccttccaattcttttttgcatgtgacatataatacatgcaaaactgtttttaatccatttctctatgatggcagttaaaatgtgtataatattcgattcatgagagaaacattggagatattccggtgtgcttttatatggaatgacccgacctgcagcacaactgtctaatagtctcatagttcatttctgctatatttacatttttagtatttcttatttcatttgtagttcagtttgtttgtccataaaactagatgctagactgctttgcactcagctcagaccaaagccccactctacatggaccagtgtgtaatctttctgtatgcatcatctctctctcatgtaatttatctctatcacacatgtaggttgtagttacgcaacccatatggttagtgcattatcctggagttgcagaatttatgcagtagtttcatgagatgttaatcagatcaaaagaattaaagagtttgtttatcctgattcccgagttcattactaattacactagcaattccttgtccaatatccaattaactacttttccccctgcctcctctactagagaaggagaacttttgttgatgaacttaatatacggagcatctttgaagaaaatgatgttatctgtgtcagtgtgatacttgctctatttatttcaagcagttattttgtcttagtgctggagtcaacatttggggtatagtgacttcaaatctgtttttacttagggtgttgagctgacactttttgcttctatatgactgtatctataatgccagcacatcacaaacaaatgcacgatcaatgtggcagtgcccaatttttgtcattattatatgtcaaggaataatcttatttgcttgtgcttccctgtttgcaaatgccggggtcctggagcaagtcttccacccccgaaccctcacgccaccgccgcagctgtcttcggtctcccgtgcttcccttcgagagatcaaggctaaagtaacctgtctctgtttggtcattatgctctaggatccttcaacttgacatcacagcaatcgttgaggagagcctagacttttcaacggaggttatggatttggcagcagaggaactcttggagattgtgcctcttggaaaaggcttctttcttgccaactatcctatttcaaatttggattgaccattatcgttcgttcctttgttctccatcttttacctcttgtagttacacaagaacaacttgattgtgctaaagaggcaatcaaatctacagttctgatgaacttggaatcaagggctaaaataacctgtctctgtttggtcattatgctctaggatccttcaacttgacatcacagcaaacgttgaggagtgtaaccagcaacctcagctctgaaaagaaccctagagtaaacactcacatcaagacactccattgttcactcttgggctgctcctaccaatgaagcaagagcatctccacctcgcaatggtccactcgttgtattcatcactaagttagcttgattccaccaatgggtgttcatgcttggcttgaacccctacaagtgcacctggcattggttaccaatctgcagattcataacatctcatgaaaaggatgcgtgttggacaaccagataaggtattacagagaatatgaataatctggaggttctgctgatgcatgtaaattatggaattatggtttcaattctagattatttgagaatggcacctctatatgctcattgggcaatgatcagaaagttggagatcatagaaatactgagaacgctgtatcttgtttacatttatgggcacttttgaaaagaaattattttgtatggtagtattgttgaaaagatcaataatttagaggatttgatgatcactgtggatcgctgtgcatgggataagcggagctactcatagcttctactatcacggaagaatatatattgctaacccca

SEQ ID NO: 212950 - DNA, 2358 bp, Zea Mays
gcccgcgcacgcattatccattccgtttggacccatgagatttttcgctgggatgaccgtgcacgagacgaatcccgttcggtaaccgataccccaagtcaaggcggatcatccgtcagtccgtcaccgcagtccagggagcgagcgacgacgacgccagggtcgtggtgctagttgcggggtcccggcccgtcgagtccgcctccggttctcccccttctcccgttgcggcgactccggcggcggagacagaggagcctaagcaggaggaggcggcggcggcagcagcagcaggtgtgcaggccatggctgtcacggtagtgcgggacgtcgagacgggcctggacgcgagcaccagcgaccgggacggtgacgccggggacaacccttcctggttcacacctaagagactacttgtcatgttctgcattatcaacatgctgaactatattgatcgaggagcaatagcaagtaatggcgtcaatggtacccgcaaaagttgttcgggtggtacatgcacctcaggctcaggaattcaaggggacttcgatcttaataatcttgaagatggtacattgtcctcagcatttatggttggactgttggtgtcttcgctgatatttgcatgccttgtaaaaagatataatcctttcaggcttattggtgttggcttgttagtgtggactatcgcaacagctggttgtggggtatcatttgatttctggtcaattactatatgccgcatgtttgtgggcgttggcgaagcttcatttataagtcttgcagctccatttattgatgacaatgcaccagtagctcagaaaacagcgtggcttggtatgttctacatgtgtataccaactgggattgcattaggctatgtttatggcggactggttggaaaatacctgaactggcgtgttgctttctggggagagtcaatattgatggttccttttgttattcttggttttgttataaagccactagacctcaaaggatttgctcacaacacaggaaaagaatatggccagatgcttaatcctgaggttcaagatcagataaataataatgggacaaaaaatgttttgcctagtcgaatcgaggatctttcaggaaaggtccagtttttgccatgttctcatgactgaaattggtcgcttcagcaaagatatgaaacaactattacaagagaaggtttttgtcattgttgtcttaggttatatctcctacaacttcgtcattggtgcttattcctactggggcccaaaggcaggtcaagagatctacaatatggcgagtgcggatattatgtttggtggaattactatagtgtgtggaattgttggaacactagcaggaggtttcatccttgacaagatagggtctactattcctaatgctttcaagcttctttctggtgcgacatttgtaggggcaatattctgctttggtgctttttgtttcaagagcctttatgggttcataccctcctttgcagttggggagctttcagttttcgcaactcaggcacctgtaaattttgtatgccttcacgccgtgaagccacatttgcggccattggcaatggccgtatccactgtttcgatccatatatttggtgatgtcccttcttcacctcttgttgggctgcttcaggacaaaatcaataactggagggagacagctcttatattgacatccatccttttcgctgcagttgtgttctggttcattggcatatttgtccccagcgtcgaccgtttcaacgaagagagcgaatatggccttactgccgctgagagatcaagtatcaggccactgcttggtgaaaacgagccacggacatctgactaaaatctgcgcaatccataaccatttattacttggaagggcaattttaggatatgtttgttttcctcctagattatatgagctggattatagtgaaaataagctaaaataagctcgcattgggtaacttatttcagttgcatgccagttgcaatcttagggtacgaggttacaatatcactttggaaggctaaaataagttatcataatccaacttatgtaatctagaagaaacaaacagggccgtagtccgtagtattatcctctgtctgtgccagcaacatgtgaaatgtaaagttgtatgcccaacatgtgaaatgtaaagttgcatgccagttcaatgtagatgtacatatacgaggtctgtttgccttgcgttttttatctctacaggctacagaaacaagcgagagaacgttacaatttatttttacggatgtaaaacattttggattgtgacatgatataacttactggctacaatattactccctagatactctt

SEQ ID NO: 212951 - DNA, 918 bp, Zea Mays
cacgcattatccattccgtttggacccatgagatttttcgctgggatgaccgtgcacgagacgaatcccgttcggtaaccgataccccaagtcaaggcggatcatccgtcagtccgtcaccgcagtccagggagcgagcgacgacgacgccagggtcgtggtgctagttgcggggtcccggcccgtcgagtccgcctccggttctcccccttctcccgttgcggcgactccggcggcggagacagaggagcctaagcaggaggaggcggcggcggcagcagcagcaggtgtgcaggccatggctgtcacggtagtgcgggacgtcgagacgggcctggacgcgagcaccagcgaccgggacggtgacgccggggacaacccttcctggttcacacctaagagactacttgtcatgttctgcattatcaacatgctgaactatattgatcgaggagcaatagcaagtaatggcgtcaatggtacccgcaaaagttgttcgggtggtacatgcacctcaggctcaggaattcaaggggacttcgatcttaataatcttgaagatggtacattgtcctcagcatttatggttggactgttggtgtcttcgctgatatttgcatgccttgtaaaaagatataatcctttcaggcttattggtgttggcttgttagtgtggactatcgcaacagctggttgtggggtatcatttgatttctggtcaattactatatgccgcatgtttgtgggcgttggcgaagcttcatttataagtcttgcagctccatttattgatgacaatgcaccagtagctcaggttcttctccttggagctgttgagtttgggccggctgaacggatttggaagacctgggcgccagggaaatgcaaattttttatgtggctggttgtgcatgatag

SEQ ID NO: 212952 - DNA, 2249 bp, Zea Mays
cacgcattatccattccgtttggacccatgagatttttcgctgggatgaccgtgcacgagacgaatcccgttcggtaaccgataccccaagtcaaggcggatcatccgtcagtccgtcaccgcagtccagggagcgagcgacgacgacgccagggtcgtggtgctagttgcggggtcccggcccgtcgagtccgcctccggttctcccccttctcccgttgcggcgactccggcggcggagacagaggagcctaagcaggaggaggcggcggcggcagcagcagcaggtgtgcaggccatggctgtcacggtagtgcgggacgtcgagacgggcctggacgcgagcaccagcgaccgggacggtgacgccggggacaacccttcctggttcacacctaagagactacttgtcatgttctgcattatcaacatgctgaactatattgatcgaggagcaatagcaagtaatggcgtcaatggtacccgcaaaagttgttcgggtggtacatgcacctcaggctcaggaattcaatataatcctttcaggcttattggtgttggcttgttagtgtggactatcgcaacagctggttgtggggtatcatttgatttctggtcaattactatatgccgcatgtttgtgggcgttggcgaagcttcatttataagtcttgcagctccatttattgatgacaatgcaccagtagctcagaaaacagcgtggcttggtatgttctacatgtgtataccaactgggattgcattaggctatgtttatggcggactggttggaaaatacctgaactggcgtgttgctttctggggagagtcaatattgatggttccttttgttattcttggttttgttataaagccactagacctcaaaggatttgctcacaacacaggaaaagaatatggccagatgcttaatcctgaggttcaagatcagataaataataatgggacaaaaaatgttttgcctagtcgaatcgaggatctttcaggaaaggtccagtttttgccatgttctcatgactgaaattggtcgcttcagcaaagatatgaaacaactattacaagagaaggtttttgtcattgttgtcttaggttatatctcctacaacttcgtcattggtgcttattcctactggggcccaaaggcaggtcaagagatctacaatatggcgagtgcggatattatgtttggtggaattactatagtgtgtggaattgttggaacactagcaggaggtttcatccttgacaagatagggtctactattcctaatgctttcaagcttctttctggtgcgacatttgtaggggcaatattctgctttggtgctttttgtttcaagagcctttatgggttcataccctcctttgcagttggggagctttcagttttcgcaactcaggcacctgtaaattttgtatgccttcacgccgtgaagccacatttgcggccattggcaatggccgtatccactgtttcgatccatatatttggtgatgtcccttcttcacctcttgttgggctgcttcaggacaaaatcaataactggagggagacagctcttatattgacatccatccttttcgctgcagttgtgttctggttcattggcatatttgtccccagcgtcgaccgtttcaacgaagagagcgaatatggccttactgccgctgagagatcaagtatcaggccactgcttggtgaaaacgagccacggacatctgactaaaatctgcgcaatccataaccatttattacttggaagggcaattttaggatatgtttgttttcctcctagattatatgagctggattatagtgaaaataagctaaaataagctcgcattgggtaacttatttcagttgcatgccagttgcaatcttagggtacgaggttacaatatcactttggaaggctaaaataagttatcataatccaacttatgtaatctagaagaaacaaacagggccgtagtccgtagtattatcctctgtctgtgccagcaacatgtgaaatgtaaagttgtatgcccaacatgtgaaatgtaaagttgcatgccagttcaatgtagatgtacatatacgaggtctgtttgccttgcgttttttatctctacaggctacagaaacaagcgagagaacgttacaatttatttttacggatgtaaaacattttggattgtgacatgatataacttactggctacaatattactccctagatactctt

SEQ ID NO: 212953 - DNA, 1012 bp, Zea Mays
cagatgctctccacggccgcgaaccgcacgacggcacgagaggagagacagacagagagagcgagcgactgagaccgacagggttcggttcgacccgatgcttccggcgctgcggcctcgccgccggctcccggtggcatccctcctccgccgcctcctctccgactccaccccctcctcctctggcactggagagagtgatctgatggccgcggccgcagcgaaggcccgggcggaggcggcagcgcgggctcgggtggaggcgtacaagcaagtccaaaacttcgactggagcagcggcgccgactggaagaccgccgccaacatcctcttcacggtgccccctaagcgcaaggagttcggctgtctatttagtggcccaatatgcacggagggagatcaaaaggatggaaggggaagcagaagagaaaaggaaaaaagacgaggaacttgagaaacaaaaacaggtcgaggaagaatctgccaaggaggatgctgattcaaagctttcgaaggtattagacaggctagatacactagagggtgtcgttaaggagattgtggatgacaaaaggaaactttcttcccctgatttaccgaccaaagaggaggttgcaaagaaaaatgaagcatctccggctaaggcttctgattcgagaagctatggtcagccagtggtggctgccaatagtaaggacaccaactatgcttcaaatgctccagcaaatactgcaaaaccaaacaataaggggattggtgataaggcatttccagttgagtccgaaagttgataaatcatttgagtttttttcttctgaaaacacaaaattggtgtttagctatgtagtcgtgtcctcgatgctaagcgaatgaaaagatgtaatttccacaccttaggatatgatgcgtcttaggaaaaaaaatacagtgagctaacgttttgtactacatagccccttcgatagttgaggctgtgatcttggataatgattaccacaaaatctttctgctt

SEQ ID NO: 212954 - DNA, 2254 bp, Zea Mays
aaaaaatccatggcgttaattagggcttttggttaaatggttaccaggccagcctgcactgcagctgcagtgccgccgcaccgcacccctataaaaaccaaggcatgcagcctgcatacagaagacacacagcagcacacaccaagctagtttgatctatacgacgacgctttagaagcagcagtagcaccttgatcacttactctcttcgagctagcaagctcttgctgcattattgcaagaggaacaacgaaggagaagagctagggggaccaagctactgcgggagggagaagggtgtgtgccggcccgccgccaagcactgctacccggccggcggccatggaggtgagctccgtggagttcggtcatcacgcggcggccgcctcaaagtgctttgacgacgacggtcgcctcaagcgcacagggacgatgtggacggcgagcgcgcacattatcacggccgtgatagggtccggggtgctgtcgctcgcgtgggccatcgcgcagctcggctgggtggcaggccccaccgtcatgctgctcttctccttcgtcacctactacacatcggccctactcgccgactgctaccgctccggcgacgcctgcaccggcaagcgcaactacacgtacatggacgcggttaacgccaatctcagtggcgtcaaggtctggttctgcgggttcctgcagtacgccaacatcgtcggagtcgccataggctacaccattgccgcctctattagcatgctggcgatccagagggcgaactgcttccacgtggaggggcacggggacccctgcaacatctccagcacgccctacatgatcatcttcggcgtcgtgcagattttcttctcgcagatcccggacttcgaccagatatcgtggctctccatcctcgccgccgtcatgtcgttcacctactccaccatcggcctgggcctgggcatcgcgcaggtggtgtccaacaagggcgtgcagggcagcctgacggggatcagcgtcggcttggtcaccccggtcgacaagatgtggcgcagcctgcaggcgttcggcgacatcgccttcgcctactcctactcgctcatcctcatcgagatccaggacaccatccgcgcgccgccgccgtccgagtccaaggtcatgcggcgcgccaccgtcgtcagcgtggccgtcaccacgttcttctacatgctgtgcgggtgcatggggtacgccgcgttcggggacaacgcccccgggaacctcctcacgggcttcggcttctacgagcccttctggctcctcgacgtcgccaacgccgccatcgccgtgcacctcgtcggcgcctaccaggtctactgccagcccctgttcgccttcgtcgagaagtgggcgcgccagaggtggcccaagtcccgctacatcacgggcgaggtcgacgtcccgctcccgctcgggaccgccggcggccggtgctacaagctcagcctgttccggctgacgtggcggacggcgttcgtggtggccacgacggtggtgtccatgctgctgcccttcttcaacgacgtggtcgggctcctgggcgcgctggggttctggccgctcaccgtctacttccccgtggagatgtacatcgtgcagaagaaggtgcccaggtggagcacgcggtgggtgtgcctgcagctgctcagcgtcgcctgcctcgtcatcaccgtcgcctccgccgcaggctccgttgccgggatcgtctctgacctcaaagtgtacaaaccgttcgtcaccacctcctgatcgaccgtacgtcctagcttccgtgcagttcaaaacacatacgcacgaacagatcattaattggcgcctagtatatatgtgcagtctttaattaaattaactaggcattaatcgatcgattaccactacgtcgttctagtgatgcgcgtagcttgcatcatcgctcgctgatttaatttccattgtttttctttgatgatctggttagccgaaatggctagtgaattaagagaaaacaaatagtagcagtactgtgtgagtaatcccaagtcaaatacgttattgaagttgtcggcggtacaaaacgcttgtaaaatgtttgtgtttcaattaatcaagaagaattgtacgtgtttcatatatgaggaaaagaaaaaaggacatatgtttgtttctacaacttctaaataaacaacttgatcgagatgttttcttcatggtacgtctttaatggcaaaaattcagcgtcagcgat

SEQ ID NO: 212955 - DNA, 708 bp, Zea Mays
caacctccagctacgaccacatccagtggaacagcttcagtgtaccctgaatggcccagctttcaggccatgcatccatttggccattatcctatgccaacaaatgggcatgctgaaactcatggagctgcgccaagcgctccggaaatgaatgggaaaagcgagcctggcagaacgtctgctccatccgccaacgggattacctcgcaccgtgagagtggaagcgagagtgagagtgaaggaagtgacgacaattctcaaaacgactcacactcgaaggacaatgatgggaaggaagatggcgattctcagaacgacatatcttattcagcatcgcaaggagtggtaaaccaaaccatggcgatgcttccaatgcaaccgggtgcaatggtcggaggagttcctagctccacggcagctaacctgaatatcagagtggactactgggcagctccgggttctgcggctgtccccgcagcgcacggcaaagcgccagctggttcaactcgaggagaccaatgggatgaaagggagctcaagaagcagaagcggaagcagtccaatagagagtccgctcgcagatcccggctgcgcaaacaggtgttgtgcaaccctcgtgctgagtgctgacacctcagcacgaccaacggaattgacaagcaaactgtgccatcaaccatggatttgctaggagtttttccaactggc

SEQ ID NO: 212956 - DNA, 1252 bp, Zea Mays
caacaacttctctagtttcgtgcgccagctcaacacctacgaagatcgtgccggacaggtgggagttcgcgaacgactgcttccgccgaggggagaagcggctgctctgcgacatacaccgccggaaggtgacgctgccagtcgcggcggccacgagggcggtcacggtggtggcgaccatccccatggcgctgcccgtggactcgccggtgtactccggcgaggagcaggtgctgtcgtcaagctcgtcccccgagcccccgtcgctgctgcagcagcagccgacgccgtccgcgtctggctccggtgacatgggcgaggagaacgaacggctgcggcgggagaacgcgtggctcgcgcgcgagctcgggcagatgaagaagctgtgcaacaacatcctcctcctcatgtccaagtacgccgccactaagcagccggacgccgccaaggcggcggccgccgggaactgctccggcggcgagtcgtcgggcgccgccgcggcgcctccgcttccttcgatcctggagctcctgccctcctgccgccgcgaccccgcgtccgcggccgtcgacgcagcggcagcggcagcgggaacggagcacgaggttgatgaaaaggcgggcgctaggctgttcggcgtctccatcgggcggaaacgaatgcgggacgagagcagcggtcacggcggcggcggcgaggaccccgtgggccgctcggcggaggtgaaggcggagccggtggacgcgcgtctcgaccatcagcacagcgcgacggagccgcagtcgtggcccatttaccggcccaggccagtgtaccacccgctccgggcctgcagcggcttggtcagcgctgggagcgaccacgactggtccaacaactcgaggtgacttttgcttgcaagcccaatcgtccacaggttacaggttaaacttagaatgagagatcaagtgtttatgtagcaataactttttgttagtttatctcatattaccgcaagtttcgagtatcattcatgtatagcgatccattaaactagaggttaccttactgaggacgacttgaattaaagtcagttgtttaaactgctagtcagttatttagactgttatcgttgtatttcataatgttaagtaaccctaattagggttatgtgggtaaatatctgctttgcccctaaggggtctcacatctttatataagcaacttgtacaccacctcataagatagagaagagaaagaggccagaggccca

SEQ ID NO: 212957 - DNA, 2596 bp, Zea Mays
ttcttctttggggacagcagctatacctctaatggctaaagaacaggatggatcccccaaggtgcgccacccagaattccaaaggatgcgcgtaactctcaccataggtgtcattggcctctgtgtcacagcatacattcttggtgcttggcaaggtacctcgaacggcattagttcccccttaataagtaccagaacccagtgcaaagatcccgtgcgatcatctggtgctcgcctggatttccaagcccaccaccaggtgggcttcaatgaatcggcgcttgctgtggagaaattcccaccttgccagctcaagtacagtgagtataccccttgccaagatccaaggaaagctaggaagttcccaaagaaaatgatgcagtacagggagcggcactgcccaaagaaagaagacatgctccggtgcttgatccctgcgcctccaaactatagcaaccccttccagtggccaaaaagtcgcgactatgcttggttcaataacattcctcatcgggagctcagtattgagaaggctgttcagaactggattcatgtcgagggagacctgcttagattccctggaggtggcactatgttcccacatggtgccgatgcttatattgatgacataaatgcccttgtaccattaaatgaaggcaacatccgaactgcgcttgatactggatgtggagttgcaagctggggtgcttatcttatgaataggaacatcatcaccatgtcttttgcgccaagggattcacatgaggcacaggtacagtttgcattagagcggggggtaccagccatgattggagtgatggggactgagagaatcccatatccggctagagcatttgacatggcacactgctcgagatgtttgatcccatggaataagcttgatggtgtctatctaattgaagtagacagggttcttaggcctgggggctactggatcctctctgggcctccaatccattggaagaggcactaccagggctgggagaggacagaaggagacctgaagcaagagcaagatgagattgaggacttggcgaaacggctctgctggaagaaggtcgtagagaaaggtgatcttgctatatggcagaaatctatcaaccacgtagaatgtgttgacagtaggaaggtttatgatgctccgcagatttgtaagagcaatgatgtggattctgcttggtacaagaaaatggacacttgcatatctcctctcccagatgtgaagagtgaagatgaagttgctggcggagtccttgagacatggcccaaaagagcatttgctgtccccccaagagtaatccgcggttcagttccaggcctcacccctgagaagttccaagaggataacaaggtgtggtcagagagagtggatcactacaagaaattgattccaccactgggcaaaagacgatacaggaatgtgatggacatgaatgcggggataggtggctttgcagctgcattgatgaagtaccctctttgggtgatgaatgttgtgccttcaggcttggcccatgacaccctgggtgttatttacgaacgagggtttattggcacgtaccatgattggtgtgaggctttctcaacgtacccgaggacctacgacctcatccatgctgataaagttttcagcagttaccaggacaggtgtgacataacgtacatcctactggagatggaccgaattctaaggcctgaggggactgtgatcatcagggacaacgtagaggtgttggtgaaggtacaagctatcactggaggcatgaggtggaagagccaaatcatggaccatgagtccggtccattcaacactgacaagatcctagtggctgtcaagacttactggaccgggaagctcgtgcaaaaacaataatcgtcgccttgttactgtttttcgtctgcgaaaatgtaggcatgacttgcctgtcagttctgtcttcattgccatttttttatcctaacttcaggatatctgtatataggaggcatgtgaaccatgtagctggaattggtatcaaacatcattagccacgtagcgtatgtgacacattgcaatggtgtataagatgttcactcatatatttggtgtgatattgcaatctaataacatgatgcttggtgtgaaaaaaggagattgtaattgacaacatgttcctgtcaaaaatacgatgacaaggttgtggtacagacgaattctgaagattatactatggccaagtgctgtgaaaaaagagagacgaattctgagagccaagggctgtgataaaaactgtgtgaattgcagatagtgtctccatgcagatgtgtgctgagataatccatttaaccatcaaaactactaaatgagggctccagtctcagtaggaagcccaggcggctgcttcagggaatgagagacctggaggagcaggagctgatgcaccaccctgatcaatgataccgaagtgtgctaggaccttcgcgaggaggacgcctgcgacgtacgacagtccggagctgctgaatccaatggacaggtagtagaggagggttgtgaggtatgtcctatgcctcttaacatgtgccttcccgattg

SEQ ID NO: 212958 - DNA, 2757 bp, Zea Mays
atccatatcgttgctgagaataaagaggaagagagaggcgtctcaagagagagagggtcctgcgttcccttcttctgctgcggcggcggaggctctttcagttccatccatcttctccctcgtggctctccttcctctctcccgtagtcccgccgaccccccgcgccggccaaggaaatcaagcgaactctaatggctaaagaacaggatggatcccccaaggtgcgccacccagaattccaaaggatgcgcgtaactctcaccataggtgtcattggcctctgtgtcacagcatacattcttggtgcttggcaaggtacctcgaacggcattagttcccccttaataagtaccagaacccagtgcaaagatcccgtgcgatcatctggtgctcgcctggatttccaagcccaccaccaggtgggcttcaatgaatcggcgcttgctgtggagaaattcccaccttgccagctcaagtacagtgagtataccccttgccaagatccaaggaaagctaggaagttcccaaagaaaatgatgcagtacagggagcggcactgcccaaagaaagaagacatgctccggtgcttgatccctgcgcctccaaactatagcaaccccttccagtggccaaaaagtcgcgactatgcttggttcaataacattcctcatcgggagctcagtattgagaaggctgttcagaactggattcatgtcgagggagacctgcttagattccctggaggtggcactatgttcccacatggtgccgatgcttatattgatgacataaatgcccttgtaccattaaatgaaggcaacatccgaactgcgcttgatactggatgtggagttgcaagctggggtgcttatcttatgaataggaacatcatcaccatgtcttttgcgccaagggattcacatgaggcacaggtacagtttgcattagagcggggggtaccagccatgattggagtgatggggactgagagaatcccatatccggctagagcatttgacatggcacactgctcgagatgtttgatcccatggaataagcttgatggtgtctatctaattgaagtagacagggttcttaggcctgggggctactggatcctctctgggcctccaatccattggaagaggcactaccagggctgggagaggacagaaggagacctgaagcaagagcaagatgagattgaggacttggcgaaacggctctgctggaagaaggtcgtagagaaaggtgatcttgctatatggcagaaatctatcaaccacgtagaatgtgttgacagtaggaaggtttatgatgctccgcagatttgtaagagcaatgatgtggattctgcttggtacaagaaaatggacacttgcatatctcctctcccagatgtgaagagtgaagatgaagttgctggcggagtccttgagacatggcccaaaagagcatttgctgtccccccaagagtaatccgcggttcagttccaggcctcacccctgagaagttccaagaggataacaaggtgtggtcagagagagtggatcactacaagaaattgattccaccactgggcaaaagacgatacaggaatgtgatggacatgaatgcggggataggtggctttgcagctgcattgatgaagtaccctctttgggtgatgaatgttgtgccttcaggcttggcccatgacaccctgggtgttatttacgaacgagggtttattggcacgtaccatgattggtgtgaggctttctcaacgtacccgaggacctacgacctcatccatgctgataaagttttcagcagttaccaggacaggtgtgacataacgtacatcctactggagatggaccgaattctaaggcctgaggggactgtgatcatcagggacaacgtagaggtgttggtgaaggtacaagctatcactggaggcatgaggtggaagagccaaatcatggaccatgagtccggtccattcaacactgacaagatcctagtggctgtcaagacttactggaccgggaagctcgtgcaaaaacaataatcgtcgccttgttactgtttttcgtctgcgaaaatgtaggcatgacttgcctgtcagttctgtcttcattgccatttttttatcctaacttcaggatatctgtatataggaggcatgtgaaccatgtagctggaattggtatcaaacatcattagccacgtagcgtatgtgacacattgcaatggtgtataagatgttcactcatatatttggtgtgatattgcaatctaataacatgatgcttggtgtgaaaaaaggagattgtaattgacaacatgttcctgtcaaaaatacgatgacaaggttgtggtacagacgaattctgaagattatactatggccaagtgctgtgaaaaaagagagacgaattctgagagccaagggctgtgataaaaactgtgtgaattgcagatagtgtctccatgcagatgtgtgctgagataatccatttaaccatcaaaactactaaatgagggctccagtctcagtaggaagcccaggcggctgcttcagggaatgagagacctggaggagcaggagctgatgcaccaccctgatcaatgataccgaagtgtgctaggaccttcgcgaggaggacgcctgcgacgtacgacagtccggagctgctgaatccaatggacaggtagtagaggagggttgtgaggtatgtcctatgcctcttaacatgtgccttcccgattg

SEQ ID NO: 212959 - DNA, 2473 bp, Zea Mays
ttaagatcgtcatatgaggagagcagcaagttgttagaatctaagaaggaagatgtagttaaacttgttacagacaaggaaacgaatgacaacataattttgcaactcaggcaagaacttgaggcaacaaaaaagttgcatgaggcagagactcagcaattagagaccaaagctgccaaagtaaataaggagtttgaacagaggataaaagaaatagaactcatgttagaagattctacaaagaggagaagagaacttgaggaatctactgaatctagaatccaattttggaagcagaaggaaatagtggtaaacaaatttgtgggtttgcaagtaaagaatgctcaggaattgaggctctcttctgtttcagttagacttgaaatacaaaattgtcaaaaaagatggtttgaagaattggctggccttggacaaaatcttaagatggtaacaagtgctgcagaaaaatatcatgcaactcttgcagataatagaaaactattcaacgagatccaggaactgaaaggaaatattagagtttattgccggataagaccttttcgaccctgggaggatgagaagtccacttcagtggaatatattggtgagaatggtgaactggttttatcaaaccctacaaagaagggaaaggaagccggcaagaatttcacttttaacaaggtttttggccctacagctacacaagatatggttttcaacgatattcggccactaattagatcagttcttgatggctacaatgtttgcatttttgcatatggtcaaactggatcaggaaaaacacatacaatgatgggtccggaaaacgcaactgagaaagaatggggtgtcaactatcgagcactaaatgaccttttcaacatctcacatgatcgtcgggacacaattaaatatgaacttggtgttcaaatggttgagatctacaacgagcaaatccgtgatctacttggtaccggtggctcgcagaagaaactagggatccagaataccacccagcccaatggacttgcagttcctgatgcaacaatgtgtcctgttgattcgacttctcatgttattgaactaatgcaaacagggcacaacaatagatccatgagtgcaacagccttgaacgagaggagcagcagatctcacagtgttgtgaccatccatgtccagggccaggatttaaaaactggtaacactttgcgtggtgctctgcatcttgtggaccttgcaggaagtgaaagggtggaccgatctgcagttacaggagacaggctcaaagaagcacagcatatcaacaagtctttggctgcacttggggatgttatattttctttatcacaaaagaatgctcatgtaccatacaggaatagcaagcttacacaagtcttacaaacttctttgggtgggcatgcaaagactctaatgtttgtgcaagtcaacccagatgtttcatcatacactgagactttaagtacactgaaatttgctgaacgtgtatctggtgtagaactaggtgctgcaaggaccaacaaggagggcaaagatgtcaaagaattaatggaccagctttcactgctcaaagataccattgcaaagaaggatgatgaaattgatcagctccaactagccaacagtagcaattccctactgaagtccacgaaacatggtgactccttgttgaagcattcggcctcttctccaggaatgacatccttaggaaaagtggcaagctttggtagcggggcagcttctgatcttgacaactgctctgacaccagtgataggcattccgaagctgggtccatgctctctactgacgaggcccgacagctgagccagaactcggctgatcctggtggtgattcagatggaaggctaagtgatatatcagatggcggtatacccgcgggtgcagaaactgacagttcagcgaacaacgttgtggaccaagaacaagacaaaacatccgctactggaaaagagcggttagccaaagcagtaagtcgagtccagaagctaacagtacccaaagtcggccaagcatcaagcttgaggcctaaaccaagagatccttctgctcctaaatcttcagtcacaccaggtgtgcgaaaaggtaccaccactcaagcaactccaccagcaaaagcaagcggcacttcaaaaagagtaccatagatcaagataatcatttggcgaagccgcttcccagccatttttctttttgcatagctttttcagatcttattgccatgtgtaacaccgatgccaattactgacttgtgcatctcaggtggataggttcttttcttttcattgtttgcaatgagggtgttaactgcatcagtatgtgatgttagcatgccatgagatatcattgctcaatgtgttagtacaaacagtgaaggaattcggattgatccattcatgttgatattgtggcgttcagcagtccctgtaatttcat

SEQ ID NO: 212960 - DNA, 2390 bp, Zea Mays
ttaagatcgtcatatgaggagagcagcaagttgttagaatctaagaaggaagatgtagttaaacttgttacagacaaggaaacgaatgacaacataattttgcaactcaggcaagaacttgaggcaacaaaaaagttgcatgaggcagagactcagcaattagagaccaaagctgccaaagtaaataaggagtttgaacagaggataaaagaaatagaactcatgttagaagattctacaaagaggagaagagaacttgaggaatctactgaatctagaatccaattttggaagcagaaggaaatagtggtaaacaaatttgtgggtttgcaagtaaagaatgctcaggaattgaggctctcttctgtttcagttagacttgaaatacaaaattgtcaaaaaagatggtttgaagaattggctggccttggacaaaatcttaagatggtaacaagtgctgcagaaaaatatcatgcaactcttgcagataatagaaaactattcaacgagatccaggaactgaaaggaaatattagagtttattgccggataagaccttttcgaccctgggaggatgagaagtccacttcagtggaatatattggtgagaatggtgaactggttttatcaaaccctacaaagaagggaaaggaagccggcaagaatttcacttttaacaaggtttttggccctacagctacacaagatatggttttcaacgatattcggccactaattagatcagttcttgatggctacaatgtttgcatttttgcatatggtcaaactggatcaggaaaaacacatacaatgatgggtccggaaaacgcaactgagaaagaatggggtgtcaactatcgagcactaaatgaccttttcaacatctcacatgatcgtcgggacacaattaaatatgaacttggtgttcaaatggttgagatctacaacgagcaaatccgtgatctacttggtaccggtggctcgcagaagaaactagggatccagaataccacccagcccaatggacttgcagttcctgatgcaacaatgtgtcctgttgattcgacttctcatgttattgaactaatgcaaacagggcacaacaatagatccatgagtgcaacagccttgaacgagaggagcagcagatctcacaggaagtgaaagggtggaccgatctgcagttacaggagacaggctcaaagaagcacagcatatcaacaagtctttggctgcacttggggatgttatattttctttatcacaaaagaatgctcatgtaccatacaggaatagcaagcttacacaagtcttacaaacttctttgggtgggcatgcaaagactctaatgtttgtgcaagtcaacccagatgtttcatcatacactgagactttaagtacactgaaatttgctgaacgtgtatctggtgtagaactaggtgctgcaaggaccaacaaggagggcaaagatgtcaaagaattaatggaccagctttcactgctcaaagataccattgcaaagaaggatgatgaaattgatcagctccaactagccaacagtagcaattccctactgaagtccacgaaacatggtgactccttgttgaagcattcggcctcttctccaggaatgacatccttaggaaaagtggcaagctttggtagcggggcagcttctgatcttgacaactgctctgacaccagtgataggcattccgaagctgggtccatgctctctactgacgaggcccgacagctgagccagaactcggctgatcctggtggtgattcagatggaaggctaagtgatatatcagatggcggtatacccgcgggtgcagaaactgacagttcagcgaacaacgttgtggaccaagaacaagacaaaacatccgctactggaaaagagcggttagccaaagcagtaagtcgagtccagaagctaacagtacccaaagtcggccaagcatcaagcttgaggcctaaaccaagagatccttctgctcctaaatcttcagtcacaccaggtgtgcgaaaaggtaccaccactcaagcaactccaccagcaaaagcaagcggcacttcaaaaagagtaccatagatcaagataatcatttggcgaagccgcttcccagccatttttctttttgcatagctttttcagatcttattgccatgtgtaacaccgatgccaattactgacttgtgcatctcaggtggataggttcttttcttttcattgtttgcaatgagggtgttaactgcatcagtatgtgatgttagcatgccatgagatatcattgctcaatgtgttagtacaaacagtgaaggaattcggattgatccattcatgttgatattgtggcgttcagcagtccctgtaatttcat

SEQ ID NO: 212961 - DNA, 2471 bp, Zea Mays
ttaagatcgtcatatgaggagagcagcaagttgttagaatctaagaaggaagatgtagttaaacttgttacagacaaggaaacgaatgacaacataattttgcaactcaggcaagaacttgaggcaacaaaaaagttgcatgaggcagagactcagcaattagagaccaaagctgccaaagtaaataaggagtttgaacagaggataaaagaaatagaactcatgttagaagattctacaaagaggagaagagaacttgaggaatctactgaatctagaatccaattttggaagcagaaggaaatagtggtaaacaaatttgtgggtttgcaagtaaagaatgctcaggaattgaggctctcttctgtttcagttagacttgaaatacaaaattgtcaaaaaagatggtttgaagaattggctggccttggacaaaatcttaagatggtaacaagtgctgcagaaaaatatcatgcaactcttgcagataatagaaaactattcaacgagatccaggaactgaaaggaaatattagagtttattgccggataagaccttttcgaccctgggaggatgagaagtccacttcagtggaatatattggtgagaatggtgaactggttttatcaaaccctacaaagaagggaaaggaagccggcaagaatttcacttttaacaaggtttttggccctacagctacacaagatatggttttcaacgatattcggccactaattagatcagttcttgatggctacaatgtttgcatttttgcatatggtcaaactggatcaggaaaaacacatacaatgatgggtccggaaaacgcaactgagaaagaatggggtgtcaactatcgagcactaaatgaccttttcaacatctcacatgatcgtcgggacacaattaaatatgaacttggtgttcaaatggttgagatctacaacgagcaaatccgtgatctacttggtaccggtggctcgcagaagaatagggatccagaataccacccagcccaatggacttgcagttcctgatgcaacaatgtgtcctgttgattcgacttctcatgttattgaactaatgcaaacagggcacaacaatagatccatgagtgcaacagccttgaacgagaggagcagcagatctcacagtgttgtgaccatccatgtccagggccaggatttaaaaactggtaacactttgcgtggtgctctgcatcttgtggaccttgcaggaagtgaaagggtggaccgatctgcagttacaggagacaggctcaaagaagcacagcatatcaacaagtctttggctgcacttggggatgttatattttctttatcacaaaagaatgctcatgtaccatacaggaatagcaagcttacacaagtcttacaaacttctttgggtgggcatgcaaagactctaatgtttgtgcaagtcaacccagatgtttcatcatacactgagactttaagtacactgaaatttgctgaacgtgtatctggtgtagaactaggtgctgcaaggaccaacaaggagggcaaagatgtcaaagaattaatggaccagctttcactgctcaaagataccattgcaaagaaggatgatgaaattgatcagctccaactagccaacagtagcaattccctactgaagtccacgaaacatggtgactccttgttgaagcattcggcctcttctccaggaatgacatccttaggaaaagtggcaagctttggtagcggggcagcttctgatcttgacaactgctctgacaccagtgataggcattccgaagctgggtccatgctctctactgacgaggcccgacagctgagccagaactcggctgatcctggtggtgattcagatggaaggctaagtgatatatcagatggcggtatacccgcgggtgcagaaactgacagttcagcgaacaacgttgtggaccaagaacaagacaaaacatccgctactggaaaagagcggttagccaaagcagtaagtcgagtccagaagctaacagtacccaaagtcggccaagcatcaagcttgaggcctaaaccaagagatccttctgctcctaaatcttcagtcacaccaggtgtgcgaaaaggtaccaccactcaagcaactccaccagcaaaagcaagcggcacttcaaaaagagtaccatagatcaagataatcatttggcgaagccgcttcccagccatttttctttttgcatagctttttcagatcttattgccatgtgtaacaccgatgccaattactgacttgtgcatctcaggtggataggttcttttcttttcattgtttgcaatgagggtgttaactgcatcagtatgtgatgttagcatgccatgagatatcattgctcaatgtgttagtacaaacagtgaaggaattcggattgatccattcatgttgatattgtggcgttcagcagtccctgtaatttcat

SEQ ID NO: 212962 - DNA, 4362 bp, Zea Mays
cgttgatccaatcggcctgcttgttgtttattagtacctatgtgggattgcaaattgcatgattaggggacgtttccttttttgcaaattgcatgattaggggacgtttcctttttttcttctggtaagccatcatgagctaccataattcgtttccggatagggtacaattaataggcaaagtttgcttcttttacagcccaacctgtgctttccgtttagtggatgcactccctttttatttgggatttttgaatctgaactaggggcacagatttaaaaatacacccccttttttttgccccccccataagcaatactgtcgtacctatacgaatcgtcgtaattgttcatcgaaggttaccatttatatgtcttctgcatcttctacttacctcagttcgtaagagtaactccaatagttatgtaaattttagctctctaaatcacatatttaagaagttgctaaatggcttttggagtaaaaagatgtgagttctgcaatagttctctaaatataggttgtaattttgttttgtatttatccacctaaaaactaagtcacaaaaactatataatgcagtcaacatttttgtttagggagttgttaaatagttgctaaatgtagagagaaaatgaggttagatgacaagttgttaaatttagaaagttaatttagagaactgttggagaatagttttgtgtgtgtcgactgtcgaatcaaattttatttttattttttaaaaatggcaaaaaaactttatttatattggaatgcctgtccaggatggtcctactgtttcaatccaagctaccccttgggtacgtcgtatctgcttttgacatcttaggttccatcgacggagaatgtgctataaaactccagatagatgggtctgatgggtgttcgcatttgccttacttgattaactactcaaataggatgcggagatgctaagtaggaattcttctcggacctccaccaagcacctgttatctgtgtatgcggagaagttaggtaggaattcttctctgacctccaccaagcacctgttatctgtgtactccatgcatcattggtgttatcctctcgctgtatttggatttgctggttgtgttttcgctacttgaggcatctgatttttttaatgatgttcactggaagcattgtttgtttgtcatttattcggttggttctgtgatgtgttgattaacccttcccctttaggatttagatttatattattatatttgctgccttatcaccttggttctaatccaggtttctgtttaattatagtgtaaacatgaattcgacattgtcatttgtacgatgatgttagactgcagcgaatattggtaaaccgtagtgcttatttagtgtatctttaacattttttttggttatgtgactgatcatgcatagggaaggtgttttctaacctctcagctatgtaaatttggaaagcaagaactgatacacgagaaaaactacttcagcttgtcctcagctttgcatgcttgctctgattaatatttgcaagacgaaccttatccgaaagaaatccaagctagttatctgttgaacttggtgtagggtggatttaccaatgaccagatgaagggcagaagctcacccgccagtaattttaggaatgtcatagtttggtccctctgggcatgtaccgtttgaagcctttcttctctcatttgcatctgccttttctttttatagtttgcttgtttgtgctatgtaaagcaaaactaattttgtttgatttcttactaagaatgtatacaaagtttggaaggaataatgtgatatacattgtgtttgtaaatctatttgatagagtgcctgtttataaaaaaatgttaattttctagtttttggggcctttatgctatatttgaaattctacttgacattatcatggatcattttcgctgtaaggttccatgtagctgagtttagataatttcctttgtcagtttgtatcttgtactatcattgtgggtgataaggacactttcaagtgctaaggtctgtattctgttgtctatttaccagctgtttacctgtcaagggatgtgaatgattcagcgtaaaaccttatagtgcatttgcttgtcaattacggaagaatgatttggactgcatatatttcacaatgcacatgtctcataaagggtgtttcttccatgtttttggtgtgatctttcagttgtatgaattgattgaaattctgaattcttgtgttgtatatccatgtactggaaatcaaacattgaagattgaacatggaatgaacttgaacgattttggtacttgttttgtgatatcttacacacaatatatgtagtgccatattttggaatgaactagtttgtgataaacttcgtggcaacacatgctttcatttgagtctggttacgtgataccaaattattgatatccattttgtttttcatctccagattattaagtgcagttgggcctgacttgttttatggctcgaaataatgagggccatctcgagctgccagagatggatcaaattcaacccaagaacatcccacacaatgaatcactgcctctaggccagaagcttctcctgcatcatggaagtgatgcgccccttagaattggtcattcaagtcatggaaatatgggacttagaataaatgatcttccatcttcaagtcgcactgtgcagactctaggttatagagttgggaacccaggaacctcgcatgctccctttgttcattttcatgctggaagttctggtagccatttaccagaccctgctgtgaattatccacataggtctgaggaaggcttcgctccagtgggttcccatatggacaacagaagggctgcaatgaagcgaaaaggtcccagtgtacaccctgcagggatcagtgctactggttattatgttggaagttcttccagtactcagccatctaactctgtgcagccaaatgcagctccacttgctgagccctttctccgtcaaatacctttaagcattgaccaaagtggttgggatatccaacacttgattcaccaagaagggtttcagaggaatgtgagagcacgccacagtagtattccattagtacccagatcagcttcaacatacccattaaacataaacagtgttcatgtgccgtcattcggttcaaccgcaagtgcttcctcaagtgcaccagtggaaatgaaccaagtgcctgtttctttgccaacaagaactctaccatcaggtgcaccaggtatgactagcagggtcccaacagggagggcttactatcctgtggttggaagcagcagcagcagctcaagtgttggtgctgtcccaactatccacggatcatctggcgctgcaatgtttgctaacgagccatgccccaccagatggtcattcagagtcatccagctgctacttccgcagcaacatctacatccatgcggaccgcccaaccatcattacctgccagaaccgcagcggcttccagacatgcaaggcatgtgtcagcagggcttgccaacaacggaaggtacagaagggccaggagctcttactacaggcttcatccattgatggtagaggcagagcggttcatgatggaccacttggtcttctacgaatcgagagcagcagctgctgacccccacagggacatgagactggacattgacaacatgagctacgaggacctgttggctctgggagaagctatgggcaatgtcaacacaggcctggccgatgaaaaagtttccgagtgcgtgaaagaagtggtctgctgcagttctgaccacacgcagatggaccaagacgacggaagctgcgccatttgcctggaggactacagagacaaggaggcgctgggaatactcaagtgcaggcacgacttccacgccggctgcatcaagaagtggctgcagacgaagaactcgtgcccggtgtgcaaagcggccgcggcctagtagggagggacacgccagatgaggaggaggaggagcaagcgactgttgcgctcgatccgattcatttttaggctcaggtcaagatgtatgccgtctcattcttttttttcccatcctcctagccagggcagccgtgtaaatagatgctcttatgggattaactattttctcttgggttacattggcccagattcttttgttgtatttaacaataacaacccagttgtggaagactggaaggtattgatcgtcaagtggttatacattagtctcatgtcggggttttcggatccgccgacacttgaaattagttgcgaggtatacctcttttggacggtgaagtttggtacacggaatcttagttgtgg

SEQ ID NO: 212963 - DNA, 2979 bp, Zea Mays
cgttgatccaatcggcctgcttgttgtttattagtacctatgtgggattgcaaattgcatgattaggggacgtttccttttttgcaaattgcatgattaggggacgtttcctttttttcttctggtaagccatcatgagctaccataattcgtttccggatagggtacaattaataggcaaagtttgcttcttttacagcccaacctgtgctttccgtttagtggatgcactccctttttatttgggatttttgaatctgaactaggggcacagatttaaaaatacacccccttttttttgccccccccataagcaatactgtcgtacctatacgaatcgtcgtaattgttcatcgaaggttaccatttatatgtcttctgcatcttctacttacctcagttcgtaagagtaactccaatagttatgtaaattttagctctctaaatcacatatttaagaagttgctaaatggcttttggagtaaaaagatgtgagttctgcaatagttctctaaatataggttgtaattttgttttgtatttatccacctaaaaactaagtcacaaaaactatataatgcagtcaacatttttgtttagggagttgttaaatagttgctaaatgtagagagaaaatgaggttagatgacaagttgttaaatttagaaagttaatttagagaactgttggagaatagttttgtgtgtgtcgactgtcgaatcaaattttatttttattttttaaaaatggcaaaaaaactttatttatattggaatgcctgtccaggatggtcctactgtttcaatccaagctaccccttgggtacgtcgtatctgcttttgacatcttaggttccatcgacggagaatgtgctataaaactccagatagatgggtctgatgggtgttcgcatttgccttacttgattaactactcaaataggatgcggagatgctaagtaggaattcttctcggacctccaccaagcacctgttatctgtgtatgcggagaagttagattattaagtgcagttgggcctgacttgttttatggctcgaaataatgagggccatctcgagctgccagagatggatcaaattcaacccaagaacatcccacacaatgaatcactgcctctagaagcttctcctgcatcatggaagtgatgcgccccttagaattggtcattcaagtcatggaaatatgggacttagaataaatgatcttccatcttcaagtcgcactgtgcagactctaggttatagagttgggaacccaggaacctcgcatgctccctttgttcattttcatgctggaagttctggtagccatttaccagaccctgctgtgaattatccacataggtctgaggaaggcttcgctccagtgggttcccatatggacaacagaagggctgcaatgaagcgaaaaggtcccagtgtacaccctgcagggatcagtgctactggttattatgttggaagttcttccagtactcagccatctaactctgtgcagccaaatgcagctccacttgctgagccctttctccgtcaaatacctttaagcattgaccaaagtggttgggatatccaacacttgattcaccaagaagggtttcagaggaatgtgagagcacgccacagtagtattccattagtacccagatcagcttcaacatacccattaaacataaacagtgttcatgtgccgtcattcggttcaaccgcaagtgcttcctcaagtgcaccagtggaaatgaaccaagtgcctgtttctttgccaacaagaactctaccatcaggtgcaccaggtatgactagcagggtcccaacagggagggcttactatcctgtggttggaagcagcagcagcagctcaagtgttggtgctgtcccaactatccacggatcatctggcgctgcaatgtttgctaacggtggctatgttcctagtagtgttcatgctggaactgttccgatcttccctaacccagcgcctgctacttcatctggctccagagccatgccccaccagatggtcattcagagtcatccagctgctacttccgcagcaacatctacatccatgcggaccgcccaaccatcattacctgccagaaccgcagcggcttccagacatgcaaggcatgtgtcagcagggcttgccaacaacggaaggtacagaagggccaggagctcttactacaggcttcatccattgatggtagaggcagagcggttcatgatggaccacttggtcttctacgaatcgagagcagcagctgctgacccccacagggacatgagactggacattgacaacatgagctacgaggacctgttggctctgggagaagctatgggcaatgtcaacacaggcctggccgatgaaaaagtttccgagtgcgtgaaagaagtggtctgctgcagttctgaccacacgcagatggaccaagacgacggaagctgcgccatttgcctggaggactacagagacaaggaggcgctgggaatactcaagtgcaggcacgacttccacgccggctgcatcaagaagtggctgcagacgaagaactcgtgcccggtgtgcaaagcggccgcggcctagtagggagggacacgccagatgaggaggaggaggagcaagcgactgttgcgctcgatccgattcatttttaggctcaggtcaagatgtatgccgtctcattcttttttttcccatcctcctagccagggcagccgtgtaaatagatgctcttatgggattaactattttctcttgggttacattggcccagattcttttgttgtatttaacaataacaacccagttgtggaagactggaaggtattgatcgtcaagtggttatacattagtctcatgtcggggttttcggatccgccgacacttgaaattagttgcgaggtatacctcttttggacggtgaagtttggtacacggaatcttagttgtgg

SEQ ID NO: 212964 - DNA, 2001 bp, Zea Mays
gtatagtatgctaatggatgggtactgtcttgttggcaagatggagaaagcattaagagtatttgatgctatggtgtcagctggcattgaaccagacgatgtagtgtatggtacacttgttaatggctattgtaaaattggaaggattgatgaaggattgagtcttttcagagaaatgctgcaaaagggaataaagccttcaactattttgtacaacatcataattgatgggttatttcaggatgggagaacagttcctgcaaaggtgaaattccatgaaatgacagaaagtggtatcgctatggacaaatatacatacaacatagttcttcgtggactttttaaaaatagatgctttgatgaagcaatctttcttttcaaagaattacgtgcaatgaatgtaaagatcaatatcataactctcaataccatgatagctggaatgtttcaaaccaggagagttgaagaagctaaggatctgtttgcttctatctcgagaagtgggctggtgccttgtgttgtgacttacagtataatgatcacaaatcttataaaagaaggattggtggaagaggcagaagatatgttttcatccatgcagaatgctggctgtgagcccaattctcgattgctgaatcatgtagtcagggaattactaaagaaaaatgaaatagtcagggctggagcttacctgtccaagattgacgagaggaatttctcacttgaacatttaaccgcaatgttgctggtcgatctcttctcaagcaaaggaacttgtagggaacaaataagatttctccctgcaaagtatcattttcttgcagaggccagtccgtgattgatatgttgattttttttggaatcagtccttgcacgcacctgtcacagttaaactacatgttttatcatgtctgttaacacagccgatgttgcatttatgaggaatgacgttataactgctgggagaataatgtagcatgctgaatcctgttttgggccctggctgagccgcccagttcgtcatgaccagcaagtgattgcaaccaaaggcagtctggcctaatgctgtggcttgtaagggcaaagtggataccctgctgctgggtagtactagtatattgctgttcaaacctgcaaatatctgggatcagctgatggatgaagaacaatcagtagtctctgggtaaaatagcatgcctgcgcaagcgagcggacatgagtgacaagaagcggattaggtgggattaaaatccatggtgggattgggtgtaagaatgaccggacaaggcctaatgtgtatcagcagattgacaacgcaacaagagcgaagccacaagaggtttcagggtagggtaccatctaatgtgtatcagcagcagcaggtttttctcaggtgttaagaaccaccgacatgaaaaagcaccgagtttgctcgttcattccttggcagccttgtcgatgagctcctgtggatgtgggggatgacgccgccgccgctggcggcgatggtagccttgatcagggtttccagctcgtcgttcccgtggatcgccagctgaaggaacagaaggcaaaaacagagagggaaattgaacaaggaataaacaagagattgtataggaagcttgatacgaaatggaagcagagcattgtggtcagaccagcaccatctctaagggagaacaaagagaaggcaagcagagcctgtgcacgtattggttggttcagttgtgcggttgctctttttggctcttatcttcgtcgccattcttgtatttgtaggattgtggaaatgtaaaccgttcaagttgctgcattagtagcagctagtagtatctgtgattcagaaatctaaaagttgtgacttgttcatgtagaatgaaccttgtgtagatgagttgcaaggtgtgagtgttccatatattattgtaggatgagttagaatcctgaatgtcaagtgcttattacgtggatgcaaaatgcaaataaataaagtgatgc

SEQ ID NO: 212965 - DNA, 4309 bp, Zea Mays
gtaatttgagcatggcagccacgtagatgtgtccaggtactgctggcaccatgggaatacgaccttgctgcatgttgaacaggttttaggggcatctgtccattccagttgcttaaaaggcaaaattaattgaaggtcgccctccgtgccttgagttccacctacagaccactgcaaggtgtggagctacttgtattctattttgtgtagcctctccccagtccctaggtttgcctgaccctgaaccgagcacaacaatccctgagtggtgaccacaaccagcagttcacctatatcaccgtggccagaacggagtcaagtcatcgtggaactggtgctgcgggcagcctcaccgtggaccgatcgactggagtcatccctggtcaatctcgcgcacgcaccgagactttggaaggagcaaattggacccaatttggatgaacactttgatgcagacatccacaagtgaattggatctaagtccatacaccacttcatgtaaacacttatcagacatggtatcaattcttcaggataggttcctcaacctacaggcactcctgtcatgccatcatctactggtctaagtttaggaaatattagggtggcattgaaaaccaaacttccaaatttctcaattagcgaagatcttacacttatttcctaatggctaaacatgagcctaaacctagtgggtagtggctggtaagtaggtaaacatagtcttttggaatgtggtatgagtttagtacgttgatcattagtgtatcacaatgtgagaatatctagttgtaggtatgagacaacataagtcttccttttggaaaggtatataaagagagtacaaaacctaaagggagcattgtaccccaactaaaaattatgtagcttggaaggccaatgggatcttaccaaagagcaagtgaccaagttcatgtcgtaccactgccaagtcataaacaaaaacgacagtagcctacaaggtaatgtaacattatttcagtctattgtgcatgaaagtagtaccttgtacatgaccatagtgacatgatttattttgtagactgtttttgccatgaccttgtacaatagcttagagaaaaggcccttctctacttctcattgttgggaggttctaaagaatgaagcaaaatggttagacttggagtagggatcaaaaaatgttgatgtgttagtggactaaggtgcagattctatccccatgggcaatggtaacatgtgtctggtttcttaatctaataacaagagtcgactcaagagagacaatgacaagactaccaagaagaagacatcaacatacccgacatttgacagcactgagtacatctccaagatgtcaaatttgacaatgaagaagattgagtacttgtagaggtccgatggaacacttggcactaacattcactaacttgttcaaatagaggaaaagaagatggaaatggagaaaggcatctaaccatcaaggccaataaggaggagagtgaagctgagctcacgacaatggcaagggccaaggaagacgagcagatcatgggaattgacctagaatcttgcaatctagcaaaacgatcattttatgatgccatgcaacatgacattctagaaatatgggtggctaccacgaaaagctacaatatatctttccaagcaagctatattaacatgcaccaagggggaaaaaggaaagagtattggcgcaaaccttgggcttgctggagcaatccccaaagccgggttagcagcaggagcgacgagcccaaaccttcctacccctcgtcgtcctcggctaatccgccgcgcctccgatactcccaaggcagcgcccgccagctgcaacaacagcatcagcaagcgaggagtagccaccagcccaccacgatctcatcagactcctctcaaatcctcccgcccactctccatttccctcccctcccccgccaccctgcaatggccggtctcctccacctccagtccacgcttctcccatcggcgtccgcgctccgccgccgtgcaggcgtgccggtgccatcctcgtcccgccgccgatgccggattgaggccaagatccgggaaatcttcatgccagcgctcagctccaccatgaccgagggcaagatcgtctcctggaccgccgctgagggcgaccgccttgccaagggcgaccccgtcgtcgtcgtcgagtccgacaaggccgacatggacgtcgagaccttctacgacggcttcctcgccgccgtcctcgtgcccgctggcgactcagcgcccgtcggctccgccatcgcgctgcttgccgagtcagaggaggacatcccagtggcccagtcacaggctgcctccttctcctccacgtcccccttaccgtcgcctccgcaagaaactgctgctcaagaagcatccccttccccgccgccacctcctcccccagggccggtgtcagtctctgctcccacgccgcctttgccagcaacacaaggcgagcgtgtggttgcttcaccctacgccaagaagctcgccaaggacctcggcgttgatcttttctcagtcacggggtcaggcccctgtgggcgaattgtggccaaggatgtcgaggctgcgcttgctgcgcccaagaaggccgcaccagtgactgctccacggccggatgtgccattggggtcgacggtaccattcacgacaatgcagggtgctgtcagcaagaacatggtggagagccttgccatcccgacattcagggtcggatacaccatcacaactgatgctcttgatcagctctacaaaaaaattaagtcgaagggggttacaatgacagcactgttggctaaggcgacagcaatggcgctggttcagcatcctgtggtgaactccagctgcagggatgggaagagcttcacctacagcagtagtatcaacattgccgtggcagtggccatagatggtgggttgattacaccagttcttcaagatgctgataagcttgacatttattcattgtcaaggaaatggaaagagttagttgataaggcgcgagcaaagcagttgcagccccatgagtacaactctggcacgtttactctctcgaatcttggtatgtttggagttgataggtttgatgcaatactgccacctggaactggagcaatcatggccgtcggggcatcagaacccaccattgttggtacaaaagatggtagaattgggatcaagaatcaaatgcaggtaaatgttaccgccgatcatcgggttatttatggagctgaccttgctgcttttctgcaaacacttgccaagataattgaggatcccaaggatcttacattctgaatgtcccaactgattgtttttccctgaggcaatcaaaaccgggtgcttcttacctatcagtagatgtgtagtttgtcttctgtttatgtgattaggtgttttaagctgtcaccaatgtcagcatcaggtgtatctaccatttttactggacgtttcatggatagtggattttgttgagctcctcaatgtaccgtatccttgtgggatacaaagaatgaaatgtaccttgtaccaccctgtggttgatttctcatgcttgtcaaacagaaatatggttgacgctcttgcaagggtgctgacgctatatcttcagggagatctgtaaaaacgggtcacatatctgtttgttttacatgtgaaggagacggatcatggtttctccaaaccactccaatatgccaaggctgtagggtatcggatatcctgacctgctgttgtacattcctgggatagcacaagcgcgggcgggagggagacggtgccgcccggacacgggcgagaggcggccccttggcgacgcagctcacgcccggtgagagcccgtgctggagcgcatgcccgggcgacagggaggcgaggcgctggttgggcgagagcacggggcgagagcgagctggcgccatttgattggtccacgtggcgccacgtgtgctagccgttgcaactagttgattttgacctaaaaattcaaaaaaactgcaaaaaatcacaaatttcatcctcaatgcccttataaatacccctatccgggtggagctcattgtacacactacatctcaaattttctcttccaaactctcctccacacaacgtcaggttgctccccagatttgaacacgttcatggatctcttgcagtccgatgggtcacctacaacccttccgtttgatgagtcttctccactatatcgttgctttgatgtttcaggctcagtaccccgtgcactatttccggctgtgcgtcaacc

SEQ ID NO: 212966 - DNA, 1989 bp, Zea Mays
atggcaagggccaaggaagacgagcagatcatgggaattgacctagaatcttgcaatctagcaaaacgatcattttatgatgccatgcaacatgacattctagaaatatgggtggctaccacgaaaagctacaatatatctttccaagcaagctatattaacatgcaccaagggggaaaaaggaaagagtattggcgcaaaccttgggcttgctggagcaatccccaaagccgggttagcagcaggagcgacgagcccaaaccttcctacccctcgtcgtcctcggctaatccgccgcgcctccgatactcccaaggcagcgcccgccagctgcaacaacagcatcagcaagcgaggagtagccaccagcccaccacgatctcatcagactcctctcaaatcctcccgcccactctccatttccctcccctcccccgccaccctgcaatggccggtctcctccacctccagtccacgcttctcccatcggcgtccgcgctccgccgccgtgcaggcgtgccggtgccatcctcgtcccgccgccgatgccggattgaggccaagatccgggaaatcttcatgccagcgctcagctccaccatgaccgagggcaagatcgtctcctggaccgccgctgagggcgaccgccttgccaagggcgaccccgtcgtcgtcgtcgagtccgacaaggccgacatggacgtcgagaccttctacgacggcttcctcgccgccgtcctcgtgcccgctggcgactcagcgcccgtcggctccgccatcgcgctgcttgccgagtcagaggaggacatcccagtggcccagtcacaggctgcctccttctcctccacgtcccccttaccgtcgcctccgcaagaaactgctgctcaagaagcatccccttccccgccgccacctcctcccccagggccggtgtcagtctctgctcccacgccgcctttgccagcaacacaaggcgagcgtgtggttgcttcaccctacgccaagaagctcgccaaggacctcggcgttgatcttttctcagtcacggggtcaggcccctgtgggcgaattgtggccaaggatgtcgaggctgcgcttgctgcgcccaagaaggccgcaccagtgactgctccacggccggatgtgccattggggtcgacggtaccattcacgacaatgcagggtgctgtcagcaagaacatggtggagagccttgccatcccgacattcagggtcggatacaccatcacaactgatgctcttgatcagctctacaaaaaaattaagtcgaagggggttacaatgacagcactgttggctaaggcgacagcaatggcgctggttcagcatcctgtggtgaactccagctgcagggatgggaagagcttcacctacagcagtagtatcaacattgccgtggcagtggccatagatggtgggttgattacaccagttcttcaagatgctgataagcttgacatttattcattgtcaaggaaatggaaagagttagttgataaggcgcgagcaaagcagttgcagccccatgagtacaactctggcacgtttactctctcgaatcttggtatgtttggagttgataggtttgatgcaatactgccacctggaactggagcaatcatggccgtcggggcatcagaacccaccattgttggtacaaaagatggtagaattgggatcaagaatcaaatgcaggtaaatgttaccgccgatcatcgggttatttatggagctgaccttgctgcttttctgcaaacacttgccaagataattgaggatcccaaggatcttacattctgaatgtcccaactgattgtttttccctgaggcaatcaaaaccgggtgcttcttacctatcagtagatgtgtagtttgtcttctgtttatgtgattaggtgttttaagctgtcaccaatgtcagcatcaggagacggatcatggtttctccaaaccactccaatatgccaa

SEQ ID NO: 212967 - DNA, 2164 bp, Zea Mays
tgtaaacacttatcagacatggcaccaagggggaaaaaggaaagagtattggcgcaaaccttgggcttgctggagcaatccccaaagccgggttagcagcaggagcgacgagcccaaaccttcctacccctcgtcgtcctcggctaatccgccgcgcctccgatactcccaaggcagcgcccgccagctgcaacaacagcatcagcaagcgaggagtagccaccagcccaccacgatctcatcagactcctctcaaatcctcccgcccactctccatttccctcccctcccccgccaccctgcaatggccggtctcctccacctccagtccacgcttctcccatcggcgtccgcgctccgccgccgtgcaggcgtgccggtgccatcctcgtcccgccgccgatgccggattgaggccaagatccgggaaatcttcatgccagcgctcagctccaccatgaccgagggcaagatcgtctcctggaccgccgctgagggcgaccgccttgccaagggcgaccccgtcgtcgtcgtcgagtccgacaaggccgacatggacgtcgagaccttctacgacggcttcctcgccgccgtcctcgtgcccgctggcgactcagcgcccgtcggctccgccatcgcgctgcttgccgagtcagaggaggacatcccagtggcccagtcacaggctgcctccttctcctccacgtcccccttaccgtcgcctccgcaagaaactgctgctcaagaagcatccccttccccgccgccacctcctcccccagggccggtgtcagtctctgctcccacgccgcctttgccagcaacacaaggcgagcgtgtggttgcttcaccctacgccaagaagctcgccaaggacctcggcgttgatcttttctcagtcacggggtcaggcccctgtgggcgaattgtggccaaggatgtcgaggctgcgcttgctgcgcccaagaaggccgcaccagtgactgctccacggccggatgtgccattggggtcgacggtaccattcacgacaatgcagggtgctgtcagcaagaacatggtggagagccttgccatcccgacattcagggtcggatacaccatcacaactgatgctcttgatcagctctacaaaaaaattaagtcgaagggggttacaatgacagcactgttggctaaggcgacagcaatggcgctggttcagcatcctgtggtgaactccagctgcagggatgggaagagcttcacctacagcagtagtatcaacattgccgtggcagtggccatagatggtgggttgattacaccagttcttcaagatgctgataagcttgacatttattcattgtcaaggaaatggaaagagttagttgataaggcgcgagcaaagcagttgcagccccatgagtacaactctggcacgtttactctctcgaatcttggtatgtttggagttgataggtttgatgcaatactgccacctggaactggagcaatcatggccgtcggggcatcagaacccaccattgttggtacaaaagatggtagaattgggatcaagaatcaaatgcaggtaaatgttaccgccgatcatcgggttatttatggagctgaccttgctgcttttctgcaaacacttgccaagataattgaggatcccaaggatcttacattctgaatgtcccaactgattgtttttccctgaggcaatcaaaaccgggtgcttcttacctatcagtagatgtgtagtttgtcttctgtttatgtgattaggtgttttaagctgtcaccaatgtcagcatcaggtaaattttccctgttggttaccttattatcatcggtttgtgtttcaataaaattcttttttttgtcttgcttaactaaaataggtgtatctaccatttttactggacgtttcatggatagtggattttgttgagctcctcaatgtaccgtatccttgtgggatacaaagaatgaaatgtaccttgtaccaccctgtggttgatttctcatgcttgtcaaacagaaatatggttgacgctcttgcaagggtgctgacgctatatcttcagggagatctgtaaaaacgggtcacatatctgtttgttttacatgtgaaggagacggatcatggtttctccaaaccactccaatatgccaa

SEQ ID NO: 212968 - DNA, 1371 bp, Zea Mays
tgccctatcaaatcagctcattcaagagtgctatgtttttctccagcggcacgaagtgaagaacacgtttttgtgacgccatggctgtggaaagagatatatttggaatttctgggccaacgtatctgaaatcaatcgattggaactgtgagcataatcggagatctgtggctgcaagcttagttcaggctgtatatgtgttggagagagaccggcaactgaatcatcaatcttttgaagccttggcacctgcttggtgggaattcctccattttgagctgattcgcaagctgattgatgatgctgatatgtccatatttggtgcaatatttgaattcaaccctccaaaggaggaagcttctggtgcaaatgctccaagatttgtcatcgcattcagaggcaccataacagagaaggatactatctctagggacctttccctggacctgcaccttgttcaaaatggtctccacaggacctcgagatttaatatagcaatgcaagctgttcaaaacgtagcctcggttttccctggatccacgatttggctagcagggcattcactaggcgctggcctggccatccttacgggaagaaacatggttaagaagggtgtgcttttagaaagctttctcttcaacccaccgttcgttgctgctccagttgaaaggatcagggacgaaagggtaaagcacggatttcgtattgcaagaagcgtgattactgctggattgactattgccatgaaagctaaaactgagggtagcagtcagagatccgtcgctgaagaatctttcagcattttgtcatcatggacgccgtacctgttcgttaatccaggagaccacatttgctcagagtacattgggtacttccagcaccggaagaacatggaggatcttggtgccggatttatcgagaagcttgcgacacagaattccatcggagacctgttcttcaaggcactagggtgggagtcagaaccgctgcaccttcttccgtctgccgatctaatcgtcaacgtgagcccttcgtctgatttcaagtacgctcacggcatcagccagtggtggcaacctgagctgaatttgcagtgcagtaaatataggtactcatagttgtacgtcgctagaaatgatgtctcagaaacttagttatcctctctatcccttcagtttattcatgtggttcattctgtttgttgtagtgttggtttcccagctgtggtagactatttcagacatattgactgcattttcctgacctgcaaaatctgttgattgtgtggagtaaagttgtgacatccatcgtttatctgccctgtacagtatgtttatccatttatggatgatcgcatcatctggattcttg

SEQ ID NO: 212969 - DNA, 2410 bp, Zea Mays
cctcaacacagtaatcaaacaaagccttacagacgcacgtaatcgtcgtgatgagcaatacttgttttgtattatgccattattttacatcgcgggtatttagcggtttctcacagacgttgtaaatatggccacaaattagtagcagcccactgcccaccgaggcagagtagaaaccccatcatgccgcatcacggcatcacgcgcgtgccttcctcgaccctcgctactgctactgtctcgtctcttgctcgcatcgtctggggaccgcggagcggcggcggcgtggcgcagcggcacggcagcctccccctcgctcctcctactccggctcttcccctctccccctcagccctacgcccctgcgcggctgcgtgacctgcgtccagccgcagcggctggtgcccatcggcggcaagtagcagagcagcagcagccgccggcggtcctcccctccccctcggcctcgctccggctctcccagtcccagctcgagctccgtactgaaggttgaagcaaggacccaaaacagattgccgccatcaaagatggaatctgggagcacgttctatggaggggaaggtctctccatcgaccccaagtggtttatcgacccgaagcttctctttgttgggccacgcatcggcgagggcgctcatgcaaaggtctatgaggggaagtataagaaccaaaatgttgctatcaagattgtgcacaaaggggacacccctgaggagatgaccaagagggaggggagattcttgagagaggtgaccatgctgtcaagggtgcagcacaagaacctcgtcaagtttattggggcctgcctagaacctgtcatggtggtcgtgacagagctactagtggggggttcgttgcgcaagtatttggtcagtctccgacctaggagccttgagcctcgtgtagcagtggggtttgcattggacattgcccgagctatggaatgcttacatgcacatgggatcattcatcgtgatcttaagcctgagaatctgttgctgactgcagaccagagaacagtaaaacttgttgatcttggtttggctagggaagagacactaacggagatgatgactgctgagacaggaacataccgttggatggctccagagttgtacagcacagtaacactgaggcatggagaaaagaagcattacaaccacaaagtagatgtctacagctttgcaattgtgttgtgggaactcctccacaataaactgcccttcgagggaatgtctaaccttcaagctgcctacgctgccgctttcaagaatatcagaccaagtgccgataacttgcccgaggagctgtcagaaatcctaacatcctgctggaaggaagacccaaacgacagaccaaacttcacacagataatacagatgctcctacactacctatccaccctttcgccacaagagaccttggcgggcccccgccgcacgttcagttcggagaacacaatcctgcccccagagtctcccgggacaagctcgctgatggcttcgcggggcgacctcggcgacacgcccaagggcaagaaggaagacaagccgaggggcttcttcttctgtttcagcgagtgctattagcacgagcccccccaaagggggaacactccgataagcttgcaaatactgaacgaacaccgtctctccccagctccgatgccctgcgactcaagccatgtccagccggtcaagtcccaggcatccatagtccgcaccctgaagaacggaagtgtagtcgaacactgttttgttttcttctgctaatcaaggtctcctgcatcgctgacatgctgatgacatataccagcagggtaaaacgacgggtaaaccttttgactccagatagtaatggtgggaatagcttacctcccctgtgttttctggcgcaccatggtgtaacggagttgctagagcgcgactatagattgccttcctgcctgcctgtctcgcccgacatcgtatagaaataaaaccaataattcgcatctgtcggtttgtctggttgcaaagggtaagctgccagtccttttgtgttcttgttctgccagttctttgtgttcttggcctggtcgtcttccgttgctgtacagctgcgttttgttgcagctgcaagatttgtgtagcaggggagactgttgcagctatgtgtatgcgttgcagcagcagcaataaggcaacacactactacaggggagggataaactgttcggtctctcctggcagcagttgcagctgcgggtaaaaaggccagccgaatcggggaaagggttccaaaagccaagccctgccctgatcggttgtcattgctgcaggggctgctgctcccacagacgcacagctgcaacagtttctcctacacatatatatctgctttggccagt

SEQ ID NO: 212970 - DNA, 2540 bp, Zea Mays
cctcaacacagtaatcaaacaaagccttacagacgcacgtaatcgtcgtgatgagcaatacttgttttgtattatgccattattttacatcgcgggtatttagcggtttctcacagacgttgtaaatatggccacaaattagtagcagcccactgcccaccgaggcagagtagaaaccccatcatgccgcatcacggcatcacgcgcgtgccttcctcgaccctcgctactgctactgtctcgtctcttgctcgcatcgtctggggaccgcggagcggcggcggcgtggcgcagcggcacggcagcctccccctcgctcctcctactccggctcttcccctctccccctcagccctacgcccctgcgcggctgcgtgacctgcgtccagccgcagcggctggtgcccatcggcggcaagtagcagagcagcagcagccgccggcggtcctcccctccccctcggcctcgctccggctctcccagtcccagctcgagctccgtactgaaggttgaagcaaggcctccatctttgagaccctcgcgggcgacgagctctagtcttctgttcctgctgtgcgagacggagcacccaaacccaagctatttatattcggatctgatctgatccaattacaagtgtagtttacacgacccaaaacagattgccgccatcaaagatggaatctgggagcacgttctatggaggggaaggtctctccatcgaccccaagtggtttatcgacccgaagcttctctttgttgggccacgcatcggcgagggcgctcatgcaaaggtctatgaggggaagtataagaaccaaaatgttgctatcaagattgtgcacaaaggggacacccctgaggagatgaccaagagggaggggagattcttgagagaggtgaccatgctgtcaagggtgcagcacaagaacctcgtcaagtttattggggcctgcctagaacctgtcatggtggtcgtgacagagctactagtggggggttcgttgcgcaagtatttggtcagtctccgacctaggagccttgagcctcgtgtagcagtggggtttgcattggacattgcccgagctatggaatgcttacatgcacatgggatcattcatcgtgatcttaagcctgagaatctgttgctgactgcagaccagagaacagtaaaacttgttgatcttggtttggctagggaagagacactaacggagatgatgactgctgagacaggaacataccgttggatggctccagagttgtacagcacagtaacactgaggcatggagaaaagaagcattacaaccacaaagtagatgtctacagctttgcaattgtgttgtgggaactcctccacaataaactgcccttcgagggaatgtctaaccttcaagctgcctacgctgccgctttcaagaatatcagaccaagtgccgataacttgcccgaggagctgtcagaaatcctaacatcctgctggaaggaagacccaaacgacagaccaaacttcacacagataatacagatgctcctacactacctatccaccctttcgccacaagagaccttggcgggcccccgccgcacgttcagttcggagaacacaatcctgcccccagagtctcccgggacaagctcgctgatggcttcgcggggcgacctcggcgacacgcccaagggcaagaaggaagacaagccgaggggcttcttcttctgtttcagcgagtgctattagcacgagcccccccaaagggggaacactccgataagcttgcaaatactgaacgaacaccgtctctccccagctccgatgccctgcgactcaagccatgtccagccggtcaagtcccaggcatccatagtccgcaccctgaagaacggaagtgtagtcgaacactgttttgttttcttctgctaatcaaggtctcctgcatcgctgacatgctgatgacatataccagcagggtaaaacgacgggtaaaccttttgactccagatagtaatggtgggaatagcttacctcccctgtgttttctggcgcaccatggtgtaacggagttgctagagcgcgactatagattgccttcctgcctgcctgtctcgcccgacatcgtatagaaataaaaccaataattcgcatctgtcggtttgtctggttgcaaagggtaagctgccagtccttttgtgttcttgttctgccagttctttgtgttcttggcctggtcgtcttccgttgctgtacagctgcgttttgttgcagctgcaagatttgtgtagcaggggagactgttgcagctatgtgtatgcgttgcagcagcagcaataaggcaacacactactacaggggagggataaactgttcggtctctcctggcagcagttgcagctgcgggtaaaaaggccagccgaatcggggaaagggttccaaaagccaagccctgccctgatcggttgtcattgctgcaggggctgctgctcccacagacgcacagctgcaacagtttctcctacacatatatatctgctttggccagt

SEQ ID NO: 212971 - DNA, 2250 bp, Zea Mays
ccgaggcagagtagaaaccccatcatgccgcatcacggcatcacgcgcgtgccttcctcgaccctcgctactgctactgtctcgtctcttgctcgcatcgtctggggaccgcggagcggcggcggcgtggcgcagcggcacggcagcctccccctcgctcctcctactccggctcttcccctctccccctcagccctacgcccctgcgcggctgcgtgacctgcgtccagccgcagcggctggtgcccatcggcggcaagtagcagagcagcagcagccgccggcggtcctcccctccccctcggcctcgctccggctctcccagtcccagctcgagctccgtactgaaggttgaagcaaggacccaaaacagattgccgccatcaaagatggaatctgggagcacgttctatggaggggaaggtctctccatcgaccccaagtggtttatcgacccgaagcttctctttgttgggccacgcatcggcgagggcgctcatgcaaaggtctatgaggggaagtataagaaccaaaatgttgctatcaagattgtgcacaaaggggacacccctgaggagatgaccaagagggaggggagattcttgagagaggtgaccatgctgtcaagggtgcagcacaagaacctcgtcaagttattggggcctgcctagaacctgtcatggtggtcgtgacagagctactagtggggggttcgttgcgcaagtatttggtcagtctccgacctaggagccttgagcctcgtgtagcagtggggtttgcattggacattgcccgagctatggaatgcttacatgcacatgggatcattcatcgtgatcttaagcctgagaatctgttgctgactgcagaccagagaacagtaaaacttgttgatcttggtttggctagggaagagacactaacggagatgatgactgctgagacaggaacataccgttggatggctccagagttgtacagcacagtaacactgaggcatggagaaaagaagcattacaaccacaaagtagatgtctacagctttgcaattgtgttgtgggaactcctccacaataaactgcccttcgagggaatgtctaaccttcaagctgcctacgctgccgctttcaagaatatcagaccaagtgccgataacttgcccgaggagctgtcagaaatcctaacatcctgctggaaggaagacccaaacgacagaccaaacttcacacagataatacagatgctcctacactacctatccaccctttcgccacaagagaccttggcgggcccccgccgcacgttcagttcggagaacacaatcctgcccccagagtctcccgggacaagctcgctgatggcttcgcggggcgacctcggcgacacgcccaagggcaagaaggaagacaagccgaggggcttcttcttctgtttcagcgagtgctattagcacgagcccccccaaagggggaacactccgataagcttgcaaatactgaacgaacaccgtctctccccagctccgatgccctgcgactcaagccatgtccagccggtcaagtcccaggcatccatagtccgcaccctgaagaacggaagtgtagtcgaacactgttttgttttcttctgctaatcaaggtctcctgcatcgctgacatgctgatgacatataccagcagggtaaaacgacgggtaaaccttttgactccagatagtaatggtgggaatagcttacctcccctgtgttttctggcgcaccatggtgtaacggagttgctagagcgcgactatagattgccttcctgcctgcctgtctcgcccgacatcgtatagaaataaaaccaataattcgcatctgtcggtttgtctggttgcaaagggtaagctgccagtccttttgtgttcttgttctgccagttctttgtgttcttggcctggtcgtcttccgttgctgtacagctgcgttttgttgcagctgcaagatttgtgtagcaggggagactgttgcagctatgtgtatgcgttgcagcagcagcaataaggcaacacactactacaggggagggataaactgttcggtctctcctggcagcagttgcagctgcgggtaaaaaggccagccgaatcggggaaagggttccaaaagccaagccctgccctgatcggttgtcattgctgcaggggctgctgctcccacagacgcacagctgcaacagtttctcctacacatatatatctgctttggccagt

SEQ ID NO: 212972 - DNA, 2450 bp, Zea Mays
ccgaggcagagtagaaaccccatcatgccgcatcacggcatcacgcgcgtgccttcctcgaccctcgctactgctactgtctcgtctcttgctcgcatcgtctggggaccgcggagcggcggcggcgtggcgcagcggcacggcagcctccccctcgctcctcctactccggctcttcccctctccccctcagccctacgcccctgcgcggctgcgtgacctgcgtccagccgcagcggctggtgcccatcggcggcaagtagcagagcagcagcagccgccggcggtcctcccctccccctcggcctcgctccggctctcccagtcccagctcgagctccgtactgaaggttgaagcaaggcctccatctttgagaccctcgcgggcgacgagctctagtcttctgttcctgctgtgcgagacggagcacccaaacccaagctatttatattcggatctgatctgatccaattacaagtgtagtttacacaagccgcgcataaaaaggtggcccttctggaaggatcgcgcgggccaagcatgtctatcaccatcatgagacccaaaacagattgccgccatcaaagatggaatctgggagcacgttctatggaggggaaggtctctccatcgaccccaagtggtttatcgacccgaagcttctctttgttgggccacgcatcggcgagggcgctcatgcaaaggtctatgaggggaagtataagaaccaaaatgttgctatcaagattgtgcacaaaggggacacccctgaggagatgaccaagagggaggggagattcttgagagaggtgaccatgctgtcaagggtgcagcacaagaacctcgtcaagtttattggggcctgcctagaacctgtcatggtggtcgtgacagagctactagtggggggttcgttgcgcaagtatttggtcagtctccgacctaggagccttgagcctcgtgtagcagtggggtttgcattggacattgcccgagctatggaatgcttacatgcacatgggatcattcatcgtgatcttaagcctgagaatctgttgctgactgcagaccagagaacagtaaaacttgttgatcttggtttggctagggaagagacactaacggagatgatgactgctgagacaggaacataccgttggatggctccagagttgtacagcacagtaacactgaggcatggagaaaagaagcattacaaccacaaagtagatgtctacagctttgcaattgtgttgtgggaactcctccacaataaactgcccttcgagggaatgtctaaccttcaagctgcctacgctgccgctttcaagaatatcagaccaagtgccgataacttgcccgaggagctgtcagaaatcctaacatcctgctggaaggaagacccaaacgacagaccaaacttcacacagataatacagatgctcctacactacctatccaccctttcgccacaagagaccttggcgggcccccgccgcacgttcagttcggagaacacaatcctgcccccagagtctcccgggacaagctcgctgatggcttcgcggggcgacctcggcgacacgcccaagggcaagaaggaagacaagccgaggggcttcttcttctgtttcagcgagtgctattagcacgagcccccccaaagggggaacactccgataagcttgcaaatactgaacgaacaccgtctctccccagctccgatgccctgcgactcaagccatgtccagccggtcaagtcccaggcatccatagtccgcaccctgaagaacggaagtgtagtcgaacactgttttgttttcttctgctaatcaaggtctcctgcatcgctgacatgctgatgacatataccagcagggtaaaacgacgggtaaaccttttgactccagatagtaatggtgggaatagcttacctcccctgtgttttctggcgcaccatggtgtaacggagttgctagagcgcgactatagattgccttcctgcctgcctgtctcgcccgacatcgtatagaaataaaaccaataattcgcatctgtcggtttgtctggttgcaaagggtaagctgccagtccttttgtgttcttgttctgccagttctttgtgttcttggcctggtcgtcttccgttgctgtacagctgcgttttgttgcagctgcaagatttgtgtagcaggggagactgttgcagctatgtgtatgcgttgcagcagcagcaataaggcaacacactactacaggggagggataaactgttcggtctctcctggcagcagttgcagctgcgggtaaaaaggccagccgaatcggggaaagggttccaaaagccaagccctgccctgatcggttgtcattgctgcaggggctgctgctcccacagacgcacagctgcaacagtttctcctacacatatatatctgctttggccagt

SEQ ID NO: 212973 - DNA, 922 bp, Zea Mays
ccaccaagttgcgtttgcgtccctggccgaggaggaaagcaactagccagccagtcaccaaacgcgcaacccgatcgagatcgagagatctgcatatgtcagagtccggcccggccgccgatggaggcgccgggggcgggccggctgacgctggcggggtgaggtccatggtgcagcggtggaagatggacggcgcgccggcgcgggcgcggctgctgctgcgggccctggcgtggctcttctccctcctcgccctcgtcgtcatggcgtccaaccagcacggcggcagccaggacttccgcgagtaccccgaatacaagtcgtcgcttacttcttgatatcggccatgtccgcggcggcgccggtgacggactacatgcgccaggcggcggataacctgttcacggactcggcggcggcggcgatcagcatggccttcttcgcgttcgtggccattggcctctctgctctcgtctccgggtacaacctctccatggaggctcttgtatagcctgtgaatcacaactctaccatctcatgtgtgatgtgtcacgttacccaacctcgacactgttcatatagtattgcctccaattgttagttgagcatatttctttttctctctgataaagaagatggaatgtgtaactactgtttaatttacatagaccatgcaaagacgaaagtcaaactcactgagaatgatcctttcaaaagccaatacagtatatatatatatatatatatctattactactctataagacagcaaggagggcgtccacagttgtcgtgcccccgctcccgcacatcgcgccgccccatcttccccgactgtcgtcccgccgcagaaatctcgcccgcccctcccccctcgcccgcacgtggacccgcctctcctcgccgtgatctccacttctag

SEQ ID NO: 212974 - DNA, 1222 bp, Zea Mays
gcgttgttggtgctcaacgcgggtctacggaagttcttcggaacctcgaaaacaggatgcctgtacattctctccttcggttagcagcaaagattcactgcataaggtggtcacgcttacaccagttcaaccacagaaacctgtagactccagaggcagtcactgtaatgcaggatctgattctggagaggccccatttgatatatgcatgagtggtaacaagtgcgctgtaaagttaaaaccatccatattcgagaccaacagagaaagaaagcagcgagacagagaatgttccaaggatgtacgtccattgcagttgagacctgggatggttctgttgaaaagattcataaagcctaatgatcaggttaaaattgtcaaactttgttcgcaacttggtgttggtcctgggggattttatagacctggctaccgaaatggtgctttgctaaaactgtggatgatgtgcttagggaagaactgggatccagattcatcctcgtatggagatagacgtctgtttgatggtgctcaaccaccgaccataccagaagaatttcagaagttcgttcaagatggcatccaagcttcccatgaattcttgaaacaacaaaaaggagctaccaatgttgtgcaagaaatccctgcaatgtctccggatatctgcattgttaatttctacaatagtagtgggaggttgggtcttcatcaggacaaagatgaatcacagagcagccttgacaagggattgcctgtcgtttccttttcgataggcgagactgcagaattcatgtttggcgatgttagagacgaagagaagatttcaaaggttgatcttgaatccggcgacgtcctaatatttggtggcgagtcaaggcttatattccacggggttaacaacaccaaacctaaaacggcaccaaagtggcttacggacgagacaagtcttcgacctgggcgtctgaatctcacattcaggcagtactaggcaggtttcccccaccttgagcatttgcattggaacagcaaagaacttgctcatgatattctagtactagggtcagttgggttagttaccagtagagatcacctgtcatttcttatatatattccctcatgggctactcacaaggagatctatctagtcactgaaaaccaccacttaatccattgctactcgcttaaatgtttgtttccatgttcaactttttcattttgcctt

SEQ ID NO: 212975 - DNA, 1661 bp, Zea Mays
ttagtatttacataaatatgcgggccgtcgtcgtgccgacccatttatcgggccgggccgggccaaaacacgcgagccgccgtatgtgcccataccctggcccgtaaccgaccgtgccgggccgtgtttggatcgggctaaattcgtgctgtgccacgggccaaacgtgcggcccgcactgtttgaacatctatacccgttgctccgcgtagaaccacaatcctgcgctatcacccatcccggccggccgtgccacaccggagccatatctgacatctagcgctgggcccaccagctggcaagctttagtgagtggtttttgtcgcagtccggttcacaaagtgggtcgggttttttcctcgtgctacctttctcaccgtttctctcctagtctcctctcgtttcccgtcctcctcccgttgggagtataaaatttcctaatccgcaaacgaagcttccagaaggcttcttcttgcgtaccttccacttccacccaacgcgactcgctctttcccgcatctggaagtcgccggctcagatccagccgggctgcggcgctggccggatggccgagcagggcggcgcagccggggaggccgctggcagcgacccccctgcgcctgcgcctgcgactgccccggcgccagccccagcgcttgctgcggacgcggccgggcagaggtccctgccgacgccgttcctgaccaagacgtaccagctggtggacgacccggcggtggacgacgtgatctcgtggaacgaggacggctcgacgttcgtggtgtggcggccggcggagtttgcgcgcgacctcctccccaagtatttcaagcacaataacttctccagctttgtgcggcagctcaacacctacggatttaggaagatggtgcccgaccggtgggagttcgccaacgacttcttccgccgtggggagaagcgcctgctttgcgacatacaccgacggaaggctgccgcttccggctccgtcagcgcgtcggcgtccggcgacacgggggaggaaaacgagcgcctccggcgggagaacgcgcggctgacccgcgagctcgggcagatgaagaagctctgcaacaacatcttgctcctcatgaccaagtacgcctcctcccagcagctagacgcctctgcagcgctctcctctgtcgtcaactgctccggcgagtcatcggaggccgtacccgcgcctccgcccctccccccggcgatcctcgaactaatgcccgcgtgcccgggtcttgccaccgcggccgcgggcctcgtcgccgaagcggatcctgaccagcatccgtggcccatataccggcctacgcccgtgtaccattcgatgcggccctgcaacgggccggaccagggcgccgggtccgaccaagacgggtccaactccaggtgattgggcccaccgcaccttgtagaagcttctagttctaattaatcaattgccatatcggcaactaattattatcctagagaaacataataatactatattttcttctgtttttcctttgctagttggggattggaagcttctctcccttgttgtaatctgtgcttataaatcagcggttaaaatccatgaacgggcggctctggtgtattttattttatatatatgtgcttgttgttagataaacgcttat

SEQ ID NO: 212976 - DNA, 966 bp, Zea Mays
atttccttcttcttgttgccgactgaatgataagattgcgcgcgagaaggggggaaacatcggcttgaaccttcaccgacaacaggtactaaccgaggcatggacagggagcagatgaggatggccatcctgaaccaagaacggatcttcagacaacaggtactactaaccgaggccacatttcatatccgcggtttatgtatcgcgactaaaaacgcgctgaacaatctctctgcatcttctctcgcctctgctgcgaggttacctactaccgttaccccccagtttcttctcaccgtactctctgtctgcctgcgttcctaccgatcgaatcgaccaggtacacgagctgcaccggctgtaccacgcccagaagcagctgatgatgcagcaggcgcagacggctcctgctccggcggtcgtcgacgccgagccgagaccgagaccgccgcagctggatatctggtgcggcgagagggcgacagcaagtcctcagcagcacatcatcagcttccacgaggccgcagcacctgcggctgcgctggccaaggaatgcaaccttgagctgacactggcgaccggccgggcaagcagcagcagcagcagcgacgcggaaaggcgacagggaataataaagcggctcaaggcggcgccgtccaactcggactccggcgcgaccgcggtgtcgtccacgtcgaccgactccgagctggcgccgttccgggaggtggtggaggacgtggcgacgccggtgaggtttcgcggcgaggttagcgggaggaggaggatggacgaggtggggcagggtccgtggttgtaccagcctcagcctgagtacggcgtgatgacgatgctgtactctacgtcgtaggatctggggatttggggttagagttgggagggagacagcactgtttgtgttttacatgcacaactgtacatcacagattcacagaggtgtttgac

SEQ ID NO: 212977 - DNA, 2188 bp, Zea Mays
  misc_feature (699)..(798): n is a, c, g, or t
cgtagctgtattccaggcggaatgaacgagtctggtttggaatccggttccacctgctagaactattcgttttgatattggccgaaaagaaaaccgcttgaattcgagctaaccctttaatctttggcctggaacaaactcagacaatccacctttcggattgattcccagccaagaaacagactagtgaccatgattaagtggctggattggttactgatccggttttgattcacatctgccgaacgaggccttaaggttttatttgggtactttattattgatcaaaattcatatgtattatcgtgttgaggtggattaaagtataaattagtttaaattacatcctatctaagtcaacatatgtggactggggtcaatagtacccaaactcgtgacaagcagttaatttttcgagtgaacaaagagacgggggcacagtagtagaccgcggaatccgatctaaccctaaacccgaatcccaaacggaggagggcactcggcgaggcaggtggcgattctgcgattctcctgtcaccttccgtcgtctccatccccttccatttccggcgagggtcaaagcaggcctcttgctcttgggggtggtttgagagagggagagaacatggccgcggcggcggtgttggtggtgctcacggtgtcagcgctggcgggggcagcggccggcggtgatatcgnnnnnnnnnnnnnnnnnnnnnnnnnnnnnnnnnnnnnnnnnnnnnnnnnnnnnnnnnnnnnnnnnnnnnnnnnnnnnnnnnnnnnnnnnnnnnnnnnnnntctcctccgaaacataaggttcctggagatgttcttttagttcaaaggggaaagtgcaaattcacaaagaaagcaaagtttgctgaagctgctggtgcttctgctatagtaatcataaaccatgtccacgaattgtacaagatggtctgcgaaaagaatgaaaccgaccttgacataaatatacctgcagttctcctaccaaaagatgcaggttctgctttacatacacttcttacaaatggtaacacagtttctgtgcagctttactctccagatcgacctgtagttgacactgcagaggtgtttctatggcttatggctgttggcacagtacttggtgcttcctactggtcagcatggagtgctagagaagcagttattgaacaagagaagctcctcaaggatggccatgaagacctactgaatgttgaggccagaggttctagtggcatggtagatatcaatgtggcatcagcgataatgtttgtggtggttgcgtcatgcttcttaataatgctttacaaactgatgtcttactggtttgtggagctactggtggtaatcttctgcattggcggtgtagagggtctacaaacatgcttggtggctctgttatcaagatggtttaaacctgctgcagaatcttttgtgaaagtaccgttccttggagccgtttcgcatcttactctggcagtttgcccattttgcgttgcatttgctgttgtgtgggctgtttttcgccagctcccctttgcttggattgggcaagacattctgggtattgcattgatagttacagtcatccaaattgtgagagtacctaacctcaaggtgggttcggttcttctcggctgtgccttcctgtatgatatcttctgggtgtttatctccaagagatggtttcatgagagcgtgatgattgtggttgcgcgtggcgacaagaccgacgaggatggtgtgcccatgctgctaaaaatcccgcgaatgtttgatccatggggtggatacagcatcattggctttggtgatatccttcttcctggtcttttagttgctttctcgctaagatacgatttttctgcaaagaagggcttacggtctggttactttttgtgggcaatggtggcctatggctctggacttctaatcacatatgttgcgctgaacctgatggatgggcatggacaacctgcccttttgtacatcgtgcccttcactcttggcaccttgatcgcgcttggatggaagagaggggagctgcagaacctgtgggcgaggggagagccagagagagtgtgcacgcatatgcatatgccgctgctgccgacgaccccaaactaaccacaggtttaaaaggaggcactgcttcttggagacagcaaagtctgat

SEQ ID NO: 212978 - DNA, 2139 bp, Zea Mays
  misc_feature (699)..(798): n is a, c, g, or t
cgtagctgtattccaggcggaatgaacgagtctggtttggaatccggttccacctgctagaactattcgttttgatattggccgaaaagaaaaccgcttgaattcgagctaaccctttaatctttggcctggaacaaactcagacaatccacctttcggattgattcccagccaagaaacagactagtgaccatgattaagtggctggattggttactgatccggttttgattcacatctgccgaacgaggccttaaggttttatttgggtactttattattgatcaaaattcatatgtattatcgtgttgaggtggattaaagtataaattagtttaaattacatcctatctaagtcaacatatgtggactggggtcaatagtacccaaactcgtgacaagcagttaatttttcgagtgaacaaagagacgggggcacagtagtagaccgcggaatccgatctaaccctaaacccgaatcccaaacggaggagggcactcggcgaggcaggtggcgattctgcgattctcctgtcaccttccgtcgtctccatccccttccatttccggcgagggtcaaagcaggcctcttgctcttgggggtggtttgagagagggagagaacatggccgcggcggcggtgttggtggtgctcacggtgtcagcgctggcgggggcagcggccggcggtgatatcgnnnnnnnnnnnnnnnnnnnnnnnnnnnnnnnnnnnnnnnnnnnnnnnnnnnnnnnnnnnnnnnnnnnnnnnnnnnnnnnnnnnnnnnnnnnnnnnnnnnntctcctccgaaacataaggttcctggagatgttcttttagttcaaaggggaaagtgcaaattcacaaagaaagcaaagtttgctgaagctgctggtgcttctgctatagtaatcataaaccatgtccacgaattgtacaagatggtctgcgaaaagaatgaaaccgaccttgacataaatatacctgcagttctcctaccaaaagatgcaggttctgctttacatacacttcttacaaatggtaacacagtttctgtgcagctttactctccagatcgacctgtagttgacactgcagaggtgtttctatggcttatggctgttggcacagtacttggtgcttcctactggtcagcatggagtgctagagaagcagttattgaacaagagaagctcctcaagggtctacaaacatgcttggtggctctgttatcaagatggtttaaacctgctgcagaatcttttgtgaaagtaccgttccttggagccgtttcgcatcttactctggcagtttgcccattttgcgttgcatttgctgttgtgtgggctgtttttcgccagctcccctttgcttggattgggcaagacattctgggtattgcattgatagttacagtcatccaaattgtgagagtacctaacctcaaggtgggttcggttcttctcggctgtgccttcctgtatgatatcttctgggtgtttatctccaagagatggtttcatgagagcgtgatgattgtggttgcgcgtggcgacaagaccgacgaggatggtgtgcccatgctgctaaaaatcccgcgaatgtttgatccatggggtggatacagcatcattggctttggtgatatccttcttcctggtcttttagttgctttctcgctaagatacgatttttctgcaaagaagggcttacggtctggttactttttgtgggcaatggtggcctatggctctggacttctaatcacatatgttgcgctgaacctgatggatgggcatggacaacctgcccttttgtacatcgtgcccttcactcttggcaccttgatcgcgcttggatggaagagaggggagctgcagaacctgtgggcgaggggagagccagagagagtgtgcacgcatatgcatatgccgctgctgccgacgaccccaaactaaccacaggtttaaaaggaggcactgcttcttggagacagcaaagtctgattgtgagctaactgctgcccaatgtgcagccatgcatgtatgtaacagcacaacaataaattgagcctgtcgaacagaaatgcgacaaatattcaagaacggaggtagtattgtatcaatatgcaaaccaaatca

SEQ ID NO: 212979 - DNA, 2404 bp, Zea Mays
  misc_feature (699)..(798): n is a, c, g, or t
cgtagctgtattccaggcggaatgaacgagtctggtttggaatccggttccacctgctagaactattcgttttgatattggccgaaaagaaaaccgcttgaattcgagctaaccctttaatctttggcctggaacaaactcagacaatccacctttcggattgattcccagccaagaaacagactagtgaccatgattaagtggctggattggttactgatccggttttgattcacatctgccgaacgaggccttaaggttttatttgggtactttattattgatcaaaattcatatgtattatcgtgttgaggtggattaaagtataaattagtttaaattacatcctatctaagtcaacatatgtggactggggtcaatagtacccaaactcgtgacaagcagttaatttttcgagtgaacaaagagacgggggcacagtagtagaccgcggaatccgatctaaccctaaacccgaatcccaaacggaggagggcactcggcgaggcaggtggcgattctgcgattctcctgtcaccttccgtcgtctccatccccttccatttccggcgagggtcaaagcaggcctcttgctcttgggggtggtttgagagagggagagaacatggccgcggcggcggtgttggtggtgctcacggtgtcagcgctggcgggggcagcggccggcggtgatatcgnnnnnnnnnnnnnnnnnnnnnnnnnnnnnnnnnnnnnnnnnnnnnnnnnnnnnnnnnnnnnnnnnnnnnnnnnnnnnnnnnnnnnnnnnnnnnnnnnnnntctcctccgaaacataaggttcctggagatgttcttttagttcaaaggggaaagtgcaaattcacaaagaaagcaaagtttgctgaagctgctggtgcttctgctatagtaatcataaaccatgtccacgaattgtacaagatggtctgcgaaaagaatgaaaccgaccttgacataaatatacctgcagttctcctaccaaaagatgcaggttctgctttacatacacttcttacaaatggtaacacagtttctgtgcagctttactctccagatcgacctgtagttgacactgcagaggtgtttctatggcttatggctgttggcacagtacttggtgcttcctactggtcagcatggagtgctagagaagcagttattgaacaagagaagctcctcaaggatggccatgaagacctactgaatgttgaggccagaggttctagtggcatggtagatatcaatgtggcatcagcgataatgtttgtggtggttgcgtcatgcttcttaataatgctttacaaactgatgtcttactggtttgtggagctactggtggtaatcttctgcattggcggtgtagagggtctacaaacatgcttggtggctctgttatcaagatggtttaaacctgctgcagaatcttttgtgaaagtaccgttccttggagccgtttcgcatcttactctggcagtttgcccattttgcgttgcatttgctgttgtgtgggctgtttttcgccagctcccctttgcttggattgggcaagacattctgggtattgcattgatagttacagtcatccaaattgtgagagtacctaacctcaaggtgggttcggttcttctcggctgtgccttcctgtatgatatcttctgggtgtttatctccaagagatggtttcatgagagcgtgatgattgtggttgcgcgtggcgacaagaccgacgaggatggtgtgcccatgctgctaaaaatcccgcgaatgtttgatccatggggtggatacagcatcattggctttggtgatatccttcttcctggtcttttagttgctttctcgctaagatacgatttttctgcaaagaagggcttacggtctggttactttttgtgggcaatggtggcctatggctctggacttctaatcacatatgttgcgctgaacctgatggatgggcatggacaacctgcccttttgtacatcgtgcccttcactcttggcaccttgatcgcgcttggatggaagagaggggagctgcagaacctgtgggcgaggggagagccagagagagtgtgcacgcatatgcatatgccgctgctgccgacgaccccaaactaaccacaggtttaaaaggaggcactgcttcttggagacagcaaagtctgattgtgagctaactgctgcccaatgtgcagccatgcatgtatgtaacagcacaacaataaattgagcctgtcgaacagaaatgtatgagccgtgcatagcagcagcataaaaatactctccattcttttttaatttttttatttgtcgttttttgaaacaataggcgacaaatattcaagaacggaggtagtattgtatcaatatgcaaaccaaatca

SEQ ID NO: 212980 - DNA, 1447 bp, Zea Mays
gaactttagctggaagctttgctcgagtcattgttgctgataactttttcactggttcaaaagacaacctgaagaagtggattggccacccaagatttgagctcatccgtcatgatgtcaccgagccgcttcttgtggaagttgaccaaatctatcaccttgcttgccctgcttcaccaatcttctacaagcacaaccctgttaagaccatcaagacaaatgttattggtaccctgaacatgctaggacttgcaaagagagttggagctaggattttgttgacatcaacctctgaagtttatggtgatccacttgagcatcctcaaactgaggcctactggggcaatgttaacccgattggtgttaggagttgttatgatgagggtaagcgtgtagcagagacgctgatgttcgactatcacaggcagcatggcattgaaatccggattgccaggattttcaacacctatgggcctaggatgaacattgatgatggccgtgttgttagcaacttcattgctcaggctgtgcgcggtgagcccctgactgtccagaggccaggaacacagactaggagtttctgctatgttgccgatatggttgatggtcttattaagctgatgaatggaaacaagactggaccgattaacttggggaacccaggtgaattcaccatgctggaacttgctgagaatgtgaaggagttgatcaacccagatgtgacagtgacgatgaccgagaacactcctgatgatccccgccagaggaagccggacatcacaaaggcgaaggaagttctgggatgggagcccaagatcgtcctgcgggacggcttggtgctcatggaggatgatttccgggagcgcctgaccgtgcccaagaaaaccaaggcctaaattgccctgcagttggggaagaatatccacacggggaagcatactcatagtcgggctcgtcattatttgtggccacatttcattacggaatttgagttccaataaacttaatattcctttgtcgttcaccttgaaggattgtattattagaattttcatacagggctggccattcgagtctctgcctacgcagatcttgtggtacttgtgtttgtagccaatgtgtgagtaaaagtcgattatagcaatgttgatgccattttgggcttattgttcgctcctttttgctgcttgagctgagacaagtctcgatccaatgagagcggtactgactgtgtggaggcgccatttcccatttggtatcgatcggtctggtcctaataatggcctgtcgacctgctgaccgatcgggcgttggatggttggtaccagcatgaaccgttaccagtcagatttaaccacgtggattgttcatacatgtgtcacgttagctgtctgtttccaaaccatttgaagtctaaaagattcaaagaaaataaaaaaactaaaaa

SEQ ID NO: 212981 - DNA, 1110 bp, Zea Mays
tttaattcgtatgtatatttaaggataataagattctaaaatgaatactgagtgtctatttcacgtttggagcatttgaagtaaatgaatgaataaactcatttatatgtagataaataaaataaacctttcatcccatgctgagattttattttgctgcatgttcattttgtgaatcaaaaccagattgaatttgaatcggaatttcatctttgaaataagaaacaaaagggaaacagaaaatagaaaataaaaagggagaaaagagatgacgctatttcacttagcttcttgtttgcttggcccaggcgacccatctattattcatttctttttttccggccatccgactgggacatctcttgcgcatggtgacagacgatggtgtgctgtgtaggcccaatgtgtcagcatgttcctctacctctttcccgtaatgaacggagccatcaccaggaaggacctgctatcgccgcgttcgtcgtggtttgttgcaaaaaaaccagatcggccttgggtttgttggactgtgcacctcggaccctcatccactcccgtggatatatataggatcagcctaggcacctcctgatccaagaagagagccatggcggcaagcagagaaattggtgagagaaagagagcctcaccccatagcaaacccacgccgaagtcgccttggtccgccgtggtgctgtcgcgaattgggcgtcgcagccgcgccttgcgctgttagccgtggggaagatactcgccagtccgccgttcaccgaggccagacaatctgcgcaccgaccgccgcgaggacaggcttcaatacccgttcgtctagccctgggatttggttcttgtgctcggccagaccactgggatcgtgtggtgctgttgctttccctcgggcacctccgtggcggcgataattcctcgccggagtaccatccttgccgctgattcgccctgcgtcgtggctggccctgccctggtctccgcctctgtgaggatacgtgtcacctgaagatcatcctggtacctggaatctcaagtctcaggcaaggtcaagaacaggttccacaggatgaggcgcttggaggatgctgtggcgagttcgtg

SEQ ID NO: 212982 - DNA, 1648 bp, Zea Mays
ctggaacaaatccacgtgccgcctcacgcggctgagcacgccgcccccgccgcctcgtccctgtctcgccgtcgccgcctcgttcccgtcctgccatcatcgtctcgtccctgcttctcgatcgtacgccgtgagcaataggagttccgtccggcgctggagctgagcctggagattgtccctactcttgtgagagtcgcgaggacaagctttccccctcttgagatccggtgtctaatccatttttcaagataagatgtttagaggttctcctaagatagtagctttacctaaagctgctcaaaagaaggcttctcctaaagctgcaaaatcaaagaaatgtggtgttgagagagctgcatggaatgttgaattagagaagagtcttgttgacttgttgtttgaacacaatatgcctccacatagggctcaaaatggatggagtccagatgcttggaataaaatagtttctaaattccacaagaagcatgaatatgttacattcaacaagatccaaattcaagaaaaggagagagaattaaaaagggaatacaagatattgaaggaggcaagaaaacaaagtggagtttcttggaatgaaaaaagatgcatgatcattgctgaaccaacgatatgggacaacattatcactacatttcctagagctaagaagttccgcaataagtcttttccaatctttgatgccttgggtgaattatatgatggtcacattgcacaagggacttggaacattacatctactcaaccactacaaaattctgatgatggagagaaatttaaaaccatagaagtggaatatgaagatactaatgaaccacaagtagatgcgagaatagaacaagatgaagatatagtaattgttgaaagggttgaacataggttacctaaaaggtcaggtgcaccaactgtcaatcaagagaaggagacaaagagagtaaggaaagatgcactagaagggctgatagggaggtaccttgatgtgaaaacaaagcaagttgcagatgaggctacacaatcaacaaaagagaaggaagttgctcaagataatgatttttctatcaagaggtgtatttctgttcttaagactatggatatcacaagagatgagaagatcaaagcagcggaggtgtttaacacaccaaattacagagaaacatttatttgttttaatgatgatgagccagaagtcgctctcctttggccaagggggaagatggataaactctaaagggtccaaggataaagatattatcaacatctctagaggaagagaaagtcaagtcacatcttcagtctgtgcaggctgtttattcagtttcagtcaataaggcttagcttgtagtgtgtggtctaaatcttgcatgtgcatgtagagactgtttcttcggtctgtgcaggctgtgcagttttcagcttgtttcttcagtcgtttcagacagttttttcagttttctgtgcagacatgtgctcgtctctactttgtcaaaaaaaagatagaattattcagactgcagttttcagcttgtttgttgattgggtttattgagttttcagttttcagatagcgttattgagttttcagttttcagattgttccatatggaataaacgaataaatatttattgg

SEQ ID NO: 212983 - DNA, 852 bp, Zea Mays
cccatctccgggccctactcatgatttctcctggaatggctgatttggttaagaagctaaaatccaataatattgatgtgttccttgtgtcaggaggcttccgacacatgatcaaaccagtggcatttgagcttggcattcctcctgaaaacatcactgcaaaccaattgttatttggcacattgggggagtacgccggatttgatcccacagagcccacttcacgcagtgggggaccatggctacaagacagttgttatgattggtgatggcgcaactgatctggaggctcggcaacctggcggagcagacttgttcatctgttacgccggggttcagatgagagagccagtcgcagcacaagctgactgggtggtttttgattttcaagagctgatcactaagttgccatgaattcattacctaccgcaatttatgaacctttgcattgtcggctaaataattgcggccgcattttaaagctgtagatttcactagcaattcttggagataaactgaattattacccggctgtaaagtattttttttatttgttttcccgcattatttgtatgatcctgaaccatgaatgcggaggttgtgttccgacgttgtcagtgaaattgtcctctaagcaaatgttgagtatgtgagtgattaatgaatcacatcacagtttattaagcgccggattcgaaccgtcgtttatgcaagtattattgttggattgagccaagaatgctcacatgctgtctgattcacaccgtcgtttatgcaagtattgttgacttgttgattcgcaccattcgttggtttctcatgagcttgattggtatttctcatgaacttgat

SEQ ID NO: 212984 - DNA, 5749 bp, Zea Mays
gtttaaagttcagagttgaaactcacagcaccaagcaaaaaggaagcagatcaagggtagccgagcgagcagaggttgtcaattacgtgccttaatatgagtcattggaagcagccgtcgaaactcgccatgcttgtagtactgctgctgctgctatgtcatgcagtggacaaagtccattgctcgacgcaccataacaacagccaagattttcattccctgcttgagtttcacaagggcatcaccagtgatccgaacgaagccttgagcaattggaaccccagcatccacttctgccattggcatggtgtgaactgcagtttcactcgaccatatcgagtcacggagctcaatctcaccggccaaaacttggctggccaaatcagctcctctcttggaaacctgaccttccttcatacccttgatcttagctacaatagcttcagtggccccctacctcttcttaacaagctccgaaacctggacgtactctttctgggaagcaaccatttgggggatgttattcccgattggcttacaaactcttccaacttagttgatctagatctctctgaaaacaatctcaccggccatattccttcaaacataggcttcctaacgaagctagaaggtatagccctttacaataataatctcaccggtgtcatcccaccaaccttgggaaacatctccacactagaggtagttgatttttcagcgaatcaactaagcggaagcattcctaataaagtttggcaaatctcaaacataacaatgttaaatctaggacaaaataacctatcaggtggaatcccagatactctctctaacttctcttctcttacagcattaggcttgaacaacaataagctaggcagcgcattgccatcaaacattggcgatgtgttccgtcatctaaatgaactatacttagataacaacatttttgtgggtacaattccaacttccctaggtaatccttcgagtctagaagccctagacctatcaaacaatcatttcagtggcaaaatcccaagttcttttggaagactttcaaagttacagattttaaaccttgagctaaacatgcttgaagcaagggatagtgaaggctggcaattctttgatgccctggcaaactgtagttccctgaatatactttcagtgtctcaaaatcttctacatggacctataccaaattcgatttcaaatctgtccaccactcttcaatacctaatgatggcttcgaacaacctatcaggaaccgttcccccaactattggaaaatttagtggcttgattaaattatcacttgcaaacaacaaccttacaggtaccattgaggaatgggtcggaaacatgacaaaactacaaatcttaggactacaatcgaacaactttgcaggggaaattcctccttcaattggcaatcttacacagttgatacacttctctatagccaggaacaatttcttcggctctgtacccatctaacttgtgcaatcttaaattaatgtcgtggttggaccttagccataacaatttccaagggagcatacctgttcagtttggtaactcagaactcatgtcgctaaatctttcatcaaacaaattcagcggcgaaattcctgaaactttaggacatatcgaacaattaacggtcattcaaatggaccaaaacaatcttactggaaacatccgtccacattgaggaatctatacagcttgagcttgctcaccccataacaatttatccggcctaatgccaacttttctaagtggtctaaatctcagtaaactagatctatcctacaatagtttccaaggagtaatacctacaaccggtctattcgataattctacagttgtttcgctagatgggaatccgagattatgtggaggagccatggatttgcatatgcctccatgccatgttgcttcaagaagagcacgcagagcaagcttattgattgaaatattgatcccaatatttgggttcatgtcactcgtattgctggtgcacattttactcctagagaagaggcagtcaagaagactatggatcgaagcaatcatttgaggaagatatggttcggtgtaccgagggaagctgaaggaaatggaagtggcagtaaaggtttttgacctggagatgagaggagcagaaagaagcttcttgtcagagtgtgaagcattgagaagcattcaacaccggaatcttatccccatcataactgcttgctcaatagtaggtactttcaaagctttaatttttgagttcatgtctaatggcaacctggacacatggctacgtcacaaaggagacgaggaggctacaaggtgtcttggcttaactcaaagaataaacatagttgttaatatagctgatgcattggattatttgcaccatggttgtgggcggccaactgttcactgtgacttgaaacccagcaatatacttctagatgatgacatgaatgctctcttgggagattttggaattgcaagtttctattatgattttgagacaaaatggacatgttcaagtagttcaattggtataaagggaacaattggatatattcctccagaatacggagtaggtggccatgcatcaacatgtggggatgtttatagttttgggattgtgttgttggagattttgacgagtaaaaggccaacagaccctatgttcgaagatggcttaaacatcatcaactttgtggagaacaactttccgaatcaaatatttcaagtcattgacgctcacctcctggaagaatgcaggaactcaactcaaggaaataatttggtacaagaaaatgaaatctatcagtgcttggttgatctgctgcaattagcactttcatgcatttgcccattaccatctgaacgattgaacatgaagcaagtagccagcagaatgcatgaaataaaaaaacatcacatattaggtggaagcacaagtaataatagcaagggcgacagatccagaatataaatcttcctatggtgaagctcccaaaatttgaattaaggccctatgtgggagggttatacttcaaaaaatgtagtttcggttttccagcttcaccatgaaacaacttaatagattagtaaggcgtggttcaagtgtgtttggcttgcacatagactccagcttctataatacaattaatttttgtaagtttacttaattacccttaatgattagcgagtggagaaagagacacaaatcggtagttcttataaatcaatggcgtattggataattttggtgcaacttcagagaagtataaaaatagtgtttttgaaacaacctttgaaaagcttcgaaaattttatgaaactagcctctagttttagttttttaaagctagagctagctgagctgggcctgtttggatagaagctgaaataggcttgaaattcttgaagtgaagctctcccaaatagggtctatatataatatgagcataatgaatatttggcatatgcaaagagctagggcctacaaagcttgtatctataaataggtcccagttagataaaatcggttagggagcgcttatcacttcaagtcgaaagactataaaatgtacatttcatgataataataattataaggcagacattcacccaagaaacatgtgcttctcatctcacgcatcgtcgccccttgaccaagggtttcctaagataagtcccatgatgccatggctcaatctcttgtagatttcatcaagacaatatgatgttgtcaccttacctagtagatcttggactaatcgttgtggttggcaagatctgctagttatcttgtgtagtatcaatttatttcatgctgagcttaatgttattagattgatcttgcatgaccaaacatgtatctcttgtacaattgctacaatccacaacatgagaatgcaacatgtgtatgtagcaactcgagagtttgatatgcatatggcatcttaccttacattctttagtcacattgtttattctggatgaactttttttgaggtccttatctatgtttgcttgcatgaccatcaatataccgactacaaatgttcctagggtaattggcatgatacataatatagattggatctaggatgttcctatgaatgatttactatttatttggccctagatttggttgatagtgtgtttaatcctggtgtcttcttagcctattgttgcgctcgtggttgtgcatgtttacttttgctttcaatgaatgtttactttcacttatttagttgataccgacctagaaaagctgacaataacctcaaggtagcgtgttaatgtaattagtacatgctgatccacatgatatggcaggaatttgatgttttaatctgttattgtgcatctatagagtaatttaatgactacattacaccctccctacttgatagatcaagccaagtggcatgcttagaacccactaacaacctcttgcaattagaagcagtcggagccacaacaaagagagatgaccacaataccaatgcatctcttgtctccttgtgtgtcgactgtgttgacgataaaccatagttttcccatgatgagacatgtcaggcacacccgatgagacatcgacatcgaccactgcatcagtcaatttacatccgctcagcgacatcggctcatcttcattgacttatctacatcggctcattctcgtcaacatgacccaagcaaggaaggagattcctagctacagcgacgggattaaatgttggctaccaagcaagactaggccaccctagctcgaggagatcaacctagatatgttgtaatgctatgaccaggctctcaagaggctaaccaatgagcttcttgtgtgcttcacgtggactcactccagtggtgacaaactcacccgaaaattattgagatgtaacaaactaacatcatctctagttgtcgataccaccgatagagggtgtttggtatatgtttaccatatttacttcatattcttagaatatactgtaagattatggggaggctacactagcacaaaacaaaattttcgaccccataaaccaagatctactgctgttaggtcatggaattaccacaagacgtgcaggacaacgaaagccatcttgatgtagacgaacacgtcaagcagtgtcgtgcagtcgccagtgtccttcacgacctcgtgtggttttcctagtgctctagatgtagcacctccaaggtatccacatgtataggaaggaagcatcgcgtaccgacctgttaggtttgcgacggaggcttggcgagggcgagatgggcgcgactgctggtttgctggtggtgaattaggttaaccctaagcacgcgccagcccctcattgtatatccattgtagtgggattctcactccgaggcccatcagcaaccctaaaacccagtctaatttcagatccaatccgagttaggcttccttccccttaagtgtgtgaccttgtaggttcacgtacacatagacatgtcctgagtactcatacttcgcccaataattaacaacggcctctagcaagacatgtcaactcctatgcacatgtaaagatcatatcagatgaaccattacaacattacgtacatcatgttccctttgtctcataatatttcgtctggctctaaaatgacctctctttctcgatactatgaattggaagctagcgtcgatgtaactagttacaacgtgctcctcttacccccattgtaagaccca

SEQ ID NO: 212985 - DNA, 1242 bp, Zea Mays
ggctactagagcggagaccattagatttgaggaacatgaagcacctggatcaagatccttctttacagaaattattgcatcaatttctgatataaagttttcaaggaatggcaaatatattcttagccgtgattatatgacgctcaagctatgggatctaaacatgaattcaggccctgtttcaaccttccaagtccatgaacatttaagacctaagctctgtgatctgtacgagaatgactcaattttcgacaagtttgagtgctgtcttagtggggatggacttcgtgttgcaactggttcttatggtaatatatttcgtgttttcggtcgtcctccgggaagcatagaggcaacaactttggaagcaagtaggaacccaatgaggcgtcagattgcaaatccagcaaggcccacacggacactaacttcttttgcccgtggtgttcggagaggtcatttcttatcgtcaacattgacttaattactcctgcaacagtatcaattattttgttcacgcagccatcaccgacctattctattacaggtggagaaaatcaaggcgttgatgctaatgggaattcactcgacttctcaacgaagctgctccacctcgcatggcacccgaccgagaattctattgcatgtgctgctgcaaatagcttgtatatgtattatgcgtagagaatgccctacagaaaatttgttttttttgtggcttgctctcggcgaaggcccagggcccttcaactgcaaccagagagatggtgcaggacattgttgtcagttcaccccttggggccagaagccgctgatgtccacaagatcaccaatgctgtgctaacagactgcgccctgttgattctttagtacatgtgtaaattataattctaaacatgggaagttttgatccaaatattcaatcgtggcagttgtattgggagtcggtggaagggacatatcgaagataaaattctgtattggatttgcaggacatgcattgcaatggtgtagtatgactggcaatccttatcatgtaataccacctagacagggataatgttgtttaatgtcagaaaatgatagatatttcccagttattgtcgttactcatcatagttatccttctattagttgtactgttaaaataaggcagcaccgttataattgtgctttttctttttctgaatgccttttgtacactgaggttttcgcaagaaaggaattcacggaattaatgca

SEQ ID NO: 212986 - DNA, 2162 bp, Zea Mays
caatcttggagcaggagctgcgaagaagaccgacgacgtgccctcccggcgtgcccccgtcgtcctcccgtccgttgatcgatctggccatggcacaacactgagatcctcgtcgtcgtgagccgaacgttaatccggcggacgcgggggcggggccattgcggcggcggcggctaggaggacaatcacgtacgccgccgttgacaactgacggatggggcggtcataccttgaaggcgggcgggacgcgggggcggaccttgggtacccgctggtggccgtgtgcatcgacaaggacaagaacagccagaacgcgctcaagtgggccatcgactcgctggtacagaaggggcagaccatcgtccttgtccacgtcaacaccaagggcacctccggcggcgtggaggacgcggccgggttcaagcagccgacggacccgcacatgaaggacctcttcgtcccgttccgatgcttctgcacccgcaaagacatcaattgcaaggacgtggtgctggacgagcacgacgtggccaagtccatcatcgagttctcggcgcaggcggccatggaggaggagcagaagacgcaagactcgcggataacggaggactccgcgatggcgatgatcgagcgggagaaggctcgggcgaaggcggccatggaggcggcggaggcgtcgcagcggatcgcggagatggaggtccagaagcggatcagcgcggagaagaagctgctcaaggaggccgaggagcgcaagaaccgcggcggcagcggcatgtcccacgaggcccggtaccggcgctacagcatcgaggagatcgagcaggcgacggacaacttcaacgacgcgcgcaaggtgggcgagggcgggtacggccccgtgtacaagggcttcctcgaccacacgcaggtggccatcaaggtgctccggcccgacgcggcgcagggccggtcgcagttccagcaggaggtggaggtgctgagctgcatccggcaccccaacatggtgctcctcctcggcgcgtgcccggagtacggctgcctcgtgtacgagtacatggccagcggcagcctggacgactgcctgttccggcgctccggcggcgccggcgggcccgtcatcccgtggcagcaccggttccgcatctgcgccgagatcgcgacggggctgctgttcctgcaccagaccaagcccgagccgctggtgcaccgggacctcaagccggggaacatcctgctggaccgcaactacgtgagcaagatcagcgacgtcgggctggcgcggctcgtgccgccgtccgtcgccgacaccgtgacgcagtaccggatgacgtccaccgcggggaccttctgctacatcgacccggagtaccagcagacgggcatgctcggcgtcaagtccgacgtctactccttcggcgtcatgctgctgcagatcatcacggcgaagccgcccatggggctgtcgcaccacgtcggacgcgccctggagcgcggcgagctgcaggacatgctggaccccgccgtgcccgactggcccctggaggaggcgcagtgcctcgccgagatggcgctccggtgctgcgagctgcgccgcaaggaccggccggacctcggcgccgtcgtgctcccggagctcaaccggctgcgcgcgctcggcgaggacaacatgcagtactgcggcgccatcatcaggggtggcggcggcggcggcggcatgcacagctcgtcgccgttccacagcaacatctcacggtcacacgccgagatgatgatcgattcccagtacccaagatcagtgttcagctcaagagcgggcgattcgcccatgccgccgagaaggtcgaacgcttgacgggcatgaaatggacttttatttccagcatcggtgacggggtggtggtgatgtcttgtgcaggtgcataagctgcctagcacgagggggagctagagcaggtgttgtttctagcatgagtttggtgcagaattttattacacgaggtacgagctatgtattactagtaaatacagaatcgtacggctctgccattgccgtgtacctgttcttgtaacctgtggagcttcctctgttgtgtaatggatttttttcagttttgtgaaacagaactgttggattaggggcacgttttctgttttttaac

SEQ ID NO: 212987 - DNA, 1386 bp, Zea Mays
tgaaaaataggagtcgaaataaaatgggaatttggagtcgggtggtaaaggagagaaaaccccaaagaactctaccgctgtcgttctgcagtcgccattcgcggaatacaatggtcgtttcgagatcggtctcggtcaatctatgctggtcccttccagttattcttgtgctgaccagtgctatggcatgcttacgacttatggaatgagatccatgtctggtgggagaatgctgttgccactaattgcgccagccgatgcacccgtttatgtgaacccgaaacagtacgaaggcatcctccgtcgtcgccgtgctcgcgctaaggcggagagcgagaacaggctcaccaaaggcagaaagccttatctccatgagtcgcgccacctccacgcgatgcgccgggtgagaggctccggcgggcgcttcctcaacacgaataaaggagggcacggcacggacgttgctgcaaacgggggcagcaagatggcggcggcggcggcaccatcccgtctcgccatgccccctagcgctgagcctccatggctgtcagggctcagcgacggcagcaacccgtgctgccactcccggagtagtgtctccagcttgtccgggtcctacgtggcgagcatctacggtggcttggagcagcacctccgggcgccgcccttcttcaccccgctgccgcccgtcatggacggcgaccacggcggccccacggccgccaccatctcctccttcaagtgggcggccagcgacggctgctgcgagctcctcagggcgtgaaccgaggagggaggggatggctactcagacgaacggccttctccccgatggctggttgtctgtaggcaaatcattcttggctgttctgcattggggtgcgacctacacatcatccgcctaccgtacctaccccacccgtgtccctgaaattccagggtgcttgggttacttacaggggtcttgtgtggtgatgtggctcccccatatgcatttgctgtaacatagcgtacccaaaccactgttgcttggtacttctcgctatcactgcctcatcagtatggattctgcatttctgcgttgtcacagtgtatgaataattgaggcgtcagacttcagggttgctccagttcttggagataggtctgggtttgtttgaagcttgcctggaggtctgaaactttgtgtttggtgaagatgctacgttattgcagtttgaatctgtaagtttgggatcagcattcagttgttgcatcgtctgtgctctggtgccgaggtgttcgttctgaatatttgattcaattcaaaatcttcagctaagttactactgggacacataaagtttagcttttttattttgcttttgcaatatattcaaatttcac

SEQ ID NO: 212988 - DNA, 1698 bp, Zea Mays
ggaactgggtagtggtgacgaacagtgacggagagcacccttgcgccgcccgccagggacgcgccatgcctgcgacgggtacggccgcggactaccaccgcgacattctccgggtacagcttcgcgcaggtgctggcacagacattgcgccaattgaaccgagcgtgatactcatagtcatattaatgcttcgtgatgaaacttcttcctcactaggatttacatggaagtcgatgctccgcattttcttgaacacataagagtgccacctgaatgtgcctttctatctcttcacgtacattgcctggaggagaataaatcagctcatctgattttccgtccgtccaaagttgccaagcctgccaaagtaacatgtttttgtgaaacaagtgagatagagaatattctggccatcccaaaatctgatatttttggattcatttcactatccaagagaatgttacttgctttcaaatccctatggacaacgcataaccgtgaataattgtgaagaggcctttatgcaagtttgcacattgctcaaagcaggcctaatgcttgtgctaaagctttgaatgagcatttcaaacttaataggactgctgagcaaatttctaaccacttgaagacagtgaagaagaagtacgttaggattaatcaacttagggctgaaagtgggtccggttgggatgaagatttatttatggttacaatggaccatgagcagtacacaacccactttgcgaatgacaagaacaagggggatgatgagtacatcaacaaaccattaccttactatggcaatttagcaacaatatatggtaatagtacagcaacaggaaggtttgtgaagacctcaaatgaccctcttggagtagatgagttgaatacccaaaaagaaatggagaacattgggacaccaactaatggtttgaatgacaaggaaggcagcccacctaagagggacgaaggaggacctagtagaccatccaagagagctaagaaggatgaatgtggagcagatcctttggttcaagcctttcaaagtggtgctgaaactatagctaatgctattgaaaaggctgcagcaagtaaaggtttgccaaacggattgtttgaagcggtggacagccttcccggatttgagcttgagcacaagtctaggtactactctcatatgcttggtgatcctaatcttgcaaatggtttcatgaatgtgcccgtgctttacaagatcacaagatggccgatttcatgaacaagaatatgtaggcttcctaggtacttaagtagacctagttggatgattatattgagtagtcatggactcttgtggtatggatgattttgagacatgcatttgtatccatgaacaatgctctttggatattcttgcatgtcatggtggttgtattttgggatggtggttgctgccatattgaacattgattgtggctgctcattgttgacaatgtagttggtaatcacactatattggactgctcatatgttgagtattttgtgttgaatgtggctgctcatatgtaaccgcattgttgagaacattgtgatggtaatgagttgttgtatgttgatcatagtgtgttacaatttgaaattatactctagttccactcttgaaccaaacaaagaatggagccgatccgttctacttcactccagaaccaaacaaaaaat

SEQ ID NO: 212989 - DNA, 1640 bp, Zea Mays
gtcgaagtggaatggaactgggtagtggtgacgaacagtgacggagagcacccttgcgccgcccgccagggacgcgccatgcctgcgacgggtacggccgcggactaccaccgcgacattctccgggtacagcttcgcgcaggtgctggcacagacattgcgccaattgaaccgagcgtgatactcatagtcatattaatgcttcgtgatgaaacttcttcctcactaggatttacatggaagtaagctggctgcataggcttggctcatctgattttccgtccgtccaaagttgccaagcctgccaaagtaacatgtttttgtgaaacaagtgagatagagaatattctggccatcccaaaatctgatatttttggattcatttcactatccaagagaatgttacttgctttcaaatccctatggacaacgcataaccgtgaataattgtgaagaggcctttatgcaagtttgcacattgctcaaagcaggcctaatgcttgtgctaaagctttgaatgagcatttcaaacttaataggactgctgagcaaatttctaaccacttgaagacagtgaagaagaagtacgttaggattaatcaacttagggctgaaagtgggtccggttgggatgaagatttatttatggttacaatggaccatgagcagtacacaacccactttgcgaatgacaagaacaagggggatgatgagtacatcaacaaaccattaccttactatggcaatttagcaacaatatatggtaatagtacagcaacaggaaggtttgtgaagacctcaaatgaccctcttggagtagatgagttgaatacccaaaaagaaatggagaacattgggacaccaactaatggtttgaatgacaaggaaggcagcccacctaagagggacgaaggaggacctagtagaccatccaagagagctaagaaggatgaatgtggagcagatcctttggttcaagcctttcaaagtggtgctgaaactatagctaatgctattgaaaaggctgcagcaagtaaaggtttgccaaacggattgtttgaagcggtggacagccttcccggatttgagcttgagcacaagtctaggtactactctcatatgcttggtgatcctaatcttgcaaatggtttcatgaatgtgcccgtgctttacaagatcacaagatggccgatttcatgaacaagaatatgtaggcttcctaggtacttaagtagacctagttggatgattatattgagtagtcatggactcttgtggtatggatgattttgagacatgcatttgtatccatgaacaatgctctttggatattcttgcatgtcatggtggttgtattttgggatggtggttgctgccatattgaacattgattgtggctgctcattgttgacaatgtagttggtaatcacactatattggactgctcatatgttgagtattttgtgttgaatgtggctgctcatatgtaaccgcattgttgagaacattgtgatggtaatgagttgttgtatgttgatcatagtgtgttacaatttgaaattatactctagttccactcttgaaccaaacaaagaatggagccgatccgttctacttcactccagaaccaaacaaaaaat

SEQ ID NO: 212990 - DNA, 2443 bp, Zea Mays
aaaaaaatctgacggtctccatacaggctacagcctgaagtctgctcagcgtgttgtaggcttgtagctttcctcaaaaacctcgggcttcccctggcttccatgcagcagtccccccttcgtgtcgcactcgcacagtcgcactccataaggcaaggaggaaaacagagagacgaccaccgctccgcgccggccggccattccatccggcaatggcctccgccgccggtgctgcgttcgccgccatcaccctcctcatcctcgtacccctcaccgccgcttcggactccgaccacaagtaccaagcagcggagcctgtgacgctctgggtgaacaaggttggtccgtacaacaatccgcaggagacatacaactactacagcctcccattttgccatgcgtcagaaaaccatgtgcataagtggggaggactcggcgaggtccttggtgggaatgagctcattgacagccagatcgacataaagtttggaaagaatgttgataaggccacaatttgttcgctagacctcgatcttgtcaaggctaagcaattgtcggatgcgattgagaactcatattggtttgaatttttcattggttttgttggagaggcagacagaaacaatgataacaaatatttcctattcacgcacaagaatattgtcatcagatacaatggcaatcagattatccatgttaatcttactcaagaaagcccaaagcttattgatgtgaataaggcattggatatgacatattctgtcaaatgggaaccaacaaacataacatttgctcaccgttttgatgtgtatctggactatcctttctttgaacaccagattcattggttctcaattttcaattctttcatgatggttatctttctcactggactagtgtcaatgatactgatgcggactctaagaaatgattatgcaaagtatgcccgtgatgatgatgatattgaaactctggaacgagatgtcaatgaagaatctggatggaagcttgtacatggcgaggagctattgtcacaacattcattgtttgctatgctcttacttcattcatctctggatatgtcagtggtgcattatactcacgtcatggaggtatgggcttatttatcatgtaaaattgaactgtatacctatagttctataaggtgctcagttgttttaaatccttttggaggaggagcagggaaaaactggatcaaggcaatggccatgacagcatcacttttcccatttatgtgctttggaattggcctggtgcttaacactattgctattttctatggatcgttagctgccataccatttggtacgatggtggttgttttcatcctgtgggccttcatctctttccctcttgcacttttgggaactgttgttggtagaaattggagtggtgctccaaacaatccctgtagggtgaagactattcctcgccctattcctgagaagaaatggtacctcacaccatctgtcattgcgcttatgggaggactgcttccttttggtagtatctttattgagatgtactttgtcttcacatcgttctggaactataaggtctactatgtttatgggttcatgttgctggtctttctgatactcatcattgtcaccatatgtgtaacaattgtcggtacatatttcttgctaaatgcggagaactaccactggcaatggacttcattcttctctgctgcttccactgcggtgtatgtttacctctactccatatattattaccacatgaagaccaagatgtctggattcttccagaccagcttctatttcggctacactctaatgttctgcctaggcttaggaacactatgcggtgccgtcgggtatcttggatcgacattgtttgtgaggaggatctacaggaacataaagtgtgactaagtgaagataatatcgccccattttgggtcagcgcagagaaaatgtatggcagagccttatttgattgagcgatcactgattctaaaaccaagaacgcaggtcattttgtgaaatatgatcgttgcttggcgccgagctgaaagccatgtttttctattcttgtcctcgtttctctctgatttcttctggacttggacaggcaacaaattttcatgttgaattagttatatatatagcggtggttgtagttgttgagtagttctgtagtatataccacaattgttatccttggccccaatgatacctcagattgatgggtataaactgtaacatttacattacctgatgtttgacgatgaacacagttccaaataatcatgttcggtactggaggatcgagatttttgagaggcaacatcaaagaaaaaatgtttgatattataccgaaatggaaacttagatcgtaaatgtttcatgcataaatctgaaactactgtacagtatgagcttgtcagtactgaaat

SEQ ID NO: 212991 - DNA, 2440 bp, Zea Mays
gtagctttcctcaaaaacctcgggcttcccctggcttccatgcagcagtccccccttcgtgtcgcactcgcacagtcgcactccataaggcaaggaggaaaacagagagacgaccaccgctccgcgccggccggccattccatccggcaatggcctccgccgccggtgctgcgttcgccgccatcaccctcctcatcctcgtacccctcaccgccgcttcggactccgaccacaagtaccaagcagcggagcctgtgacgctctgggtgaacaaggttggtccgtacaacaatccgcaggagacatacaactactacagcctcccattttgccatgcgtcagaaaaccatgtgcataagtggggaggactcggcgaggtccttggtgggaatgagctcattgacagccagatcgacataaagtttggaaagaatgttgataaggccacaatttgttcgctagacctcgatcttgtcaaggctaagcaattgtcggatgcgattgagaactcatattggtttgaatttttcattgatgatttgcctttgtggggttttgttggagaggcagacagaaacaatgataacaaatatttcctattcacgcacaagaatattgtcatcagatacaatggcaatcagattatccatgttaatcttactcaagaaagcccaaagcttattgatgtgaataaggcattggatatgacatattctgtcaaatgggaaccaacaaacataacatttgctcaccgttttgatgtgtatctggactatcctttctttgaacaccagattcattggttctcaattttcaattctttcatgatggttatctttctcactggactagtgtcaatgatactgatgcggactctaagaaatgattatgcaaagtatgcccgtgatgatgatgatattgaaactctggaacgagatgtcaatgaagaatctggatggaagcttgtacatggtgatgttttccggcctccttgcaatctagttcttctttcagctcttgttggtattggtacacagttggcagcactgattctactagtgattttgttggcaatcattggaatgctgtacattgggcgaggagctattgtcacaacattcattgtttgctatgctcttacttcattcatctctggatatgtcagtggtgcattatactcacgtcatggaggaggagcagggaaaaactggatcaaggcaatggccatgacagcatcacttttcccatttatgtgctttggaattggcctggtgcttaacactattgctattttctatggatcgttagctgccataccatttggtacgatggtggttgttttcatcctgtgggccttcatctctttccctcttgcacttttgggaactgttgttggtagaaattggagtggtgctccaaacaatccctgtagggtgaagactattcctcgccctattcctgagaagaaatggtacctcacaccatctgtcattgcgcttatgggaggactgcttccttttggtagtatctttattgagatgtactttgtcttcacatcgttctggaactataaggtctactatgtttatgggttcatgttgctggtctttctgatactcatcattgtcaccatatgtgtaacaattgtcggtacatatttcttgctaaatgcggagaactaccactggcaatggacttcattcttctctgctgcttccactgcggtgtatgtttacctctactccatatattattaccacatgaagaccaagatgtctggattcttccagaccagcttctatttcggctacactctaatgttctgcctaggcttaggaacactatgcggtgccgtcgggtatcttggatcgacattgtttgtgaggaggatctacaggaacataaagtgtgactaagtgaagataatatcgccccattttgggtcagcgcagagaaaatgtatggcagagccttatttgattgagcgatcactgattctaaaaccaagaacgcaggtcattttgtgaaatatgatcgttgcttggcgccgagctgaaagccatgtttttctattcttgtcctcgtttctctctgatttcttctggacttggacaggcaacaaattttcatgttgaattagttatatatatagcggtggttgtagttgttgagtagttctgtagtatataccacaattgttatccttggccccaatgatacctcagattgatgggtataaactgtaacatttacattacctgatgtttgacgatgaacacagttccaaataatcatgttcggtactggaggatcgagatttttgagaggcaacatcaaagaaaaaatgtttgatattataccgaaatggaaacttagatcgtaaatgtttcatgcataaatctgaaactactgtacagtatgagcttgtcagtactgaaat

SEQ ID NO: 212992 - DNA, 2431 bp, Zea Mays
gtagctttcctcaaaaacctcgggcttcccctggcttccatgcagcagtccccccttcgtgtcgcactcgcacagtcgcactccataaggcaaggaggaaaacagagagacgaccaccgctccgcgccggccggccattccatccggcaatggcctccgccgccggtgctgcgttcgccgccatcaccctcctcatcctcgtacccctcaccgccgcttcggactccgaccacaagtaccaagcagcggagcctgtgacgctctgggtgaacaaggttggtccgtacaacaatccgcaggagacatacaactactacagcctcccattttgccatgcgtcagaaaaccatgtgcataagtggggaggactcggcgaggtccttggtgggaatgagctcattgacagccagatcgacataaagtttggaaagaatgttgataaggccacaatttgttcgctagacctcgatcttgtcaaggctaagcaattgtcggatgcgattgagaactcatattggtttgaatttttcattgatgatttgcctttgtggggttttgttggagaggcagacagaaacaatgataacaaatatttcctattcacgcacaagaatattgtcatcagatacaatggcaatcagattatccatgttaatcttactcaagaaagcccaaagcttattgatgtgaataaggcattggatatgacatattctgtcaaatgggaaccaacaaacataacatttgctcaccgttttgatgtgtatctggactatcctttctttgaacaccagattcattggttctcaattttcaattctttcatgatggttatctttctcactggactagtgtcaatgatactgatgcggactctaagaaatgattatgcaaagtatgcccgtgatgatgatgatattgaaactctggaacgagatgtcaatgaagaatctggatggaagcttgtacatggtgatgttttccggcctccttgcaatctagttcttctttcagctcttgttggtattggtacacagttggcagcactgattctactagtgattttgttggcaatcattggaatgctgtacattgggcgaggagctattgtcacaacattcattgtttgctatgctcttacttcattcatctctggatatgtcagtggtgcattatactcacgtcatggagggaaaaactggatcaaggcaatggccatgacagcatcacttttcccatttatgtgctttggaattggcctggtgcttaacactattgctattttctatggatcgttagctgccataccatttggtacgatggtggttgttttcatcctgtgggccttcatctctttccctcttgcacttttgggaactgttgttggtagaaattggagtggtgctccaaacaatccctgtagggtgaagactattcctcgccctattcctgagaagaaatggtacctcacaccatctgtcattgcgcttatgggaggactgcttccttttggtagtatctttattgagatgtactttgtcttcacatcgttctggaactataaggtctactatgtttatgggttcatgttgctggtctttctgatactcatcattgtcaccatatgtgtaacaattgtcggtacatatttcttgctaaatgcggagaactaccactggcaatggacttcattcttctctgctgcttccactgcggtgtatgtttacctctactccatatattattaccacatgaagaccaagatgtctggattcttccagaccagcttctatttcggctacactctaatgttctgcctaggcttaggaacactatgcggtgccgtcgggtatcttggatcgacattgtttgtgaggaggatctacaggaacataaagtgtgactaagtgaagataatatcgccccattttgggtcagcgcagagaaaatgtatggcagagccttatttgattgagcgatcactgattctaaaaccaagaacgcaggtcattttgtgaaatatgatcgttgcttggcgccgagctgaaagccatgtttttctattcttgtcctcgtttctctctgatttcttctggacttggacaggcaacaaattttcatgttgaattagttatatatatagcggtggttgtagttgttgagtagttctgtagtatataccacaattgttatccttggccccaatgatacctcagattgatgggtataaactgtaacatttacattacctgatgtttgacgatgaacacagttccaaataatcatgttcggtactggaggatcgagatttttgagaggcaacatcaaagaaaaaatgtttgatattataccgaaatggaaacttagatcgtaaatgtttcatgcataaatctgaaactactgtacagtatgagcttgtcagtactgaaat

SEQ ID NO: 212993 - DNA, 2639 bp, Zea Mays
ctttcctcaaaaacctcgggcttcccctggcttccatgcagcagtccccccttcgtgtcgcactcgcacagtcgcactccataaggcaaggaggaaaacagagagacgaccaccgctccgcgccggccggccattccatccggcaatggcctccgccgccggtgctgcgttcgccgccatcaccctcctcatcctcgtacccctcaccgccgcttcggactccgaccacaagtaccaagcagcggagcctgtgacgctctgggtgaacaaggttggtccgtacaacaatccgcaggagacatacaactactacagcctcccattttgccatgcgtcagaaaaccatgtgcataagtggggaggactcggcgaggtccttggtgggaatgagctcattgacagccagatcgacataaagtttggaaagaatgttgataaggccacaatttgttcgctagacctcgatcttgtcaaggctaagcaattgtcggatgcgattgagaactcatattggtttgaatttttcattggttttgttggagaggcagacagaaacaatgataacaaatatttcctattcacgcacaagaatattgtcatcagatacaatggcaatcagattatccatgttaatcttactcaagaaagcccaaagcttattgatgtgaataaggcattggatatgacatattctgtcaaatgggaaccaacaaacataacatttgctcaccgttttgatgtgtatctggactatcctttctttgaacaccagattcattggttctcaattttcaattctttcatgatggttatctttctcactggactagtgtcaatgatactgatgcggactctaagaaatgattatgcaaagtatgcccgtgatgatgatgatattgaaactctggaacgagatgtcaatgaagaatctggatggaagcttgtacatggtgatgttttccggcctccttgcaatctagttcttctttcagctcttgttggtattggtacacagttggcagcactgattctactagtgattttgttggcaatcattggaatgctgtacattgggcgaggagctattgtcacaacattcattgtttgctatgctcttacttcattcatctctggatatgtcagtggtgcattatactcacgtcatggaggaggagcagggaaaaactggatcaaggcaatggccatgacagcatcacttttcccatttatgtgctttggaattggcctggtgcttaacactattgctattttctatggatcgttagctgccataccatttggtacgatggtggttgttttcatcctgtgggccttcatctctttccctcttgcacttttgggaactgttgttggtagaaattggagtggtgctccaaacaatccctgtagggtgaagactattcctcgccctattcctgagaagaaatggtacctcacaccatctgtcattgcgcttatgggaggactgcttccttttggtagtatctttattgagatgtactttgtcttcacatcgttctggaactataaggtatggtagacaggcctgtgttttttttttttaaatctctaagcttcatactaaggctgtcctcatcagtgggtataatggatgtgcaaaacactgttttggtactgtacatggactgtggatagagcggtgcttgaaatagttcctcattggtgaggatagcctaaggaggcattggagttgacattgatgtctcatcctttttgattaaccactgacaggtctactatgtttatgggttcatgttgctggtctttctgatactcatcattgtcaccatatgtgtaacaattgtcggtacatatttcttgctaaatgcggagaactaccactggcaatggacttcattcttctctgctgcttccactgcggtgtatgtttacctctactccatatattattaccacatgaagaccaagatgtctggattcttccagaccagcttctatttcggctacactctaatgttctgcctaggcttaggaacactatgcggtgccgtcgggtatcttggatcgacattgtttgtgaggaggatctacaggaacataaagtgtgactaagtgaagataatatcgccccattttgggtcagcgcagagaaaatgtatggcagagccttatttgattgagcgatcactgattctaaaaccaagaacgcaggtcattttgtgaaatatgatcgttgcttggcgccgagctgaaagccatgtttttctattcttgtcctcgtttctctctgatttcttctggacttggacaggcaacaaattttcatgttgaattagttatatatatagcggtggttgtagttgttgagtagttctgtagtatataccacaattgttatccttggccccaatgatacctcagattgatgggtataaactgtaacatttacattacctgatgtttgacgatgaacacagttccaaataatcatgttcggtactggaggatcgagatttttgagaggcaacatcaaagaaaaaatgtttgatattataccgaaatggaaacttagatcgtaaatgtttcatgcataaatctgaaactactgtacagtatgagcttgtcagtactgaaat

SEQ ID NO: 212994 - DNA, 2648 bp, Zea Mays
ctttcctcaaaaacctcgggcttcccctggcttccatgcagcagtccccccttcgtgtcgcactcgcacagtcgcactccataaggcaaggaggaaaacagagagacgaccaccgctccgcgccggccggccattccatccggcaatggcctccgccgccggtgctgcgttcgccgccatcaccctcctcatcctcgtacccctcaccgccgcttcggactccgaccacaagtaccaagcagcggagcctgtgacgctctgggtgaacaaggttggtccgtacaacaatccgcaggagacatacaactactacagcctcccattttgccatgcgtcagaaaaccatgtgcataagtggggaggactcggcgaggtccttggtgggaatgagctcattgacagccagatcgacataaagtttggaaagaatgttgataaggccacaatttgttcgctagacctcgatcttgtcaaggctaagcaattgtcggatgcgattgagaactcatattggtttgaatttttcattgatgatttgcctttgtggggttttgttggagaggcagacagaaacaatgataacaaatatttcctattcacgcacaagaatattgtcatcagatacaatggcaatcagattatccatgttaatcttactcaagaaagcccaaagcttattgatgtgaataaggcattggatatgacatattctgtcaaatgggaaccaacaaacataacatttgctcaccgttttgatgtgtatctggactatcctttctttgaacaccagattcattggttctcaattttcaattctttcatgatggttatctttctcactggactagtgtcaatgatactgatgcggactctaagaaatgattatgcaaagtatgcccgtgatgatgatgatattgaaactctggaacgagatgtcaatgaagaatctggatggaagcttgtacatggtgatgttttccggcctccttgcaatctagttcttctttcagctcttgttggtattggtacacagttggcagcactgattctactagtgattttgttggcaatcattggaatgctgtacattgggcgaggagctattgtcacaacattcattgtttgctatgctcttacttcattcatctctggatatgtcagtggtgcattatactcacgtcatggagggaaaaactggatcaaggcaatggccatgacagcatcacttttcccatttatgtgctttggaattggcctggtgcttaacactattgctattttctatggatcgttagctgccataccatttggtacgatggtggttgttttcatcctgtgggccttcatctctttccctcttgcacttttgggaactgttgttggtagaaattggagtggtgctccaaacaatccctgtagggtgaagactattcctcgccctattcctgagaagaaatggtacctcacaccatctgtcattgcgcttatgggaggactgcttccttttggtagtatctttattgagatgtactttgtcttcacatcgttctggaactataaggtatggtagacaggcctgtgttttttttttttaaatctctaagcttcatactaaggctgtcctcatcagtgggtataatggatgtgcaaaacactgttttggtactgtacatggactgtggatagagcggtgcttgaaatagttcctcattggtgaggatagcctaaggaggcattggagttgacattgatgtctcatcctttttgattaaccactgacaggtctactatgtttatgggttcatgttgctggtctttctgatactcatcattgtcaccatatgtgtaacaattgtcggtacatatttcttgctaaatgcggagaactaccactggcaatggacttcattcttctctgctgcttccactgcggtgtatgtttacctctactccatatattattaccacatgaagaccaagatgtctggattcttccagaccagcttctatttcggctacactctaatgttctgcctaggcttaggaacactatgcggtgccgtcgggtatcttggatcgacattgtttgtgaggaggatctacaggaacataaagtgtgactaagtgaagataatatcgccccattttgggtcagcgcagagaaaatgtatggcagagccttatttgattgagcgatcactgattctaaaaccaagaacgcaggtcattttgtgaaatatgatcgttgcttggcgccgagctgaaagccatgtttttctattcttgtcctcgtttctctctgatttcttctggacttggacaggcaacaaattttcatgttgaattagttatatatatagcggtggttgtagttgttgagtagttctgtagtatataccacaattgttatccttggccccaatgatacctcagattgatgggtataaactgtaacatttacattacctgatgtttgacgatgaacacagttccaaataatcatgttcggtactggaggatcgagatttttgagaggcaacatcaaagaaaaaatgtttgatattataccgaaatggaaacttagatcgtaaatgtttcatgcataaatctgaaactactgtacagtatgagcttgtcagtactgaaat

SEQ ID NO: 212995 - DNA, 2535 bp, Zea Mays
caaaaacctcgggcttcccctggcttccatgcagcagtccccccttcgtgtcgcactcgcacagtcgcactccataaggcaaggaggaaaacagagagacgaccaccgctccgcgccggccggccattccatccggcaatggcctccgccgccggtgctgcgttcgccgccatcaccctcctcatcctcgtacccctcaccgccgcttcggactccgaccacaagtaccaagcagcggagcctgtgacgctctgggtgaacaaggttggtccgtacaacaatccgcaggagacatacaactactacagcctcccattttgccatgcgtcagaaaaccatgtgcataagtggggaggactcggcgaggtccttggtgggaatgagctcattgacagccagatcgacataaagtttggaaagaatgttgataaggccacaatttgttcgctagacctcgatcttgtcaaggctaagcaattgtcggatgcgattgagaactcatattggtttgaatttttcattggttttgttggagaggcagacagaaacaatgataacaaatatttcctattcacgcacaagaatattgtcatcagatacaatggcaatcagattatccatgttaatcttactcaagaaagcccaaagcttattgatgtgaataaggcattggatatgacatattctgtcaaatgggaaccaacaaacataacatttgctcaccgttttgatgtgtatctggactatcctttctttgaacaccagattcattggttctcaattttcaattctttcatgatggttatctttctcactggactagtgtcaatgatactgatgcggactctaagaaatgattatgcaaagtatgcccgtgatgatgatgatattgaaactctggaacgagatgtcaatgaagaatctggatggaagcttgtacatggtgatgttttccggcctccttgcaatctagttcttctttcagctcttgttggtattggtacacagttggcagcactgattctactagtgattttgttggcaatcattggaatgctgtacattggaaagtgtttatttgattacatcaaaaggctcatccaattgaaagatggtgctcctattctctctgttgaacaatttgtcaaaatattatcgccatctatgtctgatctcatcctccttcaagaggcgaggagctattgtcacaacattcattgtttgctatgctcttacttcattcatctctggatatgtcagtggtgcattatactcacgtcatggaggaggagcagggaaaaactggatcaaggcaatggccatgacagcatcacttttcccatttatgtgctttggaattggcctggtgcttaacactattgctattttctatggatcgttagctgccataccatttggtacgatggtggttgttttcatcctgtgggccttcatctctttccctcttgcacttttgggaactgttgttggtagaaattggagtggtgctccaaacaatccctgtagggtgaagactattcctcgccctattcctgagaagaaatggtacctcacaccatctgtcattgcgcttatgggaggactgcttccttttggtagtatctttattgagatgtactttgtcttcacatcgttctggaactataaggtctactatgtttatgggttcatgttgctggtctttctgatactcatcattgtcaccatatgtgtaacaattgtcggtacatatttcttgctaaatgcggagaactaccactggcaatggacttcattcttctctgctgcttccactgcggtgtatgtttacctctactccatatattattaccacatgaagaccaagatgtctggattcttccagaccagcttctatttcggctacactctaatgttctgcctaggcttaggaacactatgcggtgccgtcgggtatcttggatcgacattgtttgtgaggaggatctacaggaacataaagtgtgactaagtgaagataatatcgccccattttgggtcagcgcagagaaaatgtatggcagagccttatttgattgagcgatcactgattctaaaaccaagaacgcaggtcattttgtgaaatatgatcgttgcttggcgccgagctgaaagccatgtttttctattcttgtcctcgtttctctctgatttcttctggacttggacaggcaacaaattttcatgttgaattagttatatatatagcggtggttgtagttgttgagtagttctgtagtatataccacaattgttatccttggccccaatgatacctcagattgatgggtataaactgtaacatttacattacctgatgtttgacgatgaacacagttccaaataatcatgttcggtactggaggatcgagatttttgagaggcaacatcaaagaaaaaatgtttgatattataccgaaatggaaacttagatcgtaaatgtttcatgcataaatctgaaactactgtacagtatgagcttgtcagtactgaaat

SEQ ID NO: 212996 - DNA, 2412 bp, Zea Mays
ctggcttccatgcagcagtccccccttcgtgtcgcactcgcacagtcgcactccataaggcaaggaggaaaacagagagacgaccaccgctccgcgccggccggccattccatccggcaatggcctccgccgccggtgctgcgttcgccgccatcaccctcctcatcctcgtacccctcaccgccgcttcggactccgaccacaagtaccaagcagcggagcctgtgacgctctgggtgaacaaggttggtccgtacaacaatccgcaggagacatacaactactacagcctcccattttgccatgcgtcagaaaaccatgtgcataagtggggaggactcggcgaggtccttggtgggaatgagctcattgacagccagatcgacataaagtttggaaagaatgttgataaggccacaatttgttcgctagacctcgatcttgtcaaggctaagcaattgtcggatgcgattgagaactcatattggtttgaatttttcattgatgatttgcctttgtggggtgttttgttggagaggcagacagaaacaatgataacaaatatttcctattcacgcacaagaatattgtcatcagatacaatggcaatcagattatccatgttaatcttactcaagaaagcccaaagcttattgatgtgaataaggcattggatatgacatattctgtcaaatgggaaccaacaaacataacatttgctcaccgttttgatgtgtatctggactatcctttctttgaacaccagattcattggttctcaattttcaattctttcatgatggttatctttctcactggactagtgtcaatgatactgatgcggactctaagaaatgattatgcaaagtatgcccgtgatgatgatgatattgaaactctggaacgagatgtcaatgaagaatctggatggaagcttgtacatggtgatgttttccggcctccttgcaatctagttcttctttcagctcttgttggtattggtacacagttggcagcactgattctactagtgattttgttggcaatcattggaatgctgtacattgggcgaggagctattgtcacaacattcattgtttgctatgctcttacttcattcatctctggatatgtcagtggtgcattatactcacgtcatggaggaggagcagggaaaaactggatcaaggcaatggccatgacagcatcacttttcccatttatgtgctttggaattggcctggtgcttaacactattgctattttctatggatcgttagctgccataccatttggtacgatggtggttgttttcatcctgtgggccttcatctctttccctcttgcacttttgggaactgttgttggtagaaattggagtggtgctccaaacaatccctgtagggtgaagactattcctcgccctattcctgagaagaaatggtacctcacaccatctgtcattgcgcttatgggaggactgcttccttttggtagtatctttattgagatgtactttgtcttcacatcgttctggaactataaggtctactatgtttatgggttcatgttgctggtctttctgatactcatcattgtcaccatatgtgtaacaattgtcggtacatatttcttgctaaatgcggagaactaccactggcaatggacttcattcttctctgctgcttccactgcggtgtatgtttacctctactccatatattattaccacatgaagaccaagatgtctggattcttccagaccagcttctatttcggctacactctaatgttctgcctaggcttaggaacactatgcggtgccgtcgggtatcttggatcgacattgtttgtgaggaggatctacaggaacataaagtgtgactaagtgaagataatatcgccccattttgggtcagcgcagagaaaatgtatggcagagccttatttgattgagcgatcactgattctaaaaccaagaacgcaggtcattttgtgaaatatgatcgttgcttggcgccgagctgaaagccatgtttttctattcttgtcctcgtttctctctgatttcttctggacttggacaggcaacaaattttcatgttgaattagttatatatatagcggtggttgtagttgttgagtagttctgtagtatataccacaattgttatccttggccccaatgatacctcagattgatgggtataaactgtaacatttacattacctgatgtttgacgatgaacacagttccaaataatcatgttcggtactggaggatcgagatttttgagaggcaacatcaaagaaaaaatgtttgatattataccgaaatggaaacttagatcgtaaatgtttcatgcataaatctgaaactactgtacagtatgagcttgtcagtactgaaat

SEQ ID NO: 212997 - DNA, 2608 bp, Zea Mays
ttccatgcagcagtccccccttcgtgtcgcactcgcacagtcgcactccataaggcaaggaggaaaacagagagacgaccaccgctccgcgccggccggccattccatccggcaatggcctccgccgccggtgctgcgttcgccgccatcaccctcctcatcctcgtacccctcaccgccgcttcggactccgaccacaagtaccaagcagcggagcctgtgacgctctgggtgaacaaggttggtccgtacaacaatccgcaggagacatacaactactacagcctcccattttgccatgcgtcagaaaaccatgtgcataagtggggaggactcggcgaggtccttggtgggaatgagctcattgacagccagatcgacataaagtttggaaagaatgttgataaggccacaatttgttcgctagacctcgatcttgtcaaggctaagcaattgtcggatgcgattgagaactcatattggtttgaatttttcattggttttgttggagaggcagacagaaacaatgataacaaatatttcctattcacgcacaagaatattgtcatcagatacaatggcaatcagattatccatgttaatcttactcaagaaagcccaaagcttattgatgtgaataaggcattggatatgacatattctgtcaaatgggaaccaacaaacataacatttgctcaccgttttgatgtgtatctggactatcctttctttgaacaccaggtaatatagattcattggttctcaattttcaattctttcatgatggttatctttctcactggactagtgtcaatgatactgatgcggactctaagaaatgattatgcaaagtatgcccgtgatgatgatgatattgaaactctggaacgagatgtcaatgaagaatctggatggaagcttgtacatggtgatgttttccggcctccttgcaatctagttcttctttcagctcttgttggtattggtacacagttggcagcactgattctactagtgattttgttggcaatcattggaatgctgtacattgggcgaggagctattgtcacaacattcattgtttgctatgctcttacttcattcatctctggatatgtcagtggtgcattatactcacgtcatggagggaaaaactggatcaaggcaatggccatgacagcatcacttttcccatttatgtgctttggaattggcctggtgcttaacactattgctattttctatggatcgttagctgccataccatttggtacgatggtggttgttttcatcctgtgggccttcatctctttccctcttgcacttttgggaactgttgttggtagaaattggagtggtgctccaaacaatccctgtagggtgaagactattcctcgccctattcctgagaagaaatggtacctcacaccatctgtcattgcgcttatgggaggactgcttccttttggtagtatctttattgagatgtactttgtcttcacatcgttctggaactataaggtatggtagacaggcctgtgttttttttttttaaatctctaagcttcatactaaggctgtcctcatcagtgggtataatggatgtgcaaaacactgttttggtactgtacatggactgtggatagagcggtgcttgaaatagttcctcattggtgaggatagcctaaggaggcattggagttgacattgatgtctcatcctttttgattaaccactgacaggtctactatgtttatgggttcatgttgctggtctttctgatactcatcattgtcaccatatgtgtaacaattgtcggtacatatttcttgctaaatgcggagaactaccactggcaatggacttcattcttctctgctgcttccactgcggtgtatgtttacctctactccatatattattaccacatgaagaccaagatgtctggattcttccagaccagcttctatttcggctacactctaatgttctgcctaggcttaggaacactatgcggtgccgtcgggtatcttggatcgacattgtttgtgaggaggatctacaggaacataaagtgtgactaagtgaagataatatcgccccattttgggtcagcgcagagaaaatgtatggcagagccttatttgattgagcgatcactgattctaaaaccaagaacgcaggtcattttgtgaaatatgatcgttgcttggcgccgagctgaaagccatgtttttctattcttgtcctcgtttctctctgatttcttctggacttggacaggcaacaaattttcatgttgaattagttatatatatagcggtggttgtagttgttgagtagttctgtagtatataccacaattgttatccttggccccaatgatacctcagattgatgggtataaactgtaacatttacattacctgatgtttgacgatgaacacagttccaaataatcatgttcggtactggaggatcgagatttttgagaggcaacatcaaagaaaaaatgtttgatattataccgaaatggaaacttagatcgtaaatgtttcatgcataaatctgaaactactgtacagtatgagcttgtcagtactgaaat

SEQ ID NO: 212998 - DNA, 2004 bp, Zea Mays
ttccatgcagcagtccccccttcgtgtcgcactcgcacagtcgcactccataaggcaaggaggaaaacagagagacgaccaccgctccgcgccggccggccattccatccggcaatggcctccgccgccggtgctgcgttcgccgccatcaccctcctcatcctcgtacccctcaccgccgcttcggactccgaccacaagtaccaagcagcggagcctgtgacgctctgggtgaacaaggttggtccgtacaacaatccgcaggagacatacaactactacagcctcccattttgccatgcgtcagaaaaccatgtgcataagtggggaggactcggcgaggtccttggtgggaatgagctcattgacagccagatcgacataaagtttggaaagaatgttgataaggccacaatttgttcgctagacctcgatcttgtcaaggctaagcaattgtcggatgcgattgagaactcatattggtttgaatttttcattggttttgttggagaggcagacagaaacaatgataacaaatatttcctattcacgcacaagaatattgtcatcagatacaatggcaatcagattatccatgttaatcttactcaagaaagcccaaagcttattgatgtgaataaggcattggatatgacatattctgtcaaatgggaaccaacaaacataacatttgctcaccgttttgatgtgtatctggactatcctttctttgaacaccagattcattggttctcaattttcaattctttcatgatggttatctttctcactggactagtgtcaatgatactgatgcggactctaagaaatgattatgcaaagtatgcccgtgatgatgatgatattgaaactctggaacgagatgtcaatgaagaatctggatggaagcttgtacatggtgatgttttccggcctccttgcaatctagttcttctttcagctcttgttggtattggtacacagttggcagcactgattctactagtgattttgttggcaatcattggaatgctgtacattgggcgaggagctattgtcacaacattcattgtttgctatgctcttacttcattcatctctggatatgtcagtggtgcattatactcacgtcatggaggtctactatgtttatgggttcatgttgctggtctttctgatactcatcattgtcaccatatgtgtaacaattgtcggtacatatttcttgctaaatgcggagaactaccactggcaatggacttcattcttctctgctgcttccactgcggtgtatgtttacctctactccatatattattaccacatgaagaccaagatgtctggattcttccagaccagcttctatttcggctacactctaatgttctgcctaggcttaggaacactatgcggtgccgtcgggtatcttggatcgacattgtttgtgaggaggatctacaggaacataaagtgtgactaagtgaagataatatcgccccattttgggtcagcgcagagaaaatgtatggcagagccttatttgattgagcgatcactgattctaaaaccaagaacgcaggtcattttgtgaaatatgatcgttgcttggcgccgagctgaaagccatgtttttctattcttgtcctcgtttctctctgatttcttctggacttggacaggcaacaaattttcatgttgaattagttatatatatagcggtggttgtagttgttgagtagttctgtagtatataccacaattgttatccttggccccaatgatacctcagattgatgggtataaactgtaacatttacattacctgatgtttgacgatgaacacagttccaaataatcatgttcggtactggaggatcgagatttttgagaggcaacatcaaagaaaaaatgtttgatattataccgaaatggaaacttagatcgtaaatgtttcatgcataaatctgaaactactgtacagtatgagcttgtcagtactgaaat

SEQ ID NO: 212999 - DNA, 2479 bp, Zea Mays
ttccatgcagcagtccccccttcgtgtcgcactcgcacagtcgcactccataaggcaaggaggaaaacagagagacgaccaccgctccgcgccggccggccattccatccggcaatggcctccgccgccggtgctgcgttcgccgccatcaccctcctcatcctcgtacccctcaccgccgcttcggactccgaccacaagtaccaagcagcggagcctgtgacgctctgggtgaacaaggttggtccgtacaacaatccgcaggagacatacaactactacagcctcccattttgccatgcgtcagaaaaccatgtgcataagtggggaggactcggcgaggtccttggtgggaatgagctcattgacagccagatcgacataaagtttggaaagaatgttgataaggccacaatttgttcgctagacctcgatcttgtcaaggctaagcaattgtcggatgcgattgagaactcatattggtttgaatttttcattggttttgttggagaggcagacagaaacaatgataacaaatatttcctattcacgcacaagaatattgtcatcagatacaatggcaatcagattatccatgttaatcttactcaagaaagcccaaagcttattgatgtgaataaggcattggatatgacatattctgtcaaatgggaaccaacaaacataacatttgctcaccgttttgatgtgtatctggactatcctttctttgaacaccagattcattggttctcaattttcaattctttcatgatggttatctttctcactggactagtgtcaatgatactgatgcggactctaagaaatgattatgcaaagtatgcccgtgatgatgatgatattgaaactctgtttgtattaggaacgagatgtcaatgaagaatctggatggaagcttgtacatggtgatgttttccggcctccttgcaatctagttcttctttcagctcttgttggtattggtacacagttggcagcactgattctactagtgattttgttggcaatcattggaatgctgtacattgggcgaggagctattgtcacaacattcattgtttgctatgctcttacttcattcatctctggatatgtcagtggtgcattatactcacgtcatggaggtatgggcttatttatcatgtaaaattgaactgtatacctatagttctataaggtgctcagttgttttaaatccttttggaggaggagcagggaaaaactggatcaaggcaatggccatgacagcatcacttttcccatttatgtgctttggaattggcctggtgcttaacactattgctattttctatggatcgttagctgccataccatttggtacgatggtggttgttttcatcctgtgggccttcatctctttccctcttgcacttttgggaactgttgttggtagaaattggagtggtgctccaaacaatccctgtagggtgaagactattcctcgccctattcctgagaagaaatggtacctcacaccatctgtcattgcgcttatgggaggactgcttccttttggtagtatctttattgagatgtactttgtcttcacatcgttctggaactataaggtctactatgtttatgggttcatgttgctggtctttctgatactcatcattgtcaccatatgtgtaacaattgtcggtacatatttcttgctaaatgcggagaactaccactggcaatggacttcattcttctctgctgcttccactgcggtgtatgtttacctctactccatatattattaccacatgaagaccaagatgtctggattcttccagaccagcttctatttcggctacactctaatgttctgcctaggcttaggaacactatgcggtgccgtcgggtatcttggatcgacattgtttgtgaggaggatctacaggaacataaagtgtgactaagtgaagataatatcgccccattttgggtcagcgcagagaaaatgtatggcagagccttatttgattgagcgatcactgattctaaaaccaagaacgcaggtcattttgtgaaatatgatcgttgcttggcgccgagctgaaagccatgtttttctattcttgtcctcgtttctctctgatttcttctggacttggacaggcaacaaattttcatgttgaattagttatatatatagcggtggttgtagttgttgagtagttctgtagtatataccacaattgttatccttggccccaatgatacctcagattgatgggtataaactgtaacatttacattacctgatgtttgacgatgaacacagttccaaataatcatgttcggtactggaggatcgagatttttgagaggcaacatcaaagaaaaaatgtttgatattataccgaaatggaaacttagatcgtaaatgtttcatgcataaatctgaaactactgtacagtatgagcttgtcagtactgaaat

SEQ ID NO: 213000 - DNA, 2431 bp, Zea Mays
gcgtgtcgccggcccgggcgattgggatctctctgtattgcgcgccgggtcgagctgtcgagcggttgctagatcttatctgtgttcgtagccgattgcggttgggagtgaaatggatggggagaaacaacagtgtggaaaccttcaggccattgtgtcgattagtaatcttctgacgttagaccgatcgaagtgcatcttctatgactattttttctttgttgcattcagttcagtaccaagcagcggagcctgtgacgctctgggtgaacaaggttggtccgtacaacaatccgcaggagacatacaactactacagcctcccattttgccatgcgtcagaaaaccatgtgcataagtggggaggactcggcgaggtccttggtgggaatgagctcattgacagccagatcgacataaagtttggaaagaatgttgataaggccacaatttgttcgctagacctcgatcttgtcaaggctaagcaattgtcggatgcgattgagaactcatattggtttgaatttttcattgatgatttgcctttgtggggttttgttggagaggcagacagaaacaatgataacaaatatttcctattcacgcacaagaatattgtcatcagatacaatggcaatcagattatccatgttaatcttactcaagaaagcccaaagcttattgatgtgaataaggcattggatatgacatattctgtcaaatgggaaccaacaaacataacatttgctcaccgttttgatgtgtatctggactatcctttctttgaacaccagattcattggttctcaattttcaattctttcatgatggttatctttctcactggactagtgtcaatgatactgatgcggactctaagaaatgattatgcaaagtatgcccgtgatgatgatgatattgaaactctggaacgagatgtcaatgaagaatctggatggaagcttgtacatggtgatgttttccggcctccttgcaatctagttcttctttcagctcttgttggtattggtacacagttggcagcactgattctactagtgattttgttggcaatcattggaatgctgtacattgggcgaggagctattgtcacaacattcattgtttgctatgctcttacttcattcatctctggatatgtcagtggtgcattatactcacgtcatggagggaaaaactggatcaaggcaatggccatgacagcatcacttttcccatttatgtgctttggaattggcctggtgcttaacactattgctattttctatggatcgttagctgccataccatttggtacgatggtggttgttttcatcctgtgggccttcatctctttccctcttgcacttttgggaactgttgttggtagaaattggagtggtgctccaaacaatccctgtagggtgaagactattcctcgccctattcctgagaagaaatggtacctcacaccatctgtcattgcgcttatgggaggactgcttccttttggtagtatctttattgagatgtactttgtcttcacatcgttctggaactataaggtctactatgtttatgggttcatgttgctggtctttctgatactcatcattgtcaccatatgtgtaacaattgtcggtacatatttcttgctaaatgcggagaactaccactggcaatggacttcattcttctctgctgcttccactgcggtgtatgtttacctctactccatatattattaccacatgaagaccaagatgtctggattcttccagaccagcttctatttcggctacactctaatgttctgcctaggcttaggaacactatgcggtgccgtcgggtatcttggatcgacattgtttgtgaggaggatctacaggaacataaagtgtgactaagtgaagataatatcgccccattttgggtcagcgcagagaaaatgtatggcagagccttatttgattgagcgatcactgattctaaaaccaagaacgcaggtcattttgtgaaatatgatcgttgcttggcgccgagctgaaagccatgtttttctattcttgtcctcgtttctctctgatttcttctggacttggacaggcaacaaattttcatgttgaattagttatatatatagcggtggttgtagttgttgagtagttctgtagtatataccacaattgttatccttggccccaatgatacctcagattgatgggtataaactgtaacatttacattacctgatgtttgacgatgaacacagttccaaataatcatgttcggtactggaggatcgagatttttgagaggcaacatcaaagaaaaaatgtttgatattataccgaaatggaaacttagatcgtaaatgtttcatgcataaatctgaaactactgtacagtatgagcttgtcagtactgaaat

SEQ ID NO: 213001 - DNA, 1383 bp, Zea Mays
gtcaaaatattatcgccatctatgtctgatctcatcctccttcaagaggcgaggagctattgtcacaacattcattgtttgctatgctcttacttcattcatctctggatatgtcagtggtgcattatactcacgtcatggagggaaaaactggatcaaggcaatggccatgacagcatcacttttcccatttatgtgctttggaattggcctggtgcttaacactattgctattttctatggatcgttagctgccataccatttggtacgatggtggttgttttcatcctgtgggccttcatctctttccctcttgcacttttgggaactgttgttggtagaaattggagtggtgctccaaacaatccctgtagggtgaagactattcctcgccctattcctgagaagaaatggtacctcacaccatctgtcattgcgcttatgggaggactgcttccttttggtagtatctttattgagatgtactttgtcttcacatcgttctggaactataaggtctactatgtttatgggttcatgttgctggtctttctgatactcatcattgtcaccatatgtgtaacaattgtcggtacatatttcttgctaaatgcggagaactaccactggcaatggacttcattcttctctgctgcttccactgcggtgtatgtttacctctactccatatattattaccacatgaagaccaagatgtctggattcttccagaccagcttctatttcggctacactctaatgttctgcctaggcttaggaacactatgcggtgccgtcgggtatcttggatcgacattgtttgtgaggaggatctacaggaacataaagtgtgactaagtgaagataatatcgccccattttgggtcagcgcagagaaaatgtatggcagagccttatttgattgagcgatcactgattctaaaaccaagaacgcaggtcattttgtgaaatatgatcgttgcttggcgccgagctgaaagccatgtttttctattcttgtcctcgtttctctctgatttcttctggacttggacaggcaacaaattttcatgttgaattagttatatatatagcggtggttgtagttgttgagtagttctgtagtatataccacaattgttatccttggccccaatgatacctcagattgatgggtataaactgtaacatttacattacctgatgtttgacgatgaacacagttccaaataatcatgttcggtactggaggatcgagatttttgagaggcaacatcaaagaaaaaatgtttgatattataccgaaatggaaacttagatcgtaaatgtttcatgcataaatctgaaactactgtacagtatgagcttgtcagtactgaaat

SEQ ID NO: 213002 - DNA, 1619 bp, Zea Mays
aaggtttttttttgcaagatgttcaccagcagctgagcgagcgttggcaggccacgggggctgtgctgtgctgaaggtcgtccgtagcgtgatctgctagcgctcgcaattctcctctccaccacgccggcgacggcagccggtgaccagtacctacatgtccagcctgaggtcgctagccagcgcactgatcggggacgccgcgaggcttcactcggccactggctctgccggggaggagcctgacagggtctacggcgccgtgctctgccgggcggactccgctggtgctaactacaggcgccgccggggtgcccttggcgccatcgacggcgacggccactcaccttgcgcgctccacagcgacgtgaccgtctactccgagctgtaccatctccgtttctctgacaggaacttcctcgccaacttcaagaacgcgccgaaatgggccgacgtcaaattatggtttctctcagactgctaatggtacatagcagatttacaagggagtatttactgatggacaagaggtagcaataaaaagactgtctgctcacaacaagacgggtgtttgttatggcttaaaattagattctaaccgtcagaatccgattcttgtagccaaaggcttcacttcttagcttgtttctatgagaatcgtttccatgaaaatcactcaaataatccgcaaataatccgtcaagttttgtcacgatgagaaaaattcgttgctttctagatcctaaactctataaactattctagcttcctctatagtctgcaagtaatcccgcgatatttagattatcttgacaactagactatacaagaatccagattctcagaaaagctctttagaaaaaagctataccaaacatacccctttagatatcgcgatattcaggttttagcaaaacttaagcacaaaatccttgttagactccttggtcgttgcatccatgaagagaagatgctgatatacgaataactgacgaaccaaagcttggaccacttcatttttgatccaatcatgcatgcatcacttaaatagaagagaggagtcaaaatagctgatggtatagcccagggactcctgtaccttcacaacctctcctgaatacgcatcgtccatagggtcttgaaagcaagtaaaatcctgttagatttctgatctaaaccctaagatttctgatgttgggatggcaaggatatttccatcggatgccactcaagcaacagccagcagacttgtgggcacatagtaaggacctgggaactgtggaaagacaggagatggaataagttcaatgatcaatcatttggtgatgactacgaactggaagagctgatgaaataccttgctgagttgctgtggtattgttgtgtgttatgagaaaaaaaacaatagatcatcctacaatgcctgatgttgttgcaactcttagcagtgatggcatcacattgccagaaccaaagcagccagcttactcctatgcgaaattaaatgtgtcagtcactgtattgagtagcagaaatgatgtcaccatcactactacaaatggcatataacagaatgtgaatatactgttaatcaagtgtgagctacaggtcttggtcat

SEQ ID NO: 213003 - DNA, 1428 bp, Zea Mays
aaggtttttttttgcaagatgttcaccagcagctgagcgagcgttggcaggccacgggggctgtgctgtgctgaaggtcgtccgtagcgtgatctgctagcgctcgcaattctcctctccaccacgccggcgacggcagccggtgaccagtacctacatgtccagcctgaggtcgctagccagcgcactgatcggggacgccgcgaggcttcactcggccactggctctgccggggaggagcctgacagggtctacggcgccgtgctctgccgggcggactccgctggtgctaactacaggcgccgccggggtgcccttggcgccatcgacggcgacggccactcaccttgcgcgctccacagcgacgtgaccgtctactccgagctgtaccatctccgtttctctgacaggaacttcctcgccaacttcaagaacgcgccgaaatgggccgacgtcaaattatggtttctctcagactgctaatggtacatagcagatttacaagggagtatttactgatggacaagaggtagcaataaaaagactgtctgctcacaacaagacgggtgtttgttatggcttaaaattagattctaaccgtcagaatccgattcttgtagccaaaggcttcacttcttagcttgtttctatgagaatcgtttccatgaaaatcactcaaataatccgcaaataatccgtcaagttttgtcacgatgagaaaaattcgttgctttctagatcctaaactctataaactattctagcttcctctatagtctgcaagtaatcccgcgatatttagattatcttgacaactagactatacaagaatccagattctcagaaaagctctttagaaaaaagctataccaaacatacccctttagatatcgcgatattcaggttttagcaaaacttaagcacaaaatccttgttagactccttggtcgttgcatccatgaagagaagatgctgatatacgaataactgacgaaccaaagcttggaccacttcatttttgatccaatcatgcatgcatcacttaaatagaagagaggagtcaaaatagctgatgacctgggaactgtggaaagacaggagatggaataagttcaatgatcaatcatttggtgatgactacgaactggaagagctgatgaaataccttgctgagttgctgtggtattgttgtgtgttatgagaaaaaaaacaatagatcatcctacaatgcctgatgttgttgcaactcttagcagtgatggcatcacattgccagaaccaaagcagccagcttactcctatgcgaaattaaatgtgtcagtcactgtattgagtagcagaaatgatgtcaccatcactactacaaatggcatataacagaatgtgaatatactgttaatcaagtgtgagctacaggtcttggtcat

SEQ ID NO: 213004 - DNA, 4042 bp, Zea Mays
aaggtttttttttgcaagatgttcaccagcagctgagcgagcgttggcaggccacgggggctgtgctgtgctgaaggtcgtccgtagcgtgatctgctagcgctcgcaattctcctctccaccacgccggcgacggcagccggtgaccagtacctacatgtccagcctgaggtcgctagccagcgcactgatcggggacgccgcgaggcttcactcggccactggctctgccggggaggagcctgacagggtctacggcgccgtgctctgccgggcggactccgctggtgctaactacaggcgccgccggggtgcccttggcgccatcgacggcgacggccactcaccttgcgcgctccacagcgacgtgaccgtctactccgagctgtaccatctccgtttctctgacaggaacttcctcgccaacttcaagaacgcgccgaaatgggccgacgtcaaattatggtttctctcagactgctaatggtacatagcagatttacaagggagtatttactgatggacaagaggtagcaataaaaagactgtctgctcacaacaagacgggtgtttgttatggcttaaaattagattctaaccgtcagaatccgattcttgtagccaaaggcttcacttcttagcttgtttctatgagaatcgtttccatgaaaatcactcaaataatccgcaaataatccgtcaagttttgtcacgatgagaaaaattcgttgctttctagatcctaaactctataaactattctagcttcctctatagtctgcaagtaatcccgcgatatttagattatcttgacaactagactatacaagaatccagattctcagaaaagctctttagaaaaaagctataccaaacatacccctttagatatcgcgatattcaggttttagcaaaacttaagcacaaaatccttgttagactccttggtcgttgcatccatgaagagaagatgctgatatacgaataactgacgaaccaaagcttggaccacttcatttttgatccaatcatgcatgcatcacttaaatagaagagaggagtcaaaatagctgatggtatagcccagggactcctgtaccttcacaacctctcctgaatacgcatcgtccatagggtcttgaaagcaagtaaaatcctgttagatttctgatctaaaccctaagatttctgatgttgggatggcaaggatatttccatcggatgccactcaagcaacagccagcagacttgtgggcacatagtaaggtggatacatggctaatgaattgcatctgatggccttctctcgatcaagtcagatgttttcagtttagtattaatggtgtatctgtatggtgttctacattatttccttccataaagtattgaactcaaagtacagggggtttcctgtacctccctgttttattgctgttgtctagcattttagctacttctaacagctaaagatacaccatcatacgcatgtaaaaaatcatttctcttttcagacctgggaactgtggaaagacaggagatggaataagttcaatgatcaatcatttggtgatgactacgaactggaagagctgatgaaataccttgctgagttgctgtggtattgttgtgtgttatgagaaaaaaaacaatagatcatcctacaatgcctgatgttgttgcaactcttagcagtgatggcatcacattgccagaaccaaagcagccagcttactcctatgcgaaattaaatgtgtcagtcactgtattgagtagcagaaatgatgtcaccatcactactacaaatggcatataacagaatgtgaatatactgttaatcaagtgtgagctacaggtcttggtcatccttcttgcgttaattaattgacaacacaattgataacgtcgtgggaattggagttttcctagtggtaatatccattgcttgcttggttatccatatctggatcaaaacacaacaacaaagaggtctgcactaagccactaacataacagataaaaatgtgtgtcattaatatgtgctctcttatatgtataatttcaatattatttttcagaacaagcaatattaaagttacaacgagtgtctttggcaataaaaggtgtgataaacctatggagcatggaaggtggcaacttgggattttcacagtacgattactctcatataaaagaagctacaaataacttttcggttgataataaactgggagaaggtggcttcggccctgtatacaagggccaattgagaagtggaattaaaatagcagccaagaaacttgaagcatgttctttacaaggactattggaattccaaaacgaaatccagcttatagcaaagcttcaacacaaaaatctcgttaagctgctgggttgctgcactaaaggagatcaagaaaagatgcttatatatgaatacatggaaaataaaagtctagattacttcatatttgataatgtgaagggagcagatctaaactggtcaaaacgcctgcacataattaatgggatagctcaagggcttctttaccttcacaattattcacggttatgcgttgtccatagggatttgaaagcaagtaacattctcttggatagtgaaatgaatccaaaaatatcagattttgggatggccagaatattctgttcaaacgcgaaagaatcaaatactacaagaatagtgggcacacagtaagaacatatggatctgtgcactttgagtacatttaaaatttatagaggtgcttcaaaattgtagcatgtcatcaagttaacttaaaaatttcactttttgtattatactgagtactgacactatttaacttccatcctcagtggctacatacctcctgaatatgcttttcatggggtttgctccatcaaatcagatgtttttagctacggggtattgacattggaaattctaagctcaaagaggacggtccaattctatgagtacaaccaaaagctatataatctcatctcatatgtgagtgtaattaaacttaacgaatccagaacttcatctgcggattcccatttgctcataaatacatacctctatctcacttgtttcacaaaaacatgttactttggcaggcttggcaactttggacggacggaaaatcagatgagctgatttattctcctccaggcaatgtacgtgaagagatagaaaggcacattcaggtggcactcttatgtgttcaagaaaatgcggagcatcgacctgatatggagcgagttgtcacaatgctaaacagtaaggatgtggacttacccaagcctatgcagccagcttacttccatgtaaatcctagtgaggaagaagtttcatcacgaagcattaatatgactatgagtatcacgctggaaaggtagaagcacattgtcattgttttttgagaaaaatgcttgtaactatctgcatcaagagggaaaaaaaattgcaccgatatagtcatgtgagtaagtttgattgttatgcatattcattaatacaacatatgttttttacatttttgcttggatacgcagattgattcttgggctcaacctgaatcttcgaaattttaacctcatgtctttaacaacaaaataggtcattctgatcctaaaactcattcattttaaaaaccacagtaccagcagttgcaacagtttcagataaaaacagcagcaacaccactctgatcttgagttgctttattccaagagtaaacttcacaacgggtagtatatccacttgaatgaatcagacaaaattcatgagcacgaactgcaattgggatttggggagcacataaagagggtacagtaaccgctaccgtagtgcgttatcaactcatagcatcagcagacggcactccccacgtggttatttcttctgaatgcctggctcgaatcgaaagcaaaaagcgaaaagaggggattcgtaaggccgaacctcggttcaattggcgcaatgtctgtgccagcacctgcgcgaagctgtacccggagaatgtcgcggtggtagtccgcg

SEQ ID NO: 213005 - DNA, 1395 bp, Zea Mays
cggcactcagcaccaattcgctggaggagaggaggaaccgtacgcgcctcattacgcccatccacgtgctcgcctctccccatcggcccatcgcataattttcctcggcggcgtcgccatctcaccggcggcgggcctgcggccggcaaccggaggcgatggcgagctcgtctgtggcggcggacatggagctggaccgccccaacctggaggactacctcccgcccgactcgctcccgcaggaggcgcccaggaatctccatctgcgcgatctgcttgacatctcgccggtgctaaccgaggcagcgggtgccatagtcgatgattcattcacgcgctgctttaagtcgaattctccagaaccatggaactggaacatatatttgttccctttatggtgcttcggtgtagtaattcgatatggattactcttcccactgaggtccttaacgcttgcaataggatggttagcattttttgctgcctttttccccgtgcatttcctattgaaaggtcaagacaagttgagaaataaaattgagaggaagttggttgaaatgatgtgcagtgtttttgttgcttcatggactggagtgatcaagtaccatggaccacgcccaagcacacgacctcatcaggtatttgttgcaaaccatacatcaatgatagatttcattattctggagcaaatgacagcatttgctgtcatcatgcagaagcatcctggatgggttggatttattcagaagactatcttggaaagtgtgggttgcatctggtttaaccgtaatgatctccgggatcgtgaagttacggcacggaagtaagttgtctttgaatgacaaacccatttattatgtagttcattttgttcagagaattactttgtcaggttgcgtgatcatgttcaacatccagacaaaaaccctctcttgattttcccagaaggaacttgtgttaacaaccagtatacggtcatgttcaagaagggtgcctttgagcttgggtgtgctgtctgtccaatagctatcaaatacaataaaatatttgttgatgccttttggaacagtaagaagcaatcttttacgatgcacttggtccggttgatgacatcatgggctgttgtgtgtgatgtttggtacttggagcctcaatatctgagggagggagagactgcaattgcgtttgctgagagagtaagggacatgatagcagctagagctggtcttaagaaggtcccgtgggatggctatctgaaacacaaccgccctagtcccaaacacaccgaagagaagcaacgcatattcgccgaatctgtcttgaggagactagaggagaaatgaagagacatcaaacactacaagcgcatttgagtagcagggagttggactgtgc

SEQ ID NO: 213006 - DNA, 1370 bp, Zea Mays
gagaggaggaaccgtacgcgcctcattacgcccatccacgtgctcgcctctccccatcggcccatcgcataattttcctcggcggcgtcgccatctcaccggcggcgggcctgcggccggcaaccggaggcgatggcgagctcgtctgtggcggcggacatggagctggaccgccccaacctggaggactacctcccgcccgactcgctcccgcaggaggcgcccaggaatctccatctgcgcgatctgcttgacatctcgccggtgctaaccgaggcagcgggtgccatagtcgataggaagttggttgaaatgatgtgcagtgtttttgttgcttcatggactggagtgatcaagtaccatggaccacgcccaagcacacgacctcatcaggtatttgttgcaaaccatacatcaatgatagatttcattattctggagcaaatgacagcatttgctgtcatcatgcagaagcatcctggatgggttggatttattcagaagactatcttggaaagtgtgggttgcatctggtttaaccgtaatgatctccgggatcgtgaagttacggcacggaagttgcgtgatcatgttcaacatccagacaaaaaccctctcttgattttcccagaaggaacttgtgttaacaaccagtatacggtcatgttcaagaagggtgcctttgagcttgggtgtgctgtctgtccaatagctatcaaatacaataaaatatttgttgatgccttttggaacagtaagaagcaatcttttacgatgcacttggtccggttgatgacatcatgggctgttgtgtgtgatgtttggtacttggagcctcaatatctgagggagggagagactgcaattgcgtttgctgagagagtaagggacatgatagcagctagagctggtcttaagaaggtcccgtgggatggctatctgaaacacaaccgccctagtcccaaacacaccgaagagaagcaacgcatattcgccgaatctgtcttgaggagactagaggagaaatgaagagacatcaaacactacaagcgcatttggttagtggtttaccgttcagctaccttgtaattcggttggctccccgaaaaaaaaaagtccgggacacgtcaagtgcccagctcagttttgttgtaaatttattagaaatttgacagaattggtagtgtgaacttaccaagaaaggaagaatagccgcatgtgttgtggctgttcattctatgattggttaggaattgacacttgaaacacggtactctattcagaggctgtgtccgtatttatgaatcgacgatgtaatggttttaattcatgtgattattgattcaataatatgagtagattacatcctc

SEQ ID NO: 213007 - DNA, 1601 bp, Zea Mays
caccaattcgctggaggagaggaggaaccgtacgcgcctcattacgcccatccacgtgctcgcctctccccatcggcccatcgcataattttcctcggcggcgtcgccatctcaccggcggcgggcctgcggccggcaaccggaggcgatggcgagctcgtctgtggcggcggacatggagctggaccgccccaacctggaggactacctcccgcccgactcgctcccgcaggaggcgcccaggaatctccatctgcgcgatctgcttgacatctcgccggtgctaaccgaggcagcgggtgccatagtcgatgattcattcacgcgctgctttaagtcgaattctccagaaccatggaactggaacatatatttgttccctttatggtgcttcggtgtagtaattcgatatggattactcttcccactgaggtccttaacgcttgcaataggatggttagcattttttgctgcctttttccccgtgcatttcctattgaaaggtcaagacaagttgagaaataaaattgagaggaagttggttgaaatgatgtgcagtgtttttgttgcttcatggactggagtgatcaagtaccatggaccacgcccaagcacacgacctcatcaggtatttgttgcaaaccatacatcaatgatagatttcattattctggagcaaatgacagcatttgctgtcatcatgcagaagcatcctggatgggatttattcagaagactatcttggaaagtgtgggttgcatctggtttaaccgtaatgatctccgggatcgtgaagttacggcacggaagttgcgtgatcatgttcaacatccagacaaaaaccctctcttgattttcccagaaggaacttgtgttaacaaccagtatacggtcatgttcaagaagggtgcctttgagcttgggtgtgctgtctgtccaatagctatcaaatacaataaaatatttgttgatgccttttggaacagtaagaagcaatcttttacgatgcacttggtccggttgatgacatcatgggctgttgtgtgtgatgtttggtacttggagcctcaatatctgagggagggagagactgcaattgcgtttgctgagagagtaagggacatgatagcagctagagctggtcttaagaaggtcccgtgggatggctatctgaaacacaaccgccctagtcccaaacacaccgaagagaagcaacgcatattcgccgaatctgtcttgaggagactagaggagaaatgaagagacatcaaacactacaagcgcatttggttagtggtttaccgttcagctaccttgtaattcggttggctccccgaaaaaaaaaagtccgggacacgtcaagtgcccagctcagttttgttgtaaatttattagaaatttgacagaattggtagtgtgaacttaccaagaaaggaagaatagccgcatgtgttgtggctgttcattctatgattggttaggaattgacacttgaaacacggtactctattcagaggctgtgtccgtatttatgaatcgacgatgtaatggttttaattcatgtgattattgattcaataatatgagtagattacatcctc

SEQ ID NO: 213008 - DNA, 1584 bp, Zea Mays
ctcagcaccaattcgctggaggagaggaggaaccgtacgcgcctcattacgcccatccacgtgctcgcctctccccatcggcccatcgcataattttcctcggcggcgtcgccatctcaccggcggcgggcctgcggccggcaaccggaggcgatggcgagctcgtctgtggcggcggacatggagctggaccgccccaacctggaggactacctcccgcccgactcgctcccgcaggaggcgcccaggaatctccatctgcgcgatctgcttgacatctcgccggtgctaaccgaggcagcgggtgccatagtcgatgattcattcacgcgctgctttaagtcgaattctccagaaccatggaactggaacatatatttgttccctttatggtgcttcggtgtagtaattcgatatggattactcttcccactgaggtccttaacgcttgcaataggatggttagcattttttgctgcctttttccccgtgcatttcctattgaaaggtcaagacaagttgagaaataaaattgagaggaagttggttgaaatgatgtgcagtgtttttgttgcttcatggactggagtgatcaagtaccatggaccacgcccaagcacacgacctcatcaggtatttgttgcaaaccatacatcaatgatagatttcattattctggagcaaatgacagcatttgctgtcatcatgcagaagcatcctggatgggttggatttattcagaagactatcttggaaagtgtgggttgcatctggtttaaccgtaatgatctccgggatcgtgaagttacggcacggaaacaaaaaccctctcttgattttcccagaaggaacttgtgttaacaaccagtatacggtcatgttcaagaagggtgcctttgagcttgggtgtgctgtctgtccaatagctatcaaatacaataaaatatttgttgatgccttttggaacagtaagaagcaatcttttacgatgcacttggtccggttgatgacatcatgggctgttgtgtgtgatgtttggtacttggagcctcaatatctgagggagggagagactgcaattgcgtttgctgagagagtaagggacatgatagcagctagagctggtcttaagaaggtcccgtgggatggctatctgaaacacaaccgccctagtcccaaacacaccgaagagaagcaacgcatattcgccgaatctgtcttgaggagactagaggagaaatgaagagacatcaaacactacaagcgcatttggttagtggtttaccgttcagctaccttgtaattcggttggctccccgaaaaaaaaaagtccgggacacgtcaagtgcccagctcagttttgttgtaaatttattagaaatttgacagaattggtagtgtgaacttaccaagaaaggaagaatagccgcatgtgttgtggctgttcattctatgattggttaggaattgacacttgaaacacggtactctattcagaggctgtgtccgtatttatgaatcgacgatgtaatggttttaattcatgtgattattgattcaataatatgagtagattacatcctc

SEQ ID NO: 213009 - DNA, 1513 bp, Zea Mays
ctcagcaccaattcgctggaggagaggaggaaccgtacgcgcctcattacgcccatccacgtgctcgcctctccccatcggcccatcgcataattttcctcggcggcgtcgccatctcaccggcggcgggcctgcggccggcaaccggaggcgatggcgagctcgtctgtggcggcggacatggagctggaccgccccaacctggaggactacctcccgcccgactcgctcccgcaggaggcgcccaggaatctccatctgcgcgatctgcttgacatctcgccggtgctaaccgaggcagcgggtgccatagtcgatgattcattcacgcgctgctttaagtcgaattctccagaaccatggaactggaacatatatttgttccctttatggtgcttcggtgtagtaattcgatatggattactcttcccactgaggtccttaacgcttgcaataggatggttagcattttttgctgcctttttccccgtgcatttcctattgaaaggtcaagacaagttgagaaataaaattgagaggaagttggttgaaatgatgtgcagtgtttttgttgcttcatggactggagtgatcaagtaccatggaccacgcccaagcacacgacctcatcaggtatttgttgcaaaccatacatcaatgatagatttcattattctggagcaaatgacagcatttgctgtcatcatgcagaagcatcctggatgggttggatttattcagaagactatcttggaaagtgtgggttgcatctggtttaaccgtaatgatctccgggatcgtgaagttacggcacggaaggtgcctttgagcttgggtgtgctgtctgtccaatagctatcaaatacaataaaatatttgttgatgccttttggaacagtaagaagcaatcttttacgatgcacttggtccggttgatgacatcatgggctgttgtgtgtgatgtttggtacttggagcctcaatatctgagggagggagagactgcaattgcgtttgctgagagagtaagggacatgatagcagctagagctggtcttaagaaggtcccgtgggatggctatctgaaacacaaccgccctagtcccaaacacaccgaagagaagcaacgcatattcgccgaatctgtcttgaggagactagaggagaaatgaagagacatcaaacactacaagcgcatttggttagtggtttaccgttcagctaccttgtaattcggttggctccccgaaaaaaaaaagtccgggacacgtcaagtgcccagctcagttttgttgtaaatttattagaaatttgacagaattggtagtgtgaacttaccaagaaaggaagaatagccgcatgtgttgtggctgttcattctatgattggttaggaattgacacttgaaacacggtactctattcagaggctgtgtccgtatttatgaatcgacgatgtaatggttttaattcatgtgattattgattcaataatatgagtagattacatcctc

SEQ ID NO: 213010 - DNA, 2270 bp, Zea Mays
gtctggatcctcctatccaattccgtctcgcgttcctctcgtcggctcgtcgctctccgagccgcgaaatggcgcctcctacctctgcatcggcgcggccgctatccctccccctcaccgtccctctctcctgtcaccgctcccacttgctccccgcgcccaacgctcgcctcctcacccggcgccgcgtcgcgctcgcgccgacccggcctggcgccacgctcctatccagcctcagtgacgcccgggaggaggaggaggatgaaagtggtttctatgaggaggatgagcaacaggaattcgaggatgaggaggaacaggggtacgacggggagaacgaggagctggtcgaggtgggatacgtgtcaggcgcgcacggggtgcgcggcgacgtcctcgtcacgccacgcaccgactttccggagctccgccttgccacgccggggacgagatggctgagggctcgagctgctggcaagcagcaggtcagggaattcgagcttgttcggggaagggcgcacacggggaagaagagttggatcgtcagctttgatggcgtcaacaacctggacgaggctaggcaaatagttggttcagctgtacttgtgaaagctcgagatagaccagaaattgaggatgatgaattctattcacttgaccttgttggaatgagagttattgtcaaggatacaggcaagctcgtaggaacagttggtcaggttttcaatttcggaggtggagatcttctacaggtgataatgggctcttctgagggtactgctgttgatccagattcagaaaatcaagattcaatttcatcacgtgagcatgtgtggattccatttgctgaagatattgtacctgatgttgatatggcaagcagagaaatgcggattacacctccgaaggggttacttgagctcaattctcgttctgacaagagatcgaagaaagaaaggcgtgcgatggttaggagtggaaggacaggaaaaggtttcaacgtcgtgtaattgcaggaaagaaggtactctccgaaatggaccaagtccatgttctggaaggtttggtatcaggggacaaggtccaaaaggcatcacttgcagagcagattgggagcattgactttcaattgttccgacatgcagtacattgtgttagcaagcagattgagagctcttcaatgaatttgctcgctaactcttcactgtcaaggaaaaaagtgatcaaaataccatacaagactctcatcaaccttggggacaaagctgaacatgcattcagtactgaatttaaaaatggacttgacattcttttgaagtccaaagcagctattgtgcttgttagaaacggctctgactctgatactgagtttctgagtttgctcaattcttttagtgaattaatgaaggttgtagaaaataaagtttctccccctttaattgtcattgccccagctggtcatgtggagtcagttcggaaatgcctggtagagaatgactattttggttttgacactcaaaaggtgggtgctggaagaggtggagcttccagttgtcagtatatgctcggagggaaacagaaaaaaagttctgatgaagtctccctgggagataataaaaaagccaacaggttctggagcaatcttcagcttactgttatcaaacaaaattttggaaaccctcaatgaaatgggtgtacagtatacacagatctgcagctcatccaacaaaccaatcatcgggcatcctttgctctttggggctgtcgcttcccgcggggctgatgttggcatccaggtctccaagaccggtgaaacattagacgatttcgacgtgatcctttccatcgaccagctgaacaagatgtgccgagatgtcacccagatcaggttctccgctcgctccgaacagaacgtgcacgtcgagcatgtcgacgggcagtgggtcgccgtccagccggaggtggcaaattcccatcgcctgcatgccgaggttacgagtgtcttagactcttgcgctcctgataagctgtgtgtcatggagattgttgagcaataaaagtttcttgcctgtgtactgtacataatcacaagtacttgatagatgcgtgaggtttttcttctgctattgttttgctatgaatttttaggggagcatctacgaaggggaataccagccacccactgccaattctactggtcccagaaggattaaaaacttgttagaggataaggtcgtcctctactcaatccaacagcgatctctaaacag

SEQ ID NO: 213011 - DNA, 2163 bp, Zea Mays
gtctggatcctcctatccaattccgtctcgcgttcctctcgtcggctcgtcgctctccgagccgcgaaatggcgcctcctacctctgcatcggcgcggccgctatccctccccctcaccgtccctctctcctgtcaccgctcccacttgctccccgcgcccaacgctcgcctcctcacccggcgccgcgtcgcgctcgcgccgacccggcctggcgccacgctcctatccagcctcagtgacgcccgggaggaggaggaggatgaaagtggtttctatgaggaggatgagcaacaggaattcgaggatgaggaggaacaggggtacgacggggagaacgaggagctggtcgaggtgggatacgtgtcaggcgcgcacggggtgcgcggcgacgtcctcgtcacgccacgcaccgactttccggagctccgccttgccacgccggggacgagatggctgagggctcgagctgctggcaagcagcaggtcagggaattcgagcttgttcggggaagggcgcacacggggaagaagagttggatcgtcagctttgatggcgtcaacaacctggacgaggctaggcaaatagttggttcagctgtacttgtgaaagctcgagatagaccagaaattgaggatgatgaattctattcacttgaccttgttggaatgagagttattgtcaaggatacaggcaagctcgtaggaacagttggtcaggttttcaatttcggaggtggagatcttctacaggtgataatgggctcttctgaggagaaatgcggattacacctccgaaggggttacttgagctcaattctcgttctgacaagagatcgaagaaagaaaggcgtgcgatggttaggagtggaaggacaggaaaaggtttcaacgtcgtgtaattgcaggaaagaaggtactctccgaaatggaccaagtccatgttctggaaggtttggtatcaggggacaaggtccaaaaggcatcacttgcagagcagattgggagcattgactttcaattgttccgacatgcagtacattgtgttagcaagcagattgagagctcttcaatgaatttgctcgctaactcttcactgtcaaggaaaaaagtgatcaaaataccatacaagactctcatcaaccttggggacaaagctgaacatgcattcagtactgaatttaaaaatggacttgacattcttttgaagtccaaagcagctattgtgcttgttagaaacggctctgactctgatactgagtttctgagtttgctcaattcttttagtgaattaatgaaggttgtagaaaataaagtttctccccctttaattgtcattgccccagctggtcatgtggagtcagttcggaaatgcctggtagagaatgactattttggttttgacactcaaaaggtgtgggtgctggaagaggtggagcttccagttgtcagtatatgctcggagggaaacagaaaaaaagttctgatgaagtctccctgggagataataaaaaagccaacaggttctggagcaatcttcagcttactgttatcaaacaaaattttggaaaccctcaatgaaatgggtgtacagtatacacagatctgcagctcatccaacaaaccaatcatcgggcatcctttgctctttggggctgtcgcttcccgcggggctgatgttggcatccaggtctccaagaccggtgaaacattagacgatttcgacgtgatcctttccatcgaccagctgaacaagatgtgccgagatgtcacccagatcaggttctccgctcgctccgaacagaacgtgcacgtcgagcatgtcgacgggcagtgggtcgccgtccagccggaggtggcaaattcccatcgcctgcatgccgaggttacgagtgtcttagactcttgcgctcctgataagctgtgtgtcatggagattgttgagcaataaaagtttcttgcctgtgtactgtacataatcacaagtacttgatagatgcgtgaggtttttcttctgctattgttttgctatgaatttttaggggagcatctacgaaggggaataccagccacccactgccaattctactggtcccagaaggattaaaaacttgttagaggataaggtcgtcctctactcaatccaacagcgatctctaaacag

SEQ ID NO: 213012 - DNA, 2136 bp, Zea Mays
gtctggatcctcctatccaattccgtctcgcgttcctctcgtcggctcgtcgctctccgagccgcgaaatggcgcctcctacctctgcatcggcgcggccgctatccctccccctcaccgtccctctctcctgtcaccgctcccacttgctccccgcgcccaacgctcgcctcctcacccggcgccgcgtcgcgctcgcgccgacccggcctggcgccacgctcctatccagcctcagtgacgcccgggaggaggaggaggatgaaagtggtttctatgaggaggatgagcaacaggaattcgaggatgaggaggaacaggggtacgacggggagaacgaggagctggtcgaggtgggatacgtgtcaggcgcgcacggggtgcgcggcgacgtcctcgtcacgccacgcaccgactttccggagctccgccttgccacgccggggacgagatggctgagggctcgagctgctggcaagcagcaggtcagggaattcgagcttgttcggggaagggcgcacacggggaagaagagttggatcgtcagctttgatggcgtcaacaacctggacgaggctaggcaaatagttggttcagctgtacttgtgaaagctcgagatagaccagaaattgaggatgatgaattctattcacttgaccttgttggaatgagagttattgtcaaggatacaggcaagctcgtaggaacagttggtcaggttttcaatttcggaggtggagatcttctacagagaaatgcggattacacctccgaaggggttacttgagctcaattctcgttctgacaagagatcgaagaaagaaaggcgtgcgatggagtggaaggacaggaaaaggtttcaacgtcgtgtaattgcaggaaagaaggtactctccgaaatggaccaagtccatgttctggaaggtttggtatcaggggacaaggtccaaaaggcatcacttgcagagcagattgggagcattgactttcaattgttccgacatgcagtacattgtgttagcaagcagattgagagctcttcaatgaatttgctcgctaactcttcactgtcaaggaaaaaagtgatcaaaataccatacaagactctcatcaaccttggggacaaagctgaacatgcattcagtactgaatttaaaaatggacttgacattcttttgaagtccaaagcagctattgtgcttgttagaaacggctctgactctgatactgagtttctgagtttgctcaattcttttagtgaattaatgaaggttgtagaaaataaagtttctccccctttaattgtcattgccccagctggtcatgtggagtcagttcggaaatgcctggtagagaatgactattttggttttgacactcaaaaggtgtgggtgctggaagaggtggagcttccagttgtcagtatatgctcggagggaaacagaaaaaaagttctgatgaagtctccctgggagataataaaaaagccaacaggttctggagcaatcttcagcttactgttatcaaacaaaattttggaaaccctcaatgaaatgggtgtacagtatacacagatctgcagctcatccaacaaaccaatcatcgggcatcctttgctctttggggctgtcgcttcccgcggggctgatgttggcatccaggtctccaagaccggtgaaacattagacgatttcgacgtgatcctttccatcgaccagctgaacaagatgtgccgagatgtcacccagatcaggttctccgctcgctccgaacagaacgtgcacgtcgagcatgtcgacgggcagtgggtcgccgtccagccggaggtggcaaattcccatcgcctgcatgccgaggttacgagtgtcttagactcttgcgctcctgataagctgtgtgtcatggagattgttgagcaataaaagtttcttgcctgtgtactgtacataatcacaagtacttgatagatgcgtgaggtttttcttctgctattgttttgctatgaatttttaggggagcatctacgaaggggaataccagccacccactgccaattctactggtcccagaaggattaaaaacttgttagaggataaggtcgtcctctactcaatccaacagcgatctctaaacag

SEQ ID NO: 213013 - DNA, 632 bp, Zea Mays
ccacgataacccagtatacgaaggttatggacaactatggtaaaggcaggccttcagtcatgaaaactaccaggctgctgcttgatgaagatggctggaggggattctatagaggttttggaccgaggtttcttaacatgtctgtctggggcacatcaatgatcgtgacatatgagctcataaaaaggctatccgtgaagtctgaatgacacattttggtggattctcaactaaggtgatttactgttcaaaatcatctatacagatataggcaatcaagtcagtttgcctcgcgaagagtataggcgagtattatgatcgggtgggatgcagaattatggtttagttgcataggataacatgcttctgtatgacacttgcgatgtatatatttttgctaaagagccctcctttcaggatgtttgtagccagcttcttttggatgtaacagatggaggccaagacgcctgttctgtctaatgaggcacattatatgtagctgtactattcgtggtccaacaaaattttggcaaagaactctgcatccttttcgtttgttgttgtgctaaagggctctccggtcgtcgtcgccgtcctgcttacatttttcttaggatctaccgagattgttc

SEQ ID NO: 213014 - DNA, 674 bp, Zea Mays
gtgccatgttctgcatagtattctgtgcagttatttgattgattcacattttcaaatgatcggttgaaactctgttatgcttgactagactgaatctagattgtttactaaaattgggcatgggttttaattgtagtggtttgtagctatctgtcattgtacactgattcaagtgacaacgatttcttttctgtggatgcattttagtaggattggccaccaaggtcgtggagtatatgttgcccaattttaatgaggtctggtgggatatcattaccttagatatcttgatatgcaaatagtttggtgtttggactggaatgcgcacagtctgttactttgatggcaaaacgcaacgaagtaccatgggtaaggatgtgctggagaatgaaagcttctgtcttaaaacaataggatacaagaagcttgcaagtggttttgtgaaggcttttgtgaatcacttgaatcattagttcttttaagaatggttttgtaaagcgttagcaaatatgtgtaaaacacaataagatgtgtggcaaagtcagtgatctagttgtacagttttttatgtttatgtgatatgtggatatttcattgtgcaatgttaatgaactgtgtatgtctatgtgattatgtgtataaaatatatgttttgtggtgcttttgtgataata

SEQ ID NO: 213015 - DNA, 480 bp, Zea Mays
cacatgtcagtttccagcaaggattggccaccaaggtcgtggagtatatgttgcccaattttaatgaggtctggtgggatatcattaccttagatatcttgatatgcaaatagtttggtgtttggactggaatgcgcacagtctgttactttgatggcaaaacgcaacgaagtaccatgggatgtgctggagaatgaaagcttctgtcttaaaacaataggatacaagaagcttgcaagtggttttgtgaaggcttttgtgaatcacttgaatcattagttcttttaagaatggttttgtaaagcgttagcaaatatgtgtaaaacacaataagatgtgtggcaaagtcagtgatctagttgtacagttttttatgtttatgtgatatgtggatatttcattgtgcaatgttaatgaactgtgtatgtctatgtgattatgtgtataaaatatatgttttgtggtgcttttgtgataata

SEQ ID NO: 213016 - DNA, 441 bp, Zea Mays
atcacatgtcagtttccagcaagtaggattggccaccaaggtcgtggagtatatgttgcccaattttaatgaggtgtttggactggaatgcgcacagtctgttactttgatggcaaaacgcaacgaagtaccatgggtaaggatgtgctggagaatgaaagcttctgtcttaaaacaataggatacaagaagcttgcaagtggttttgtgaaggcttttgtgaatcacttgaatcattagttcttttaagaatggttttgtaaagcgttagcaaatatgtgtaaaacacaataagatgtgtggcaaagtcagtgatctagttgtacagttttttatgtttatgtgatatgtggatatttcattgtgcaatgttaatgaactgtgtatgtctatgtgattatgtgtataaaatatatgttttgtggtgcttttgtgataata

SEQ ID NO: 213017 - DNA, 487 bp, Zea Mays
atcacatgtcagtttccagcaaggattggccaccaaggtcgtggagtatatgttgcccaattttaatgaggtctggtgggatatcattaccttagatatcttgatatgcaaatagtttggtgtttggactggaatgcgcacagtctgttactttgatggcaaaacgcaacgaagtaccatgggtaaggatgtgctggagaatgaaagcttctgtcttaaaacaataggatacaagaagcttgcaagtggttttgtgaaggcttttgtgaatcacttgaatcattagttcttttaagaatggttttgtaaagcgttagcaaatatgtgtaaaacacaataagatgtgtggcaaagtcagtgatctagttgtacagttttttatgtttatgtgatatgtggatatttcattgtgcaatgttaatgaactgtgtatgtctatgtgattatgtgtataaaatatatgttttgtggtgcttttgtgataata

SEQ ID NO: 213018 - DNA, 439 bp, Zea Mays
tggatcacatgtcagtttccagcaagtaggattggccaccaaggtcgtggagtatatgttgcccaattttaatgaggtgtttggactggaatgcgcacagtctgttactttgatggcaaaacgcaacgaagtaccatgggatgtgctggagaatgaaagcttctgtcttaaaacaataggatacaagaagcttgcaagtggttttgtgaaggcttttgtgaatcacttgaatcattagttcttttaagaatggttttgtaaagcgttagcaaatatgtgtaaaacacaataagatgtgtggcaaagtcagtgatctagttgtacagttttttatgtttatgtgatatgtggatatttcattgtgcaatgttaatgaactgtgtatgtctatgtgattatgtgtataaaatatatgttttgtggtgcttttgtgataata

SEQ ID NO: 213019 - DNA, 852 bp, Zea Mays
ggtggatcacatgtcagtttccagcaagtaggattggccaccaaggtcgtggagtatatgttgcccaattttaatgaggtctggtgggatatcattaccttagatatcttgatatgcaaatagtttggtgagacatttgaagataattaatgttcatgtcacaaacattcagttaccttgtttatattaatgtgatgtgcaataagttagaattaagcagccgacatgccctccgcttgcttgattttatacaatttctttacatcagatatatatctattagtcagaaaggaaataaaaactaatacatatttgacatacttctgacatcacattttgtttgactatactatttaatgttatgccacttgtcaaatatgcatggtcttgggaatccaagaagaattgttggcatttgtaataacattatttggtaatgatagttctaggttttctacttaaacaacaattatttttgatgcaggtgtttggactggaatgcgcacagtctgttactttgatggcaaaacgcaacgaagtaccatgggtaaggatgtgctggagaatgaaagcttctgtcttaaaacaataggatacaagaagcttgcaagtggttttgtgaaggcttttgtgaatcacttgaatcattagttcttttaagaatggttttgtaaagcgttagcaaatatgtgtaaaacacaataagatgtgtggcaaagtcagtgatctagttgtacagttttttatgtttatgtgatatgtggatatttcattgtgcaatgttaatgaactgtgtatgtctatgtgattatgtgtataaaatatatgttttgtggtgcttttgtgataata

SEQ ID NO: 213020 - DNA, 920 bp, Zea Mays
gaggtggatcacatgtcagtttccagcaagtggtttgtagctatctgtcattgtacactgattcaagtgacaacgatttcttttctgtggatgcattttagtaggattggccaccaaggtcgtggagtatatgttgcccaattttaatgaggtctggtgggatatcattaccttagatatcttgatatgcaaatagtttggtgagacatttgaagataattaatgttcatgtcacaaacattcagttaccttgtttatattaatgtgatgtgcaataagttagaattaagcagccgacatgccctccgcttgcttgattttatacaatttctttacatcagatatatatctattagtcagaaaggaaataaaaactaatacatatttgacatacttctgacatcacattttgtttgactatactatttaatgttatgccacttgtcaaatatgcatggtcttgggaatccaagaagaattgttggcatttgtaataacattatttggtaatgatagttctaggttttctacttaaacaacaattatttttgatgcaggtgtttggactggaatgcgcacagtctgttactttgatggcaaaacgcaacgaagtaccatgggatgtgctggagaatgaaagcttctgtcttaaaacaataggatacaagaagcttgcaagtggttttgtgaaggcttttgtgaatcacttgaatcattagttcttttaagaatggttttgtaaagcgttagcaaatatgtgtaaaacacaataagatgtgtggcaaagtcagtgatctagttgtacagttttttatgtttatgtgatatgtggatatttcattgtgcaatgttaatgaactgtgtatgtctatgtgattatgtgtataaaatatatgttttgtggtgcttttgtgataata

SEQ ID NO: 213021 - DNA, 500 bp, Zea Mays
aaggaggtggatcacatgtcagtttccagcaagtaggattggccaccaaggtcgtggagtatatgttgcccaattttaatgaggtctggtgggatatcattaccttagatatcttgatatgcaaatagtttggtgtttggactggaatgcgcacagtctgttactttgatggcaaaacgcaacgaagtaccatgggtaaggatgtgctggagaatgaaagcttctgtcttaaaacaataggatacaagaagcttgcaagtggttttgtgaaggcttttgtgaatcacttgaatcattagttcttttaagaatggttttgtaaagcgttagcaaatatgtgtaaaacacaataagatgtgtggcaaagtcagtgatctagttgtacagttttttatgtttatgtgatatgtggatatttcattgtgcaatgttaatgaactgtgtatgtctatgtgattatgtgtataaaatatatgttttgtggtgcttttgtgataata

SEQ ID NO: 213022 - DNA, 402 bp, Zea Mays
taaggaggtggatcacatgtcagtttccagcaaggtgtttggactggaatgcgcacagtctgttactttgatggcaaaacgcaacgaagtaccatgggtaaggatgtgctggagaatgaaagcttctgtcttaaaacaataggatacaagaagcttgcaagtggttttgtgaaggcttttgtgaatcacttgaatcattagttcttttaagaatggttttgtaaagcgttagcaaatatgtgtaaaacacaataagatgtgtggcaaagtcagtgatctagttgtacagttttttatgtttatgtgatatgtggatatttcattgtgcaatgttaatgaactgtgtatgtctatgtgattatgtgtataaaatatatgttttgtggtgcttttgtgataata

SEQ ID NO: 213023 - DNA, 397 bp, Zea Mays
taaggaggtggatcacatgtcagtttccagcaaggtgtttggactggaatgcgcacagtctgttactttgatggcaaaacgcaacgaagtaccatgggatgtgctggagaatgaaagcttctgtcttaaaacaataggatacaagaagcttgcaagtggttttgtgaaggcttttgtgaatcacttgaatcattagttcttttaagaatggttttgtaaagcgttagcaaatatgtgtaaaacacaataagatgtgtggcaaagtcagtgatctagttgtacagttttttatgtttatgtgatatgtggatatttcattgtgcaatgttaatgaactgtgtatgtctatgtgattatgtgtataaaatatatgttttgtggtgcttttgtgataata

SEQ ID NO: 213024 - DNA, 2890 bp, Zea Mays
tgctggacacaagcctaaaccgagcagtgcgtgcttatcgttcaagtagagcacggagctagagagtgtagctagcacgcacagaagcaaaccaaaactgccatgctctcatacctacaccaggtgttgtagtaagcctgtgaagtgaggtgacacaggccgggagaagagcgagcgagagagaggagaaaagatacacagatagctagatcgacatgccgcctgagctggagcaccatgagcagcagacagccggaggtggtggccaccgagcgcctcctcctcccccgaacagcatgcccacctttagtagcagcactccctcttctacttgtgtttctgccaccaccaacccctctggcggcgccggcgctgtccatcccaccacctccagcccggcgtcgtcggcttccgcccgccctgccgtcaactcattccctctcgtcctaaagttcgaggaggtggcgtacaaggtgaagctcgggaagccgacgacgacgacggccggatggtgcgacaagctgtcggcggccgcggcgagcatggcggtcggcggcggaaggaagaagaaggccaccgcggcggcggctgggtcttcgccgtcgtctccggcagcgttgcgggagaagacgaggaccatcatcagcggcatgtccggggtggtgcggccgggcgagatgctggcgatgctgggcccgtcggggagcggcaagacgacgctgctgacggcgctgggcgggcggcacggcggcggcgggcgcgcgctgctgtccggcaagatcacgtacaacgggcagcccttctcgggcggggtgcggcggcgcacggggttcgtgacgcagcacgacgttctgtacccgcacctgacggtggcggagacgctgtggtacgcggcggcgctgcggctgccgcgggcgctgggcgcgggcgagaagcgcgcgcgggcggaggcggtggcgcgggacctgggcctgggcaaggtggccggcagcatggtgggcggggtgcgcggcgtgcgggggctgtcgggcggcgagcgcaagcgcgtcagcatcgggctggaggtgctggtggacccgagcctgctgctgctggacgagcccacgtcggggctggactccaccacggccgcccgcatcgtggccacgctccgccggatggcggccgagggcgggcgcaccgtcgtggtcaccatccaccagccgtcgtcgcggctctaccacatgttcgacaaggtgctgctgctgtccgccgacggccgccccatctactacggccgcgccgccgacgcgctctcctacttcgcctctgtcggcttcgcgtcgccgctctccctcaaccccgccgacctcatgctcgacctcgccaacggtatcgcgccgcagacgacgagcggcgacgggatggcggcgctgctggccggcggcggcgagggcgagcacaaggaggtgcgcggcaggctgtccgcggcgtacgagcggcacattgcgccggcggtgaagctggacgtctgcgcccgggaggcgacgcccggcgggcagcaggcggcgtcgcggcgcgcgtcgaaggcggcgtcggagtggacgacggggtggtggacgcagttcgcggtgctggtgcagcgcgggctcaaggagcggcgtcacgagtcgttcaacaagctgcgcgtgttccaggtgctgagcgtggcggcgctggcggggctgctgtggtggcgcacgccggcgtcgcacctgcaggaccggacggcgctcgtcttcttcttctccgtcttctggggcttcttcccgctctacaacgccgtgttcacgttcccgctggagcggcccatgctgctcaaggagcgggcctcggggatgtaccgcctgtcctcctacgtggcgtcgcgcgccgccaccgacctgcccatggagctgggcctgcccacggcgttcgtgctcatcctctactggatgggcgggctggacccgcgcccggggcccttcctgctctcgctcgccgtcgtgctctacagcgtgctggtggcgcagagcctcgggctcgccatcggcgccgtgctcatggacgtcaagcagggaaccacgctggcctccgtcatcaccatggtcttcctcatcgccggcgggtactacgtgcagcacatcccgcccttcgtcgcctggctcaggtggctcaactacagcttctactgctaccgcctcctgctcggcatccagttccccgacggcggagggtactacgactgcggccacggcgcgctctgccccgtcgccgagttcccggccatcaaggccgtcgggctcaacaaccactgggtcgacgcctgcgtcatggcgctcatgctcgtcggctaccgcgtcgtcgcgtacattgcgcttgaccgcctcaagcccaggtgaaacaagataagagaagagaagagaagggatcaattagtttagtgctctatgcataatacaaccagaggggatgaaatgaatacgatacaaacctgcagcagctgagctctctgttttactccattcacaagggtttccagaactcgtaagctttccttcggctcctacccagcttcccacagccatcgccgaatctcattctccggaacaaaagctccgcgtcgaatagaaccgaatccggtcgagctccgcgtgaccgagactctagactctggtctctggtgccctacccaccatggccatgccttgcagctctcaaacagtgttacgacagggcacgaagagacaatgtaacagaaatagattttctttccgtacaggagaatgtctatatgctattcttctgtaaccgaaacatatgctgctagctgctctgctcttctcaactcccagtgataccacggcatctccttgacataatatggctatag

SEQ ID NO: 213025 - DNA, 1571 bp, Zea Mays
aaacactttgatgttccaaaagataagcagcatcgtgagctctgcagtaacactagtcaaattttacgtaacttgcgtggttctcttcctgcgacggaagcaaacactgcccgagacatagacagcgggacgtcgagatggccgacggggaggacgccgccgccgcgcgccgccgggccgccatcacagactaccgcaagaagctgctcaactgcagggagctagagtcgcgcgtcggcaccgtgagagaaagccttaaaactgcaaagaaggattttaccaagactgaggacgacttaaagtctctgcagagtgtggggcaaataattggagaagtactccgacctcttgataatgaacgctttatcgtgaaggccagcagtggtccccgatacgtggtcggttgccgaagtaaagtggacaaggagaagttgacatctggtactcgtgttgtacttgacatgacgaccttgacaataatgcgcactcttccacgggaggtggatcctgtggtatataacatgcttcatgaagatccaggaaatgtcagttactctgctgtaggtggtctgtctgatcagattagagagctcagggagtccattgagttaccacttatgaatcctgaactctttcttcgggtgggaattaagcctcctaagggtgttctactctacggtcctccaggaactgggaagaccctattggcaagggctatcgcaagtaacatcgatgccaactttttgaagattgtttcaagtgctattatcgacaaatacattggagaaagtgctcgtttgattagagaaatgtttggctatgcacgtgaccaccaagtaaaaatgatcatggccacaaatcgacctgatgttctggacccggcgctcctgcgtcctggacgtttagataggaagattgaaattccgctacccaacgagcaatcaagaatggaagttctaaaaatccatgcagccggtatcgccaagcatggggagattgattatgaagcagtcgtgaaactagctgaaggtttcaatggggctgatcttcggaacgtgtgcaccgaagctggcatggctgcaattcgtgcagagagagattacgtagtccacgaagacttcatgaaggctgtgaggaagctaaatgatgcaaaaaagctggaatcgagtgcgcattacagtgcagattttggcaaagagtaatgatgctaatgccgatgcaacggacaaatgcatttggcatgtatcatcaggcgagcccagtcagatgcgatgcaaaagcgagaaaggaaccagctatttatgttcaggctacaggcagcttctctttttttccttctttctcgtattcacaattttagtgaggaggattgtcgagctgaccggtgggagaaaccagtcgagaatttagtagctttgcaccagatgccatttgcttctgtaaatcacacattatctgcttccgtgtgtagaatggtaataactcgtcccagctccatgtacttttgacagtgtgctcgacttgcgtggtaaaaacagagaaaagaacaatttgtgttcattctgagctac

SEQ ID NO: 213026 - DNA, 7530 bp, Zea Mays
cccgcgcttcctcgccacccggggtgctgggtgcacccgccgcctggagcccggaggagaggtgattatccagatcggcaatagatcaaatatggatccaggaaaatcaatagatgataaattcagcaagttgcatccaagttttccagtagacaccagaattggcatagttggagcagggccaagcggcttatcagcagcatatgcactagctaagctagggtatcacaatgtaaccgtgtttgagagatgtcataatgtttcagggatgtgcgagtccattgatatcgagggaaggacatatgatctgggaggacaagttatagcagcaaacagtgcccctgttataactcatctggcaaaggaactaggttctgaatttgaagacatggatacacacaagcttgctcttattgacagccaaacaggaaacattcgagatcttgaagttgctgaggactatgtatccatggtttctctaacgctaaaattacaggatgaggcaaataggtctggaggagtgggaattcatgcagtcagtggattggcctcagatccaactcttgactttttgatgcaacatggaataagttcaatgccaaaatctgtagtatatggttacactgcttctggctatggttttgttcaagacatgccctatgctttcatacatgagtttactagaacctctatggctggcaagatccgacgtttcaagcatggttacatgagtctgtgggataaacttagtcagtcattaccatttgaagttctttgtggcacggaggttctcagagtcaagcgtaacaactgtgtcgcaagtgtaattatcaagaacaacaatgatgatgtagaagttagggagtttgacaaaattatattgtcaggggctcttcctttcaaaaatgggaaaacatatcgttctttaagtatgactgatggagaaaatgaagtggtagaactgaatgatcttgaaagagagctattcagtaaggtacagacaattgactactatactactgttgttaagattgaaggatttgagcacataccaaagggctttttctacttcggggaatacatggaggatccaacaacagtaggacatccagtggcaatgcaaagattctttgctgacacaaatattttcttgttctggtcttatggaaattcagcggacatcaaggagtcatatgtggctaaatgtgtaaccaatgttgtgacatctatgggaggaactgtccagagagtgcttttacagcgacgatttaaatatttccctcatgtcagcagtgaagacatgaaaaatggattctacgagaaggtggagtctcagctgcaaggttttcagaacacttactttgttggaggcctgctagcgtttgagctaactgaaagaaatgcattttactccatttcatctgtttgtaaacactttgccattgccagtgagctaccaaaggttccttatgttaagagacttttccccctatccaaaggaattccttcacctcctagagatattggtgaacttgaaggggttgaattcccccatcttccatccctggatggatatttacaatactggggaactcatagagtcaccgcagagaagtttatctacacttggatcaatgaagaagggaagatcatgaatcgtagaacctaccaggagcttcatgataatgtatcttacattgcatataagctattgacaagcacaaagcctattatcaagcctggtgatagagttctccttattcatctacctggtttggagtttgttgatgcattctttggatgcatcagagcaggagttataccagtaccagttttgccccctgacccaatgcaaaggggtgggcaagcgcttctgaaagttgagaatgtttctaaggtgtgcaatgctgtggcaattctatccacctcttcataccatgctgctgtacgtgcaggctatatcaagaatattgtcactctaacgaagagtgctcagaaatgctcagctcagtggcctgacctcccatggattcacactgactcatggattaagaactatcgacgaagtccaggcagcttcaactcagaaagtgttgtgcctatgattaccaagccccaaccaagtgagttatgctttctacaattcacttcaggttccactggtgatgccaagggtgtgatgataacacatggtggactaatccacaatgtgaagatgatgaagaagcgatatagaagtacttcaaaaactgtccttatcagttggcttccacaataccatgacatgggtctaatagggggtcttttcactactcttgtaagtggaggaacttccattctattttcaccaatgacatttatcagaaacccccttatatggctcaaaacaataagtgactaccatggaacacacagtgcagggccaaactttgcatttgaattggttataagacggcttgagactgagaagaacaaaatgtatgacctctcttcaatggtctttctcatgattgccgcagagccagtaaggcaaaaaactgtcaaaaggttcatagagttgactcaacctttgggcttttctgaaggtgtacttgctcctggatatggcctggctgagaactgtgtctatgttagctgtgcttttggtgaatgcaagcccatttttatagactggcagggaagaatttgttgtgggtatgttgatacaaatgatacagatgttgtgatcagaattgttgatccggactatttgacagagcatcaagaggatggtgctgagggtgagatatggatcagcagttctagttctggagttggttattggaacaataaggaaacaagccagagaaccttttgcaattggctcaagaattaccctaacataaagtttacaaggactggtgatttaggacggatcattgatggtaaactttttattacaggaaggatcaaagatcttatcattgttgctggtagaaatatttattctgcagatgtagagaagacagtggaatgttcttctgatgttcttcgaccaggctgttgtgctgttgttggtgttcctgaggatgttttaacccagaaaggcatctcaatccctgattcttctgatcaggttgggcttgtcgtgatcgctgaggttagggagggtaaagtaatctctgaagagatcgtagacagtatcagaacacgtgtagcggaggagcatggtgtaactattgcatctgtcaagcttatcaagcctagaaccatatccaagacaacatctgggaaaatacggagatttgaatgcatgaagcaatttgtcgataatactcttagcttggcaagtggtagtcgtatatctaataagaagtctctttttcggtctctcactacaggaactggcatggacatcaggagacctttcttgaagcacactgttgatcctaccattcgccctcagcctagaagcaaagtgaaaaatctcatggagattattgagtttttaatgcagttagtatctgatcaaaaaggtatttcaaaggataaaatttccccaaatgacagcctaccttcttatggctttgactcaattgcagtggtccgagcagcacaaaagctctcagattttcttggtacacctgttggagcaatcgacatctttactgcaagcagcatttcagagcttgctaattccttggagaatctggtgcataagtcgcaaccacagctggcacctcaacctagaagcaaagtgaaaaggtccagtgacattattgagtttctaacagagatagtatcagatcaagcaggcgttccaaaggacaaaatttctccaactgatagtctaccttcttatggttttgattcaattgcagtggtccgagctgcccagaagctctcagattttcttggtattcctgttggagccattgacatttttacagcaagttgtattgctgatcttgccagttttttggagaatttggtgctcaagtcacaaccacagttaaaacctgatgtatctcactccgctgaagatgagaatctagttatcacagatgccactgatttagatcttagcgtgtttgctactgggatcctccaactcctggctcttacttatgtatgttttatcctgttacttccagcatatctcgcaagctcgatgtacaagagcatgatatcttcagtcagtctagtgaaatcatcactactgagctatcttagttctttggtcttggcacctgttgcatggatctgctatgccttgttcacttcattatccctgtctaccttggggaagccattccttcagccaaattatattctaacccctgatatttcaatatggtcagttgactttgtgaaatggtgggcattaaacaaggctcaatcattagcagcaaagatgctagctgtgcatctaaagggcacaatcttcttgaattattggttcaagatgcaaggagctcggattggttcacatgtcgtcattgatacagtagacatcacggacccatccttactagcagtcgcagatggtgcagtgatcgcagaaggtgttctcattcagagccatgaagtccgtaatgaagtgctgagtttcaggcatgtcaagattggtcggaaggcatcagttggcccttatgcggtgatccagaagggaactgttgtgcatggtggcgttgtcattccaccgttgcaaaaaactgagcaagggaaatcagcatatcctcctagcggagcttctgcttacacgaaggacgaagaagggacagcaaacatagcatttgaacacctcgttagcatctatgcagttggcttcttgggtgctttgtcgggtgcaacagtcttcatgttgtacacccgcttttcaggcacgacggcttcgcttcagcacttctcctttgcatgcgttgctggtgccttccattggttgccagctgtccttgccgcttatgccgtgattgtccgggagacaaagacaaccaagagcccagtggaatttgctctcttcattgccttcgcctacttaagttatgggatcatcgttagtcttctcgccagtgtcaccaacaaagctctggctacaaggtcagggaccaagaagaaggatgtagcacgtttgatccagcagcgcataaccatcgctgcacacctcagatttgcaaagatgatatccggtacagaagccttttgcatgtacttgaggcttcttggagcaaagattggcaggcattgctccatccgagccatcaacccggtggcagatcctcagctgatcagcatcggtgatggggtccatctaggtgatttctgcaacattgttccaggattctactcaaaggggtttaccagtgcagagataaaggtccgggacaacactgtggttggcagtggcagcttgctccttcctggctccgtcctccaagagaatgtcatcctgggagcactgtctgtcgccccacagggttcggttctccttcaaggtggcgtctatgtcggggcgcagtctctgaccttggtgaagaacacattgctcgcagaagatgaacggattgtggagatggacccgatgtataagaagattgttgggaaccttgccgcgaacctggccatcactaccatgaacgtcaaatcaagatacttccaccgcactggcgtcagcgggcggggggtcctgaggatgtaccaagacataccttcgctgactgagcacaagatatttggcgctggaaagtctttcccggtgattgtccggcacagcaacagcctcagcgcagatgacgacgccaggctcgacgctcgtggcgcagcagtgcggatcctctcggatgatggcgaggtgcctcttcttgacctcacactgaagagcggcaaggcgttttacgcgcgcacaatcgccgacttcgccacctggcttgtctgtggcctgccggcgagggaagaccaagtgaagcgtgcaccgcacatccgcgacgccgtctggggctcgttacggaacaccgattcgtacaccaagctccattactactccaacatatgccggctgctgcggttcgaggacggcaggcagatgtatgcaaagttcaagcttcgtcctgcggaccaagccatctcagaggactccggccaggtggtgccgcgtggcatcctgccgccggaaactggtgcgatcccgagggacgagggtgacacacgcccgctgctgttcctcgccgacgacttccgccggaaggtggagtctcccgagggggtgcgctatgtcttccagctgcagctcagggacgtccctgctgacagcgccactcgcgagatcgctctagactgcacacggccttgggacgaggacgagttcccgtacatcgaagtcggagagataagcattggcagcaatctctcagcagaggagacggagaagctcgagttcaacccgttcctgcggtgccaagaggtggacgtgatctcggcgacgtcctgcaagcagagcgcgtccatcgaccatggacgctcgctggtctacgagatctgccagcgcgtgcgaaacggcgagccactgccggcctcgtggcgggcgttcctcgagcagtcagacaccaagatcgacttgtcaggctgtccggtcatcgcggcgaagcgctcaagcccggacgtccgtcaagccaccaaggtgacgctggctcggacatggtaccaggcgctctgggccacgctgtgccagccactgctgcagactctcgtgccctacttcgtcgtgggcctagtcatcttcctccccctccgtggcctcctcgccaccatggccgccggcgtgccgctctactggactctgcccatcttctgggccacgtcaggcgtcgccgcgatgggtgcctgtgccgcagcgaagtgggccctggttggcaggcgggccgacggtgacacggtgcacatctgggcgccgcccgtgttcctggacacggtctggcaggccgtgcgcacggcgaccgaggagtacttcgcggagctgacgcccgggtccgtgctgttcgcttggtggatgcgggcgatgggcgcgtccgtggccgtgtccgacggcgtgtacgtggactccacgggggcgctgctgaacccggagatggtgcacctggagcgcggcgcgagcgtggggcgggacgccttgctgttcggccacgtgtacgagggcgagggcggggaggtgaagtttggcagggtccacgtgggcgaggacgggttcgtcggcagccgcgcggtggccatgccgggcgtcagggtcgacgacggtggctgcctcggtgccctgcggctggccatgaaggaggagatcgtgatgaacaggacgtagccatgtaggacggcaaaagctgaaggcctcgtcatagcagttaagcattttcttctccttttgagggtttgttgcagcagctgctgctgctgtttttacaattttatcgagtactattcgctggtacttgtagtcttgtacccattggatcatagtatagctataataatatgatcaataagtggctggacataaataag

SEQ ID NO: 213027 - DNA, 1621 bp, Zea Mays
gttattttcagccttatccagccaccatccgtggcttatcctcacgtacgtagctcctggaattctcaagaagccaccgtaggtctctggtgcctatctcacatcgtgcttgactccccacgttcgaaccccatgaccagcgcagctcggccagggcgctggatcccgctggccatggcgctcatccctccctgctgttagatgcacagaacgtctctagctctccatagatggcagccagctgcgccctcacctcctcccatggtgacctcgcccatggcggctccccctgctcggcgtactcccctctgcaggagctcgcccagcccctctctgctggtgaccgagccatctccctggacacaccccttcccttgctacttcctatggttgccctagccgacctctcccatggcgtaggaaacagcagcacctccctccatggacgtcctaggtcctcgccatactctccgtcgacctcgtcatcaccacggccacaacctctcttccgtcgttgtggagaccccgtcagcctcgcgtgctgtccgatccttgcgtcgcgcccagggaggttacatggaagaagaagaaaagcccagagcgatgctccccatgtgctcgacgaaaagccagaacgggagatcatctgttttttttgtggaattcgcgtcgaatttattaacgaaatattaggatgtttgggtgaagaagaaggttacgccccctgttcctcctttccatggttccccacggcagcggcaggaaacatccccacaccagacgccgagatccatgccagtggctcgatcttcctcaacgttggctgcctctccgacctcgctgtggacctgctgctcaccgccgcgtgtgcactttttcctccgagcagcagccccggatctgcgcagccccggccttattatcgacctcagacaagagctggattaatcacaagacgatgttgatggacgaagctaaagtggacggatcaaccaagtgccagaatgggagatactcaccaagtgattatcatttaacaacactaacgtagtgttatcccagggttttattccctgttgttttcaggttataattttgttctgttgtggatggtgctaagtgtcggtgggctcggccttcttatataagtatatcccatctttagcttctttattgaggattgtcacttaagctagcatgtattttaaaacttataaatgttttatacattcaaattgtaatcttttgaatcaatttctcttgtaatcactccgatgatatattgtaatattgctataacttgtaaatgttgtaacttgtaatcattttgtaataaagaatttatttccgctgcaagtgtttgtatgtgagttgtgtttacttaatcctgcgatcttggcggtaagtcatttatccggggtcctcggggcacttggacagatcctgttaagttgtttggtgcacatgtatagccgtctgaggtctttgagacaaggactggtgcatgtgggcccgataacttgggaggttctacgacaattaacaaagatgaacttaaattgaatcgtcgcacgacgaagcgcgcgacacagcacatcgactaaactaaaattgaaaaagg

SEQ ID NO: 213028 - DNA, 3506 bp, Zea Mays
aggacaatggttggatagagagcgtgatacacatccgtcccttctagtctcctaataactagtttctatcttgctccccaaaccagcgcaaaccctgccctgacaccggcagcgacacgtccaccggcggcgccatggtgctcgaggcaacgatgatctgcatagacaattcggaatggatgcggaacggcgactacgctccgtcgcggttccaggcgcaggccgatgccgtcaacctcatctgcggcgccaagacccagtcaaacccggagaacacggtaggcgtgatgacaatggccgggaagggtgttcgcgtgcttgtcactcccaccagcgacctcgggaagattctcgcctgtatgcacgggttagaagttggcgctgaggcaaacttggctgcggcaatccaggttgcccagcttgctctaaagcatcgccagaacaagaggcagcagcagaggattatagctttcattggaagtcctgtgaagtacgacaagaaagttttggagaccattgggaagaagctgaaaaagaacaatgttgctcttgacattgttgactttggtgaatccgatgatgaaaaacctgagaaactggaagcattgattgctgctgttaacagcagtgatagcagtcacattgttcatatccctcctggtgaaaatgccctctctgatgtcctcctaagcactcctatatttactggtgaagaaggtggaagcggttttgctgcttccgcagcagctgccgcagctactggagcatctggatttgaatttggtgtggacccaaacgtagatccagaattggcacttgccctgcggttgtctatggaagaagagcgggcaaggcaagaggctattgcaaaaaaggctgctgaagatacttctaatacagaacataacaatgtcccaagctcaaacagtgattctgttatggctgaaggagaacctgcctcaaatgctgctgctggtgacaaagaacaaccaaaggatgatgacgatctactacagcaggcacttgcaatgtcaatggagggtggtgcttcaggatctgcagctgtgactgactctgctatggcagaagctggtgcagttgaccctgacttggcattggctcttcaaatgtctgtccaggatgcaaacatgtccagtgacactgatatgagtaaggtgtttgaagacagaacgtttgtgtcatctatccttaattcgcttcctggtgttgatcccaatgatccatctgttaaagatttgctggcatcgttgcacagccagggagagcaagagaagaaggaagacacgtcagacaaaacagaagacgataagaactgatatagccatgttcacgcttccatgcgtacaaagaaattaaagaccggtctccattgactgcgtttactctcttggtcgtggagtttgtttatcctcatataacggtgctttgattataacttaccgccgagggaatttgtattatgacactgcaacaatcttctctccatatatgttcaagggattttcgtgtttcaatgctctccatatatgttcaattgatttccgtgttacaagttctctttgcactgtttaatttgaagcgacacactatatattattttattttgaagcgacaaacaggaaattcgctctcgtgtaagccgatctggttagttattgtaagctgttgccctacaattttacagcgaccggcgaccagagaggcggctggcaaatatctggaatttacgcgcacttcgtagaagatgctagatgtctacgagcatgtccagcgtttctatattatgaaagcagaacgaaaacggcgtcagctaggccatccgtcgtctaaaattcaggctctctacgatacgggaagtcaggaaccttccggatggactccttcctcagccattgtagcttgcctcgcggcactggcggcggctccgcccggccagcacaaccgcagtcccagtcttctagacgaagcgaacgtgcgacaggaaaaacacggccgctgttggtcgaatccacgccggcgatgtcccctgccgccgcccaactgagtggtacaggtacatcgtacaccaatccatccgatctctaggcctaataccttggaacaagcaaaggggagcgatgcacgacgtcaatggaagactccgccggccaggaggtctgcgtcgttcttggcattggggacaacatcaagggcctcttggccacgctgtcgcgcgttgacgccatcatctcctatgattcgtcccctcgctcaacctgcatcctatcataccctatcccgtgccaagtccccgattcacggtggctgtgtggtagtcggtaatgctgcatatgaacttgggcgacattaagtgtgaggtgttctgcaaccaggtgccccgcacggcggagaacttcttggccctctgcgctagcggctactacgacagcactgtgttccaccgcaacatcaagggcttcatggtataaggcggcgaccccatcggttccggcaatgcagggcctccatctgggcaccaagttcgccgacgagttcagggagtcccaagcacactatgcagtgcaggagctaacagcagacccaacgccaacggcagccgattcttcatcacctacgccaagcagccgttctgaaaaaaaattgaacagagtcacccaagaatgtgcatgtatggaatgacagcttcagattaacgacaaccacaattttccaattgtgtggttttgatggagtcatgtatgggtaaccaggaggccatctaaataaatccgtatgcacttcaatcatgtgctaatgttgattgtacagtacatacatattaatatagtgattcatgatgtctcaacatttttagatggtaatcggtgcctgcaagtgtgagagtaaacttagcttataataccattactatcgtactacggtatcatgatttatgtttattctgtctagaatatctgatatagatataagtttttttctctcgaaaacgcaggagaactacgactcattatattaagaagataggaaaaaaaggcttgagaattacgcctcatgattcatcgcatttttcttggtcgttgttgcttcaaggataacagatgtggacgtcgtcgttgtgtagataatgggacctactcccccggcaggcgacacctcttgagtcgttgaagggacgcggcgctctgtttgcgtggaaggagtgtacggtcttcgctcaatcattgcgaaactgaacccaccaaattgcagaggggagttatgatagccaattattagttgtgagcaagacggagagaaaagagttttggtttatgtcaatctacatcttccatatctaatactccatctatttctttttagttgtcgctggataattcaattttgcactatccagcaacaactaaaacaaaacggagggaatattaaataatcatctttatcgtttatcttataatctttcgatttattatgacacatattataca

SEQ ID NO: 213029 - DNA, 2934 bp, Zea Mays
attcgatccgtgtgcgtcacaaatttcagagctgggacttcatttatgcagagtacgttgtagctgctggacatcatcatcgctcaattgtgtggcagatagcagaggattactcccattgtgaattcttgctcagactccccggatactgccctatgcctgctttccgtgatgtcattgatgttcctctggtggtcagaagattgcacagatctagaactgaggtgagaaaggaactagggatcgcaaatgatgttaaggtggtcattttcaactttggaggacagcctgccggatgggaactgaagaaagagtggttgcctgacggttggctatgtttggtatgtggtgcatctgatactcaagagctccctctaaatttcattaagcttgcaaaggatgcctacacacctgatttgatggcggcatctgactgcatgcttgggaaaatcggatatggcactgtgagtgaggctttggcttacaatctgccatttgtatttgttcgaagagattatttcaatgaggaaccatttttgcggaatatgcttgagcattatcaatgtggcattgagatgatacggagggatttacttactggccattggaaaccttatcttcaacgtgctatcacacttcaaccctgctatgatggtcccataaatggtggcaaggtagctgcacatatcctccaagatactgctgttgggaagaagtatatttctggaaagttgagcggagcaagacggttgcgtgatgccattgtgcttggctatcagcttcaaagggctcctgggagagatgtaggaattccttactggtattctcactctgagaaagaaattagtgttggcccagcgcccacatctcatgatatgaatggaagtgatgagtcatcgttcgaggactttgagatactccatggtgacatgcaaggcttaactgatactatgtcctttttgaagagtttatcagggcttgttggaaatgacttaagaagccctgagaagcaaactcgagagagggctgctgcttctgtgctctttgactgggaggaggaaatatatgttgcaagagcacctgggcgattagacgttatgggtggtatcgcagattactctggaagtcttgtattgcagatgcccatccgagaggcatgccatgttgctgttcagagaagtgaccctaccaaacagaagcaatggaagcatacacaggctagacaactagcaaatggaggagcagtaccagtgttacaaattgtatcctttggttctgaattaagtaatcgtgcacctacgtttgacatggacctttctgattttatggatggcgacaaaccaatatcttatgataatgtgaaggaatacttttctcgggatccatcccaaaaatgggctgcctatgttgctggaactatttttgtattgatggctgaactaggggtgcgctttaaagacagcatgagcattttggtttcttcatctgtccctgaaggcaaaggtgtctcctcttctgcatctgtggaggttgcttctatgtctgctatcgccgctgcctatggtttaaacattgctccaagggatcttgctttgctctgtcaaaaggttgagaatcgtgtcgtcggagctccttgtggagtaatggaccaaatgacatctgcttgtggagaagctaacaaactcctagcaatggtttgccagcctgcagaagtgaaggagttggttaacattccaactcatataagattttggggtcttgactctgggatacgtcatagtgttggtgggactgattatgggtctgtaagagtaggcacttacatgggccgcaagatgatcaagtgtgctgcatccaacctactttcagaattgttgctctcgtgtacgtctacgcaaccaggcgactcaagtcccgacgaatatgaaggacatggcgtcgacctcctgaaatctgaagcgtcaatggagtatctatgcaacttaccaccacataggtatgaagctgttttcgcgaaagaaattccggagacgatcactggcgatgcgtttttagagaagtatggagaccacaacgatgcggtaacagaagttgacccaaagcggtcttactgtgtcaaggctcctactagacatcccatatacgagaacttccgagtcgaggccttcaaagcgttgctaacagctgccaaaacagacgagcagctctcagcccttggagagctgatgttccagtgccactacagctacaacgcttgcgggctcggctctgacggcacagacaggctagtgaatctagttcaagaaatccggcacaggaagagctcgcgcgccggagggcccagcctgttcggcgcgaagatcaccggcggagggtccggcggctcggtctgcgtgatggggaagaactgcctgaaaagcagcgaggagatcctcgagatccagaagaggtacaaagcggcgactgggtacctcccgactgttttcgacggctcgtctcccggcgccggcaagtttgggtacctgaagattcggcgccggtccacgtcgccgtctgattgaagaagaagaagaaggaagagctctgctcggtcggccgtaccctcacggtcgtattgatcgtatcgtatcccacgcactacgcccaagatgccaataaatgggacagattgatcggcaataataatactagtagccatagaaaactctagtgataagctgcgaaacaacttgtatgtcgaagaaaatatttgaaaccatggtatctttgtggtcgatatctgaagtgagatgatgtgaatggctattggcgtatgttcatgtttgagctgtacggagaagaaaaggccgtatccaacaagagttcatctgcatagttacctcaaacacattatagaatgcactgaatataagagataagcaagctgataaatat

SEQ ID NO: 213030 - DNA, 3756 bp, Zea Mays
gttaaagccaaatccaccgagcggagactgccatcaatgtccgtatcgagtttgagatactctgcaagcaatggatcggcgcagctggccttggaagaagaaatcatctgatagatcatcaaatgcagatgcgttgcagaattctaatcatgctgaacaggaagataaagctccaaagtttgtgcaaatttcacctcaaacatattcacatcttactgagtcagaggaaaaagtaaaagttttagaagaaaatgtgaaggtcttgaatgaaaaactgtctgctgcacaatctgagatcacaactaaagatgctcttgtgaagcagcatgcaaaggttgctgaagaagcagtatcaggttgggagaaagctgaagcagaggcctccgcactgaaggttcagctagaaactgttacattgtctaagctagcagctgaagaaagaggtgctcatctggatggtgcattgaaagaatgcatgaagcaagtaaggactgttaaagaagaaggtgagcagaagctacatgatgtagtatttgcaaaaaccaaacagtgggagaagataaaggccgagttcgaagcaaaattacttgaatttgaacaggaactcataagggctggtgctgagaatgatgcactcacaagatcacttcaagaacgggcagaactattgatgaaaattgatgaggaaaaaggtcaagctgaagctgagatcgaaattttaaaaagcacaattcaatcaggtgaaagggagataaattcgctaaaatatgaattgcatgttgtctccaaagagcttgaaatccgcaatgaagaaaagaatatgagtgtgcgctcagctgatgtagcaactaaacagcaccaggaagatgtcaagaaaatatcaaaactcgaagctgaatgccaaagattacgcggccttgttcgaaagaagttacctggccctgctgcactagctcaaatgaaaatggaggtggagagcttgggtagagaatatggagaccacagagtacgaagatcccctgcaaagaattctagttttcatcggcctatgtctcctgttcctgattatgcaatggagaacatacatcacatgcagagagacaatgagtttctgactgctcgtttattaacaatggaagaagaaaccaagatgcttaaagaggcattggcaaagagaaacagtgagctgcaatcttcaagaagcatgtatgctaagacaacaggaaagctccgaagcttggaagttcaaatgttgactggaaacaaacataagagtccatcaactccaaacatggatattcactttgatggtgcatttagccaaaatggaagcaacccacctagcatgacttccatgtctgaagatggggtagatgatgaaggaagttgtacagaatcttggaccaatgctctggtatctgagccctgtcaattcaaaaaagagaaggcagccaagagcagcacgacagaaagctccaataggttggagctcatggatgacttcttagagatggagagattagcatgtctgtcttctgaagttaatggcaatggcagtactgttgacaagatgaaggtagacaatgttggggctacttttgctggctttactgaaagagatggtgttaaagatttgcagtcagcttcaccaatgtcagaaactccatctaataaacagtgtctgtctgagaaatctccgcttttgaatttccagtcaagaatatcttccttactggattctgaatcaccagagaataatgctggaaaggtacttgatagcatcagaaacattctaaaggatattgaagatgaggcagattcggtgaatgtaaatgggactcatccttcagatgggaccttaagttcagagagcaaatttgccatggatcaagatcttaagaatgccatattgaaaattctagactttgtgaagttacttgatcaagaaatctccaagtttcaaggccagtcacctgattatgatggactatgtgagaaaacacaacagttctctgcattagtcgataaagttctgtcaaacgttgatgttctaaatgatattgtcatagcactgtctgttatcttgtcagaaactagccagattaagttcacattgttgagagacaatagcaatgaagcagaaagtaataacttagattgtgttgataaagtgactctacttgaaaataaggtgcagcttgagccagtaaaagacaatgttcctggtatctgcccactgttgcctcattcatcttctgatcctgagtttgaggggcctgctgatgctagattcgatgttaagactgcagtgaaggtgtactcgccggaggaatatgaacaacttaaatctgagaaggcaaatttggagggagaactagcaaagtgcaacaaaataatagaagaaacaatggctaggttaagtgatatggagaaaaaactggaagacctgacatctaagttggctgacagtgagaaatcaaatagcttgaatgagacacagttgaagtgtatggctgaatcctacaagtcacttgaatcaaggaaaattgaattagaaaatgagatagaagcgttacggtccagaatagatgctctaacagctgaactctttgatgaaagacagagtcatcaggaggacttagttaaatacagagatctcgaggagaagatggaaaggtatgagatggagaggagttcaattcttgtggatgaggacccagacaacaagtcaaagcaggagagagagatagcggctgcagcagaaaagctggcagagtgccaggagaccatattgattcttggccgtcagctgcaagctatgcgtcctccagccgagtcgctaggctcttcacctaatcggcaacgcatggaggagtttctgaaggatgcggcaggaacaaccgcaggagaatatttccagaaaccttcaggccaacctgatacagaccaggatatgcttgggacaggaaatgtgtctccgatcagtgggtacaagacacacatgatcccttctgatgcggacgttagccctttcccttctccaaacacctccaagcgcccgaagcatcgatcgagatcctcttcgtcttcctcattcaccaaccaccagttgccagacaaacagaaccgaggattcagtcggttcttcgcgaagagcaaagagtgaaactattccggatcgcggtgttaggtttgttgatttttggcgccaattgggtgggatggtggtcatgaatttctgtagagctagtgagggatgcttgcttgtgcgttctctcaggtcaggtgattcctttgggttgctggaataatactcagcttgcagtcgagcgggttgtggcgagagtgtgtgggggaatatttaagttgtcagtctcttctgctagagcttttctgggtttctgtgtgctcgaaacctcactaaaacctcactgtacatgtgcttacttgcttgaaggagcttggctgttggtttgtgtttaatcctcttgtgaattagcccgtgtattgtgcttgtactggtttggtgtacaattaacctgcgcccatttcaagggtattgatgtcttccctcggttctaaaattgactcttccatctttgcgtctatttgttttaatctcaaaatctcttttaatccctcctaaccctctcaaatccacgtgggatatgaataaaacaagaccttaaatgtcattcttctatcccaataagtaaaatattttttttaactttgattaaatatatctaaaaaact

SEQ ID NO: 213031 - DNA, 3100 bp, Zea Mays
gcggaaacttccacgaccacccgcgctctcttcgggttcggacccgaccgcacgcggttcaacgagttggtttctggtttctctccttctagcaccactgccgagtgccgaggcaaaaccctagctcacctccatggatagccacggccacgtctctggcggcaagcgcaagggcaagcgcgcccgcaagccggagccgccggtactcgcctctcccgacaacagccacgaccacaagcaccacgacaccgcaccatcctcctcgcccctctccaccgccgccgtcgcggcgtcagactccccggaccccgagccggcgtcatcctccccagctccccgccgccggggccgcaagtcccgccgcatccgcaacgggacccactccgaggtcgatgccgccccctcaccctcgcctccgccgcgtcggggcgggcctaagggggcgccgaacggtgcggtggacgttgcggagccgtctcggcgggagctggcggttaagatggtggaggttcccgcggcggtggagcccctgcgttgggaccaggtggtgaaggtggtgccgtcgatggacgccgtggtgaaggtgttctgcgtccacacggagcccaacttctccctgccgtggcagcggaagaggcagtacagctcgagcagcagcgggttcatcattgggggccgtagggtgctcactaacgcccactcggttgagcattacacccaggtcaagctcaagaagcgtggctcggacaccaagtaccttgcgactgtccttgccataggcaccgagtgtgacattgcaatgttgaccgttgaggatgatgaattctggaaaggcgtttcacctgtagagtttgggtcgctgccagcacttcaggatgccgtcactgttgttggttacccaattggaggcgatactatctcggtgactagtggtgtagtttctaggatagaaatactttcatatgttcatggttctacagagcttcttgggttacagatagatgcagctataaattcaggaaattcaggggggcctgctttcaatgataagggaaaatgtgttggtatagctttccaatctcttaaacatgaagatgcagagaacataggctatgttatacccaccccagttattaaccacttcattgaagattacaaaaaatctggagaatacacaggtttccctatacttggaatagaatggcaaaaaatggaaaatcctgatctccgcaaggcaatgggaatgaaagctaaccaaaagggtgttcggatacgaagggttgagccaactgctcctgaatctggatgtctcgaaccttctgatatcatccttagctttgatggtattgatattgccaatgatggtacaggttagcccttgcttcacatgactggatatgctaattgtcacctttttatatctaatttgtctgcattgtcataagtgttatatcatattacaagtctgtagctggtacaagtgttatatgcaatctcctaaaggtaagacaccaatttctgtttttaatccaaacatctgaacaattttactcattattttttcatgaaaaagggagaatttattcttcaggctttcagggacacctttctacataatttgtcgagctaaaactcagtgtctatcattccccacaaccatagacctcccacccagataaacatgttttatcttgattaaatcaatccacagggggattgggattttatgttttagctgagtagtgtgcccacctcccatgcagttttctttacaatttgttgactttgacactgagggtcaccgtagtcataactatttgaatccaatcacaacatttcttgttaaggcattcaaacaaaaaaaaatctcaattatcttgtcataggccttcttgaagtttacctttaggactagaccatctctcttcttaattctagtatcatggagtatttcgtgcaaagccattaccctatgatttgtttcaattattttaaaagcttctaagtacgtttttaggtgcttttcacatttctctcgaggtggtttgcattgaatattttcctgggacaagggaacttcacttaacaatgttggaatttgtaaatttgatactttctcatccagttgaaacttaccttttcatgctactcagttatatccagtgaggaaaattgatttgatctcttgctctctcactgcttggtcatccagttccttttaggcatggtgaacgcattggatttacctaccttgtttctcaaaagtacactggccgccgtcatattacattgttgctggctttgtttttatggctgtgtctgttccatatcttcgatctgagtatggaaaagaatatgaatacgatgcccccgtgaagttgttggacaagcatttgcatgcaatggcacaatcatctgatgagcagcttgtggtggtgtcacaggtgcttgtggctgatataaacattggttacgaagatatagtcaacattcaggttcttgccttcaatggcacaccggttaaaaatttgaagcacctagcgaccatggtggaagagtgcaatgaagcattcttgaagtttgatctggacttcgatcaggtggttgtcctggagacgaaaactgcaaaggctgcaactcaagatattctgacaacacattgtataccttcggctgcctcagaagagctgaagagctgaggaaagctaggtgttgtctgtcggctggtgagattctgcatgtcgaagagtggaagctggaatgtaacctagttgtaccaaagagtgcctagcaagtatcacatacacacaaaatgcatactgatgactgaatgtcgcattgagccacccgggtcagttgtaggataggtaaaaaaacaaaacaaagttttgcccatattccattaatctagttgacatcaacgaaatcatcatgagtaactttgcgtatccctatttgccatgattggtctgatgacacttctgctttagacatctgtggtccggttgccaagagcatgccactactttgttgtggagtactctagttcatcgaagaaaacaatcgtatctggatggcttttgcatcagttttctgtgtc

SEQ ID NO: 213032 - DNA, 3044 bp, Zea Mays
gcggaaacttccacgaccacccgcgctctcttcgggttcggacccgaccgcacgcggttcaacgagttgtgccgaggcaaaaccctagctcacctccatggatagccacggccacgtctctggcggcaagcgcaagggcaagcgcgcccgcaagccggagccgccggtactcgcctctcccgacaacagccacgaccacaagcaccacgacaccgcaccatcctcctcgcccctctccaccgccgccgtcgcggcgtcagactccccggaccccgagccggcgtcatcctccccagctccccgccgccggggccgcaagtcccgccgcatccgcaacgggacccactccgaggtcgatgccgccccctcaccctcgcctccgccgcgtcggggcgggcctaagggggcgccgaacggtgcggtggacatggtggaggttcccgcggcggtggagcccctgcgttgggaccaggtggtgaaggtggtgccgtcgatggacgccgtggtgaaggtgttctgcgtccacacggagcccaacttctccctgccgtggcagcggaagaggcagtacagctcgagcagcagcgggttcatcattgggggccgtagggtgctcactaacgcccactcggttgagcattacacccaggtcaagctcaagaagcgtggctcggacaccaagtaccttgcgactgtccttgccataggcaccgagtgtgacattgcaatgttgaccgttgaggatgatgaattctggaaaggcgtttcacctgtagagtttgggtcgctgccagcacttcaggatgccgtcactgttgttggttacccaattggaggcgatactatctcggtgactagtggtgtagtttctaggatagaaatactttcatatgttcatggttctacagagcttcttgggttacagatagatgcagctataaattcaggaaattcaggggggcctgctttcaatgataagggaaaatgtgttggtatagctttccaatctcttaaacatgaagatgcagagaacataggctatgttatacccaccccagttattaaccacttcattgaagattacaaaaaatctggagaatacacaggtttccctatacttggaatagaatggcaaaaaatggaaaatcctgatctccgcaaggcaatgggaatgaaagctaaccaaaagggtgttcggatacgaagggttgagccaactgctcctgaatctggatgtctcgaaccttctgatatcatccttagctttgatggtattgatattgccaatgatggtacaggttagcccttgcttcacatgactggatatgctaattgtcacctttttatatctaatttgtctgcattgtcataagtgttatatcatattacaagtctgtagctggtacaagtgttatatgcaatctcctaaaggtaagacaccaatttctgtttttaatccaaacatctgaacaattttactcattattttttcatgaaaaagggagaatttattcttcaggctttcagggacacctttctacataatttgtcgagctaaaactcagtgtctatcattccccacaaccatagacctcccacccagataaacatgttttatcttgattaaatcaatccacagggggattgggattttatgttttagctgagtagtgtgcccacctcccatgcagttttctttacaatttgttgactttgacactgagggtcaccgtagtcataactatttgaatccaatcacaacatttcttgttaaggcattcaaacaaaaaaaaatctcaattatcttgtcataggccttcttgaagtttacctttaggactagaccatctctcttcttaattctagtatcatggagtatttcgtgcaaagccattaccctatgatttgtttcaattattttaaaagcttctaagtacgtttttaggtgcttttcacatttctctcgaggtggtttgcattgaatattttcctgggacaagggaacttcacttaacaatgttggaatttgtaaatttgatactttctcatccagttgaaacttaccttttcatgctactcagttatatccagtgaggaaaattgatttgatctcttgctctctcactgcttggtcatccagttccttttaggcatggtgaacgcattggatttacctaccttgtttctcaaaagtacactgctcatatcaagggaaggccgccgtcatattacattgttgctggctttgtttttatggctgtgtctgttccatatcttcgatctgagtatggaaaagaatatgaatacgatgcccccgtgaagttgttggacaagcatttgcatgcaatggcacaatcatctgatgagcagcttgtggtggtgtcacaggtgcttgtggctgatataaacattggttacgaagatatagtcaacattcaggttcttgccttcaatggcacaccggttaaaaatttgaagcacctagcgaccatggtggaagagtgcaatgaagcattcttgaagtttgatctggacttcgatcaggtggttgtcctggagacgaaaactgcaaaggctgcaactcaagatattctgacaacacattgtataccttcggctgcctcagaagagctgaagagctgaggaaagctaggtgttgtctgtcggctggtgagattctgcatgtcgaagagtggaagctggaatgtaacctagttgtaccaaagagtgcctagcaagtatcacatacacacaaaatgcatactgatgactgaatgtcgcattgagccacccgggtcagttgtaggataggtaaaaaaacaaaacaaagttttgcccatattccattaatctagttgacatcaacgaaatcatcatgagtaactttgcgtatccctatttgccatgattggtctgatgacacttctgctttagacatctgtggtccggttgccaagagcatgccactactttgttgtggagtactctagttcatcgaagaaaacaatcgtatctggatggcttttgcatcagttttctgtgtc

SEQ ID NO: 213033 - DNA, 1971 bp, Zea Mays
gcgctctcttcgggttcggacccgaccgcacgcggttcaacgagttggtttctggtttctctccttctagcaccactgccgagtgccgaggcaaaaccctagctcacctccatggatagccacggccacgtctctggcggcaagcgcaagggcaagcgcgcccgcaagccggagccgccggtactcgcctctcccgacaacagccacgaccacaagcaccacgacaccgcaccatcctcctcgcccctctccaccgccgccgtcgcggcgtcagactccccggaccccgagccggcgtcatcctccccagctccccgccgccggggccgcaagtcccgccgcatccgcaacgggacccactccgaggtcgatgccgccccctcaccctcgcctccgccgcgtcggggcgggcctaagggggcgccgaacggtgcggtggacgttgcggagccgtctcggcgggagctggcggttaagatggtggaggttcccgcggcggtggagcccctgcgttgggaccaggtggtgaaggtggtgccgtcgatggacgccgtggtgaaggtgttctgcgtccacacggagcccaacttctccctgccgtggcagcggaagaggcagtacagctcgagcagcagcgggttcatcattgggggccgtagggtgctcactaacgcccactcggttgagcattacacccaggtcaagctcaagaagcgtggctcggacaccaagtaccttgcgactgtccttgccataggcaccgagtgtgacattgcaatgttgaccgttgaggatgatgaattctggaaaggcgtttcacctgtagagtttgggtcgctgccagcacttcaggatgccgtcactgttgttggttacccaattggaggcgatactatctcggtgactagtggtgtagtttctaggatagaaatactttcatatgttcatggttctacagagcttcttgggttacagatagatgcagctataaattcaggaaattcaggggggcctgctttcaatgataagggaaaatgtgttggtatagctttccaatctcttaaacatgaagatgcagagaacataggctatgttatacccaccccagttattaaccacttcattgaagattacaaaaaatctggagaatacacaggtttccctatacttggaatagaatggcaaaaaatggaaaatcctgatctccgcaaggcaatgggaatgaaagctaaccaaaagggtgttcggatacgaagggttgagccaactgctcctgaatctggatgtctcgaaccttctgatatcatccttagctttgatggtattgatattgccaatgatggtacaggttagcccttgcttcacatgactggatatgctaattgtcacctttttatatctaatttgtctgcattgtcataagtgttatatcatattacaagtctgtagctggtacaagtgttatatgcaatctcctaaagttccttttaggcatggtgaacgcattggatttacctaccttgtttctcaaaagtacactggtgagaaggcacgcgtgaaagtacttcgcaactcaaaaatccatgaatttaacataaagctagcaacccacaaaagactcattccagctcatatcaagggaaggccgccgtcatattacattgttgctggctttgtttttatggctgtgtctgttccatatcttcgatctgagtatggaaaagaatatgaatacgatgcccccgtgaagttgttggacaagcatttgcatgcaatggcacaatcatctgatgagcagcttgtggtggtgtcacaggtgcttgtggctgatataaacattggttacgaagatatagtcaacattcagaatcacataccatgcaagggatattgctaccaaagtgcaattacttagcggtagtacttacatgagaaaatttactccaattacgcttgcatccagatgcagcg

SEQ ID NO: 213034 - DNA, 2928 bp, Zea Mays
gcgctctcttcgggttcggacccgaccgcacgcggttcaacgagttggtttctggtttctctccttctagcaccactgccgagtgccgaggcaaaaccctagctcacctccatggatagccacggccacgtctctggcggcaagcgcaagggcaagcgcgcccgcaagccggagccgccggtactcgcctctcccgacaacagccacgaccacaagcaccacgacaccgcaccatcctcctcgcccctctccaccgccgccgtcgcggcgtcagactccccggaccccgagccggcgtcatcctccccagctccccgccgccggggccgcaagtcccgccgcatccgcaacgggacccactccgaggtcgatgccgccccctcaccctcgcctccgccgcgtcggggcgggcctaagggggcgccgaacggtgcggtggacgttgcggagccgtctcggcgggagctggcggttaagatggtggaggttcccgcggcggtggagcccctgcgttgggaccaggtggtgaaggtggtgccgtcgatggacgccgtggtgaaggtgttctgcgtccacacggagcccaacttctccctgccgtggcagcggaagaggcagtacagctcgagcagcagcgggttcatcattgggggccgtagggtgctcactaacgcccactcggttgagcattacacccaggtcaagctcaagaagcgtggctcggacaccaagtaccttgcgactgtccttgccataggcaccgagtgtgacattgcaatgttgaccgttgaggatgatgaattctggaaaggcgtttcacctgtagagtttgggtcgctgccagcacttcaggatgccgtcactgttgttggttacccaattggaggcgatactatctcggtgactagtggtgtagtttctaggatagaaatactttcatatgttcatggttctacagagcttcttgggttacagatagatgcagctataaattcaggaaattcaggggggcctgctttcaatgataagggaaaatgtgttggtatagctttccaatctcttaaacatgaagatgcagagaacataggctatgttatacccaccccagttattaaccacttcattgaagattacaaaaaatctggagaatacacaggtttccctatacttggaatagaatggcaaaaaatggaaaatcctgatctccgcaaggcaatgggaatgaaagctaaccaaaagggtgttcggatacgaagggttgagccaactgctcctgaatctggatgtctcgaaccttctgatatcatccttagctttgatggtattgatattgccaatgatggtacaggttagcccttgcttcacatgactggatatgctaattgtcacctttttatatctaatttgtctgcattgtcataagtgttatatcatattacaagtctgtagctggtacaagtgttatatgcaatctcctaaaggtaagacaccaatttctgtttttaatccaaacatctgaacaattttactcattattttttcatgaaaaagggagaatttattcttcaggctttcagggacacctttctacataatttgtcgagctaaaactcagtgtctatcattccccacaaccatagacctcccacccagataaacatgttttatcttgattaaatcaatccacagggggattgggattttatgttttagctgagtagtgtgcccacctcccatgcagttttctttacaatttgttgactttgacactgagggtcaccgtagtcataactatttgaatccaatcacaacatttcttgttaaggcattcaaacaaaaaaaaatctcaattatcttgtcataggccttcttgaagtttacctttaggactagaccatctctcttcttaattctagtatcatggagtatttcgtgcaaagccattaccctatgatttgtttcaattattttaaaagcttctaagtacgtttttaggtgcttttcacatttctctcgaggtggtttgcattgaatattttcctgggacaagggaacttcacttaacaatgttggaatttgtaaatttgatactttctcatccagttgaaacttaccttttcatgctactcagttatatccagtgaggaaaattgatttgatctcttgctctctcactgcttggtcatccagttccttttaggcatggtgaacgcattggatttacctaccttgtttctcaaaagtacactggtgagaaggcacgcgtgaaagtacttcgcaactcaaaaatccatgaatttaacataaagctagcaacccacaaaagactcattccagctcatatcaagggaaggccgccgtcatattacattgttgctggctttgtttttatggctgtgtctgttccatatcttcgatctgagtatggaaaagaatatgaatacgatgcccccgtgaagttgttggacaagcatttgcatgcaatggcacaatcatctgatgagcagcttgtggtggtgtcacaggtgcttgtggctgatataaacattggttacgaagatatagtcaacattcagaacttggtactgctacagctgcaggttcttctgcaacagcttgtttctgttcatttgcatctctttcaccttcttcaggcatctccacaagaacagtccttgaattatttttcaacttgggcagcaagatctggagatagttctgctagtcctttccactagggaaggaatatctagagtagctgaggaagccgtggcagcaggatatgacccaactgatgaatgtgaagcactttcttcaaggtcaggcgcaggcatgatcactaccagtgcctatatgaagtctaatatggttatataagctttcttagtgctgtttgtgatccttaacgacatgaacctaaatcaatat

SEQ ID NO: 213035 - DNA, 2777 bp, Zea Mays
gcgctctcttcgggttcggacccgaccgcacgcggttcaacgagttgtgccgaggcaaaaccctagctcacctccatggatagccacggccacgtctctggcggcaagcgcaagggcaagcgcgcccgcaagccggagccgccggtactcgcctctcccgacaacagccacgaccacaagcaccacgacaccgcaccatcctcctcgcccctctccaccgccgccgtcgcggcgtcagactccccggaccccgagccggcgtcatcctccccagctccccgccgccggggccgcaagtcccgccgcatccgcaacgggacccactccgaggtcgatgccgccccctcaccctcgcctccgccgcgtcggggcgggcctaagggggcgccgaacggtgcggtggacgttgcggagccgtctcggcgggagctggcggttaagatggtggaggttcccgcggcggtggagcccctgcgttgggaccaggtggtgaaggtggtgccgtcgatggacgccgtggtgaaggtgttctgcgtccacacggagcccaacttctccctgccgtggcagcggaagaggcagtacagctcgagcagcagcgggttcatcattgggggccgtagggtgctcactaacgcccactcggttgagcattacacccaggtcaagctcaagaagcgtggctcggacaccaagtaccttgcgactgtccttgccataggcaccgagtgtgacattgcaatgttgaccgttgaggatgatgaattctggaaaggcgtttcacctgtagagtttgggtcgctgccagcacttcaggatgccgtcactgttgttggttacccaattggaggcgatactatctcggtgactagtggtgtagtttctaggatagaaatactttcatatgttcatggttctacagagcttcttgggttacagatagatgcagctataaattcaggaaattcaggggggcctgctttcaatgataagggaaaatgtgttggtatagctttccaatctcttaaacatgaagatgcagagaacataggctatgttatacccaccccagttattaaccacttcattgaagattacaaaaaatctggagaatacacaggtttccctatacttggaatagaatggcaaaaaatggaaaatcctgatctccgcaaggcaatgggaatgaaagctaaccaaaagggtgttcggatacgaagggttgagccaactgctcctgaatctggatgtctcgaaccttctgatatcatccttagctttgatggtattgatattgccaatgatggtacaggttagcccttgcttcacatgactggatatgctaattgtcacctttttatatctaatttgtctgcattgtcataagtgttatatcatattacaagtctgtagctggtacaagtgttatatgcaatctcctaaaggtaagacaccaatttctgtttttaatccaaacatctgaacaattttactcattattttttcatgaaaaagggagaatttattcttcaggctttcagggacacctttctacataatttgtcgagctaaaactcagtgtctatcattccccacaaccatagacctcccacccagataaacatgttttatcttgattaaatcaatccacagggggattgggattttatgttttagctgagtagtgtgcccacctcccatgcagttttctttacaatttgttgactttgacactgagggtcaccgtagtcataactatttgaatccaatcacaacatttcttgttaaggcattcaaacaaaaaaaaatctcaattatcttgtcataggccttcttgaagtttacctttaggactagaccatctctcttcttaattctagtatcatggagtatttcgtgcaaagccattaccctatgatttgtttcaattattttaaaagcttctaagtacgtttttaggtgcttttcacatttctctcgaggtggtttgcattgaatattttcctgggacaagggaacttcacttaacaatgttggaatttgtaaatttgatactttctcatccagttgaaacttaccttttcatgctactcagttatatccagtgaggaaaattgatttgatctcttgctctctcactgcttggtcatccagttccttttaggcatggtgaacgcattggatttacctaccttgtttctcaaaagtacactggtgagaaggcacgcgtgaaagtacttcgcaactcaaaaatccatgaatttaacataaagctagcaacccacaaaagactcattccagctcatatcaagggaaggccgccgtcatattacattgttgctggctttgtttttatggctgtgtctgttccatatcttcgatctgagtatggaaaagaatatgaatacgatgcccccgtgaagttgttggacaagcatttgcatgcaatggcacaatcatctgatgagcagcttgtggtggtgtcacaggtgcttgtggctgatataaacattggttacgaagatatagtcaacattcagcttgggcagcaagatctggagatagttctgctagtcctttccactagggaaggaatatctagagtagctgaggaagccgtggcagcaggatatgacccaactgatgaatgtgaagcactttcttcaaggtcaggcgcaggcatgatcactaccagtgcctatatgaagtctaatatggttatataagctttcttagtgctgtttgtgatccttaacgacatgaacctaaatcaatat

SEQ ID NO: 213036 - DNA, 2138 bp, Zea Mays
agcaggagaagagagacgacacagcagcttttttggtttccccttccctttccccgcgcggtgatcgctgggttctccgcgagcgaggcagagcactgcgcgtcctccgtgaccgcctggtgatcgctgggggttctggacgttggcgtttcatttggttggttggtggttggcagcagccgtggcgagatggacctgatgctgccggtgacggtgaaggaggagtggccgccggaagaggaggaggaggaggacgtggacgcggacgcggacgctccgcggccgatggaggggctgcacgaggtcgggccaccgccgttcctgaccaagacgttcgacctggtggccgacccggccaccgacgaggtcatctcctggggccgcgccggcaacagtttcgtggtctgggatccccacgtgttcgccgccgtgctgctccccaggttctttaagcacaacaacttctccagctttgtccgccagctgaacacctatgtgagtgccccaagtactctgcttgctcagttgctgtcgtgtgattttttgtttctggttggctttgtgctcgcgcgctctggttttgcagttcatctcgcctcttgcattgtggagtacagtagcatgagctatcagtcgacaagtctgtctctattattattacttaccgaaagaacaagtctgtatatatatataagcattttgtgtgattcacaatgacttggagctgatacaatcgttgaacgcgtattgcttttctttggcggcctagcaaatacaatggcaaaatgggcaaatgttttgaatggttcagaagcagaacgacaatgggggagattgcagaaccagcatctccatgacaagatgttaaattcctctgacatgctctttgttcgccttgttactgtgtagctagatggaccaggacaagggatgaacgaagctactacagcctacgagaaagaaacaaactgcttgtttgtcctaaagataaagaagactcactcctttgatcaccactcaccaccaagcaatatactgctagtggcttcagaaagatcgacccggacagctgggagttcgcgaacgaaggattcctgaggggccagaggcatcttctccggctgatcaagcgtcgaaggccggcgccaccgccgccgtacctccaggcgtcgcagtcgcaggggtcgtgcctggaggtgggccggttcggagggctggacggagagatggagcggctgaggcgtgacaagagcatcctgctggcggaggtggtgaagctgcggcaggagcagcagagcacgcgggcgggcatgcgggccatggaggagcggctgcggcacgcggagcacaagcaggtgcagatgatggggttcctggcgcgggcggtgcagagcccagacttgttccagctgctggcacagcagcaagcccggcggagggagctggagggcgcggcgctgctctccgccgcctcccggaagcggaggcggcccatcggcgccgcgccggccaacggcggcttgcagcagcaggaggaggagcagcagcagggcgacgacgacgaccccaccgccacgcgggcgctgttcgcggagctggacgagcgagggaccacgtcggagctggagaacctggcgctcaacatccaggggctcggcaagcgcaggcaggacgggagcgagaagcagggtggccgcgcgcggagccagcagcagggcgggttcgagacggcggagctcaccgacgacttttgggaggagctgctgaacgaagggatgaagggcggtgcggaggctgagacgctgccgccggagaggagacgaccggcttggtacgtcgacgcgctggcgcagaagttgagctccatgagcaataacaccacggcgaagtagagatgatcgcgttaattaatcctatacgactagtaacagtagcttaattatccctccgacaggggtcagtgaatactcttagcgatagctccattgttgtagattatagtatataggagtgggatcgtggtggttacactatgtcattttgtgcagagtgcagacgtgtagtgtatatagtattcttggtacctaccctgtgttgtacccagcgcaagtatattccacagtcgccgggccgtgtca

SEQ ID NO: 213037 - DNA, 1387 bp, Zea Mays
tttctacacgcgtgctcagctcttagcaaattctgggcgttcttctctctgtacgcggctgccagcacacaccgccgagtccgcgtggctgctcagccagtactgctcacgccagcacaacagtgatcagccaacacttatcctcaactccaactcgttcagccggttcttcatccgtcgtccacaggcttcagacgtagctcgccagcttcgacctccgccctgcccttgaccccactcgcccgttcttgttcccgacgctcgagctcacctcagcttcgctgtgcccctgcgttcggcctcttccctccaccagcggacgtcctcggtctcgctttcctcgccgtggcaaggccccggccacgacgtcatccccctctaagctagctgttgaagtcgtgcctcgcatacgcctattcgatgaaatgcccaaacgtcacgtccgctccttgtcccaacaccctgtcacaattccgtgcgttgccgtgtgtgtttcggaagagaggaatcccatatatgtgaggacaggcaatccgtgcaatagttgtttgatgtttggtgttatgcgcaaatcagaaatcgtcatcattatcccaaatatcgatttggtttgtgatatggtacactagctgaaaaatcgtgcgaagcgaagggtgtggatcaaaacaacccacaagacgatgtcggccgatgagcccgaagatggatggactaagcagatgtcagaacaaaagttgatcgtcaactggccttcatttaacaacactaacgtagtgttatcccaggtaagccccggtgcatttgccacctccttgttgtttttaaaacttttatcacttatgtgacagaatctcccaagtaattaggcccacctacagttgtccttgtccaacagacatcagacaaccctgtagatgttcctgaatcactcgacaagttcggtatcttctttcttacctttccaggaacgttttacccgtcttgcagacattacagaacatcggagatatagaaatgcggaagcgattacataaacttacatttatttagaaagtaagatcaagttacttattacagatatgaaacgagtgctgaatagtattattacaataccaagggaggcaaaaactcctcccgatagtttttataaagtcctaatggaggatcctttcctcccgcacttcattccttgcgttcttcctttggttatgactcaacctgataattctctgatcagtgttgagagttgctttgtgtctggctaaccaattcatgcccaaaataacatctatatcttggcctttcagaacgatcatattagtaggaaagtcccgtccggccaaagttacgggcacttgataggccacttctctagtaaatatttgtc

SEQ ID NO: 213038 - DNA, 2602 bp, Zea Mays
acccccctgcgcatatctgcctacccatgcggtcctcccccaaacgtcttcatcatggacgaagccaagaagctgccagcgttgatccacacatatcgttcggtcctcctctggcgctaagagatttgctgccgatgccgcgattcacgcgctgaaccagcgttccgttgccgttttcctggaccgatggctagtatttagggctcgtttggtagagctccactctatgattctctagctccgagagctgattctctaatggagtgattctgggcgattctctggtaggagtgaatttgttgatgaattgcgtttggctgctagttgtacccaagcttgtttaagtgagaacctgatctgttctttgctcttacttcctcagcaaatatttcacaagctatcttaacattttcatcgcaccagtctgcattatcctccttcatggtgctgttattgccacaaccatgaataataaaaaaaagataaatcaaagtgctagctcttctaacatggaaaacaacaggtataaagcagcaagcatagattgatgatgagcttctcgacttgtgattttatttattttttcgtgcagaacatttctagaaatggtgctgctggactggacgtgtgaactttggattttcacagcttctatactcgtgtgcaaagattttcttaaaaatgattttcaaatcaagaaaccaatagacaccgcaggagctagagcagaaggaaaaaacactcgcgtcctcacctcaatcggctacagattagagggagagaggaatgcaacttcaccttgcacactgaaagacgcgagacgaagagatggcgtagtagtggacggaaggggcttgggagtgttctggacggaaggggcggcagcctggatctccagcgtcctaggctagtagcggctggtagcttggcgccgccgcgccgcctccaaccctaatggccacggtctggacaaaagccaggctgggcttgtggctggatgcccgagcgggtgagggagccggtagagcaggtttttttcgctcccatgtgccagtacaattattggacgcgattcgctccgctccttcggtgaagcgtctggttttttgaccgtttggcatatgagaattgattctgcttcggagcggagctgaaaaagcgctaccaaacgcagcctaaatacctccgccaaggagctaggagtgtggcgtgaactaaccagcacgggcgctgagggctgaggccgcgacgacgacgaccatgatgaggctgaagcagcacatgggcctggtctcctcccctacccctgccatcgtcgtgaggctcggcaacaacacaccccaccgccgccgactcggtctcggatcgtgtcgtcctccgcctccgacgccgcgccgttcgagaagcccagggccgtggtcaagaaggtcctcgcgcagtcgcagcccgagggtcagggtgccaccgtccgtaggagcatcggcaggcacgagctccgcaacctggacccgttcctccagctcgacgagttcacagtctccaagcccgccgggtttcccgaccacccgcacagaggattcgagaccgtcacccacatgtttgagggggccatcacccaccaggacttcgctggtcacaagggcaccatcaggacaggggacgtgcagtggatgacggcggggcgaggcatcgtgcactcggagatgccggctggggacggcgtgagcgagggcctgcagctctggatcaacctctcctccaaggacaagatgatcgagccgcgataccaggagctggagcgcaaggacatcagccgcgcggagaccgaggacggcgtggaggcccgcgtcatcgccggggaggccttcggcgtggcgtcccccgtgtacacgcgcactcccatcatgtacgtggacttcaccatgcgacctgggtcccgcctgcaccagcctgtcccggagggctggaacgccttcgtctacgtcgtcgacggcgagggcgtattcggacgggagacggccacggcacaccactgcctcgtcctcggctccggcgacggcgtcagcgtgtggaacaggtccgccaggccgttaaggttcgtcctcgccgccgggcagccgctcggtgagcccgtggtgcagcacggacccttcgtcatgaactcgcacgccgagatacagcaggccatggaagactactcctacggcaagaacggcttcgagagggccggccagtggagctcctccgcctgatcggcgaggctatcgcgttaaattaaataaatgtgtgtaatacacacagctcaacgcttcccttaagttatgtagcaacgccatttgttggtgattaacgagtgatcgagcaagcttaaaaaagttccactccttttaaacttatatatttatcggtattttagctaatacaatagtttattgagactattgtattcgtgtatcgaaagttatgtagcaatgccatttgtgggtgattaccgtgttttccggtcgaagtatcagctagttcaatcatttataactggagacatttgaccttgtttggaacttcacaatcatttaacttgttcgtgctatgaaattattat

SEQ ID NO: 213039 - DNA, 3427 bp, Zea Mays
acacttttccttttcatacgaccacacacaagcaaaaacctcgaccggaccacacgcggcgccgccgctccgccgctaagcctccttcccatgcccgccgctaagcttccttcccatgcccgccgtcaccgctgacaagcgcactgtggcccttccgcatccataggctgccgccgcgctcccccgccacgagaccctgccccacttcggatgccctttcgaccacacatccccctccgcttcctactgcctcacctccagcaccgcattgcccgcccacccagacctccacgtagatcgctttcctactctctcgcggcggcgttgtcagcggctggaacagagtccgaggaggaggcggttgtgggtagggacgcgccgttagcccctccacgcccaggcggggcgggaagtggagcgcctgggcgtggctgggcacagcagggggcgctcgatgaggaaagtgcggagctcgagcggaaggcctctatcgtcgcacggttcaggcactgccatgagcttctgtggcagactaggtggcgggagatgcgccacgggttggcccagatggtggatgaacaaggttctgattctgctccgactctatgtgatattctgtggtgtggattcagggaatgggattcaagcagcattgtgtgggatgctctagcaaatagttatgctagagctcagatgaatcatgatgctctttatgttcttagtaaaatgaacagcctaaacatgcaaatctcaataaccacctatgatagtttattgtacagtctaagaaaggcagatgtggcactggcgatttttaaagagatggagtcatgtggtattccccccagtgattattcccatggcattctcatagatggactctgcaagcaaggtaaaattggagaagctttatctttccttcaggaaacaaggaaagaggggaaattcaaacccttgggaatgacctttaacacccttatgtccgcattgtgtaattgggggttcattcaggatgcaaaatcagttttctgcctgatgttgaagtatggattaaatccaagcaggcacacatattcaaccattatacatggtctatgtaaagtaggttctgtaaatgaagcattcgatatttttcagagtgtgacagaagaaggaatggaacttgatattgtcacttgcaacagccttattaatggctttcgcttgcatgggcatacaagagaaattccaaaaatgattgagatgatgaggggcctaggtgtcgaacccgatgttgttacttatactatacttattactggccactgtgaaggcggtgatgtcgaagaagggatgaggataagaaaggacatcttaggccaaggtatagagttgaatattgtcacatatagcgtccttatcaatgctctcttcaagaagggcctgttctatgaggtcgaaaacctatttggtgagatatgcagtattggtctggaattggatgtcattgcatattccatcctcatccatgggttctgcaagctaggagaaattggaagagcacttcaagtctggaatctaatgtgctgttctcagagggtaattccaacttcagtaaaccatgtatctattcttctaggcctttgcaagaaaggattccttgatgaagcgaggtcatatttggaaactgtggctagcaaatatcagccatccgatgtagtcctctacaatgtagttattgatggttatgcaaaagtgggtgatattggtaatgctgttcagctgtatgatgcgattattatggctggtatgtgcccaaccattgtaacatgcaactctcttctatatggctactgcaaatttggggatctacatatggcagaaagctattttatggctattcagttaagtgacctgctgccaacaacagttacctacactactttgatggatgcactctctgaagctgggaaagttcattccatgctaagtatttttaaagaaatgactggaaaaggtatcagaccaaatgcaataacttacagtgtagttattaaaggactttgtaagcagttaatgttccacgatgccaaaaatgttcttgatgatatgtatagagaaggttttgatgctgatccaataccttacaacacgcttatacaaggtttttgtgaaactcaggatgctaaaaatgctttctacgtgtatgaactaatggtatgtcgtggagtgatgccctctcctgttacttataacttgcttgttaatgtgctgtgcttaaagggactagttattcacgctgaaatgaaactggagtccttcagaaaacagggtgccgagctgagaaaatttgcatatacaacacttatcaaagctcaatgtgcaaaagggatgccttacaaggctattatgtgggttggcaagcttctagatgcagggtttgaggcatctattgaagacttcagtgcggcaatcaaccgactatgcaaaagacagttcaccagagaagctttgatgctcatatcgatcatgttatctgttggtgtttatccagatattcaactataccgtgtactgggtacagctgtacagaagaaaaatgagtcattctatctacccatattgcaagcccttgctatcaaaactggtatttagtactttgagtctgaagggcaggcctggtgcagtggtgatagctgtctgactaagtcaccatgtcacgggttcgaagcagcctctccgcatctgcggaggaaggcttgccttggtttatcccgtcgcatctgcggaggtggtgctgctgtgcatcgctgtgggctgtgaggcggaggcactgcatctcgctgtgaagtggactgctccatcctctctatgatcctgcaccatcaggggttcgggtgacctttgaggatggtggttaactggttaccttgaagatcccggtgccattgattctttgctacttggcctctccactgctggcaacagacccagggaatgaattagatacctattcttgaccccttcccgcccaaggaggagcaggcaggaactccggtatatggtggtaattggtggcacctttatgtacttctttaggggcagcctaccatggcaggggctgaaagcaggatcaagaagcagaaatatgacaaaaattagtgcgaaatggatactcccatggaggtggcccatacatgataccagttttgactggaccattttgaagtatcctcagataggctgcaacctgcggatgaaggcaagtgacagaactagtggaggtgttggaccttcaatggatacaattgagaagaccccaggaggtgtccgatagaaggaatcctagtggttatgtgaatccgagtggcaattatgcccaatgaccacgtgagaacatatgtatgtcattgaacgaaattggttcgtgtggatcctgctggtcgtt

SEQ ID NO: 213040 - DNA, 6735 bp, Zea Mays
acacttttccttttcatacgaccacacacaagcaaaaacctcgaccggaccacacgcggcgccgccgctccgccgctaagcctccttcccatgcccgccgctaagcttccttcccatgcccgccgtcaccgctgacaagcgcactgtggcccttccgcatccataggctgccgccgcgctcccccgccacgagaccctgccccacttcggatgccctttcgaccacacatccccctccgcttcctactgcctcacctccagcaccgcattgcccgcccacccagacctccacgtagatcgctttcctactctctcgcggcggcgttgtcagcggctggaacagagtccgaggaggaggcggttgtgggtagggacgcgccgttagcccctccacgcccaggcggggcgggaagtggagcgcctgggcgtggctgggcacagcagggggcgctcgatgaggaaagtgcggagctcgagcggaaggcctctatcgtcgcacggttcaggcactgccatgagcttctgtggcagactaggtggcgggagatgcgccacgggttggcccagatggtggatgaacaaggttctgattctgctccgactctatgtgatattctgtggtgtggattcagggaatgggattcaagcagcattgtgtgggatgctctagcaaatagttatgctagagctcagatgaatcatgatgctctttatgttcttagtaaaatgaacagcctaaacatgcaaatctcaataaccacctatgatagtttattgtacagtctaagaaaggcagatgtggcactggcgatttttaaagagatggagtcatgtggtattccccccagtgattattcccatggcattctcatagatggactctgcaagcaaggtaaaattggagaagctttatctttccttcaggaaacaaggaaagaggggaaattcaaacccttgggaatgacctttaacacccttatgtccgcattgtgtaattgggggttcattcaggatgcaaaatcagttttctgcctgatgttgaagtatggattaaatccaagcaggcacacatattcaaccattatacatggtctatgtaaagtaggttctgtaaatgaagcattcgatatttttcagagtgtgacagaagaaggaatggaacttgatattgtcacttgcaacagccttattaatggctttcgcttgcatgggcatacaagagaaattccaaaaatgattgagatgatgaggggcctaggtgtcgaacccgatgttgttacttatactatacttattactggccactgtgaaggcggtgatgtcgaagaagggatgaggataagaaaggacatcttaggccaaggtatagagttgaatattgtcacatatagcgtccttatcaatgctctcttcaagaagggcctgttctatgaggtcgaaaacctatttggtgagatatgcagtattggtctggaattggatgtcattgcatattccatcctcatccatgggttctgcaagctaggagaaattggaagagcacttcaagtctggaatctaatgtgctgttctcagagggtaattccaacttcagtaaaccatgtatctattcttctaggcctttgcaagaaaggattccttgatgaagcgaggtcatatttggaaactgtggctagcaaatatcagccatccgatgtagtcctctacaatgtagttattgatggttatgcaaaagtgggtgatattggtaatgctgttcagctgtatgatgcgattattatggctggtatgtgcccaaccattgtaacatgcaactctcttctatatggctactgcaaatttggggatctacatatggcagaaagctattttatggctattcagttaagtgacctgctgccaacaacagttacctacactactttgatggatgcactctctgaagctgggaaagttcattccatgctaagtatttttaaagaaatgactggaaaaggtatcagaccaaatgcaataacttacagtgtagttattaaaggactttgtaagcagttaatgttccacgatgccaaaaatgttcttgatgatatgtatagagaaggttttgatgctgatccaataccttacaacacgcttatacaaggtttttgtgaaactcaggatgctaaaaatgctttctacgtgtatgaactaatggtatgtcgtggagtgatgccctctcctgttacttataacttgcttgttaatgtgctgtgcttaaagggactagttattcacgctgaaatgaaactggagtccttcagaaaacagggtgccgagctgagaaaatttgcatatacaacacttatcaaagctcaatgtgcaaaagggatgccttacaaggctattatgtgggttggcaagcttctagatgcagggtttgaggcatctattgaagacttcagtgcggcaatcaaccgactatgcaaaagacagttcaccagagaagctttgatgctcatatcgatcatgttatctgttggtgtttatccagatattcaactataccgtgtactgggtacagctgtacagaagaaaaatgagtcattctatctacccatattgcaagcccttgctatcaaaactggtatttagtactttgagtctgaagggcaggcctggtgcagtggtgatagctgtctgactaagtcaccatgtcacgggttcgaagcagcctctccgcatctgcggaggaaggcttgccttggtttatcccgtcgcatctgcggaggtggtgctgctgtgcatcgctgtgggctgtgaggcggaggcactgcatctcgctgtgaagtggactgctccatcctctctatgatcctgcaccatcaggggttcgggtgacctttgaggatggtggttaactggttaccttgaagatcccggtgccattgattctttgctacttggcctctccactgctggcaacagacccagcatggaccagggaatgaattagatacctattcttgaccccttcccgcccaaggaggagcaggcaggaactccggtatatggtggtaattggtggcacctttatgtacttctttaggggcagcctaccatggcaggggctgaaagcaggatcaagaagcagaaatatgacaaaaattagtgcgaaatggatactcccatggaggataccagttttgactggaccattttgaagtatcctcagataggctgcaacctgcggatgaaggcaagtgacagaactagtggaggtgttggaccttcaatggatacaattgagaagaccccaggaggtgtccgatagaaggaatcctagtggttatgtgaatccgagtggcaattatgcccaatgaccacgtgagaacatatgtatgtcattgaacgaaattgtaagttaaatttccctccgcgccttgtatgatcgatgaacattcactgctgttgtatcttccctcatgctaggggcggatccaaggggtgggccatggccccaccttaatttttttaacctcttatacctaggtttaggtacacaccaaaataaacaattttttgtatagttagcgtggacaaatctaataaaaactaggttttgatctatttttctgtcgacgcttcactgctcagtccactcttcacctgagccatttgattctcttccctagcgcaagcccagttgtggctcactcgcttcttcgatcatcgactgaccagtaagtcggtgacctaacccgcctgctgcagcgcaccttgccttctcatcactcatcagctcgtcgtctcgtcaggatcctatagacaatgttgatattttgactcctagtccgcaccagtagatgggcaagttgttggtgggaccgtggcgtcacctgtccctcgctgactcattagagtcccatcgcgccgttgcaacacgacaatgggtgtcgcttgccgtcaccgtcatctatcgctaccttgcttcctgcactcgctcctcctagctgtcgtcgtctcaccaacaccatctcacgacaatttcgatgactcgccagaacgacgcgccgatgcggctgctccgccctagtgcctcgtcctcagtcagtgcacctattttttttctctctagctctccttttggtagccaaaaaagttttttggtattcatatcattttggaaacactagatattatcattaatctatatttatggtctagtctggtgatttgtctcttgcactttcggccccacctagaattttgttctgcgtccgccactgcctcatgcagtcctcgcacatctcatgagtttttcctgcacatgttgtgttacttgtagctgtactgacactcttgctatacaggataaatatgtagccgcactcttgtacagaattggttgatgactataaaattagcagttctagagctatttgtgttttccttgattggtagctcatgccctgtattcctggatagaagaactttgtcaagaactgtacaattcgtagatggcaagctgtctgaacttttatcgtagagcagttccattttatagcattgatctgtgttttcgcacgaacacctgtgtgtcatgtgtggcatattagttgttttagtttctttttccctataaatctgtaataggtaccaactcaccacgtatagtgttctacacgaccttttaattagctggtgattacttcctattttgtggtatcttatgcgcacaacgctctttctgaggatcaaaccttctaatcacaattaacagttgggctgtcctagtgataataccgctgaaggcgctgttttcatattcgttgacagtaggtttacatacgagtgtccagtgagtacatctgctgatgtgtttgtttaagggttttgtgggctttctataaagtttgttggaagccatgttaggaccattgattgatcggtaacccctttgttgatgagtgcaatgtgtgaaaagaaaattgttgctcctcggttcaatccctggcaaaaagaagaaaaatgacaagcgctgttgactgtgttgagatccctaattcattcgtgcttcataggttgattctataatgtcttgtgatgtatatttgtaataattgatgaactccatatttgtgcgttttctgttttttagaagaaaaaaatataattgttctcatgtcatatagttttttgtgcagccatgcactattcaacacggtaagggctcgtttggttgcatgataaattggaggtaagaatcctctccaagtcccacgcgaccaaacaagccctaatgaatttgtagtgcggctgcttaattcacatgcgagagcccacggattcatatacttagggcttgtttggataattttggattggagtggattgaggtggtataaggtgtattgaagtgtaatataaactaatttccctttcaatccctaaaatacacttcaatccacttcaatctctctttatccaaacaaggccctttgcttacttgtctggtgggcaacgcttgctgtgatggccatttaatagagtaggatcagcccgtggagtcgaaacggatcagaggtggatcggatagagctgaataaaatcagtatgggttagagtggtattgggctcagtcccaaatagccgatacggttggagtggggttgggggttggatcctgacccattatcaggccttataactgtcttatcttttagatacataaccacacattattatatattttttgtaatatctaactaactacagatctatgattgtactgtgtggtacacagctcttactaataggaacaattttctgtatatcctggtgcaccatcaagtattcagcgatagcaattaaagcatgggaaaatgaagtgccacatgccattccatacctttctgttttgctcctgttcaagggtcagaatgtgtgtctgctttcgatgagcagagtttaggagtcccctgtatctggaaaaggaatacgtgttctcttcttcataaaaccgtcaatggcacaggctggctgatggcgctaagaatttactctgagctatcagcatcagccaccgctctcacgtcggtgactggagtttgcaatctctactacttattaagtaagcaatagtagtctgcctctgacgtgttctgccgttctgccgtctacgtgttctgccatctacgtgcgcccccagggccagcaaaaatttacacgtactcacgagttgaatctagatagttcagccactaaacacataacaacagagttcttattgttgcgtccgagccaacgcttataagccgctctatgtctcctttactagccagtatggtactaatttttttttgcaagacacaacaccacagcagtaccggcgctctgggctgaaattttggtgcggcccatacgtttggggcggcccatactccaccgcagcagtcttcttccgcacgacgtcgcgcccaaccgctcggtcagctcgtggagagcccggaggagagttccactacgcaattcgctacctcggcttcgacatcggcgacgtgcagagcccggaggacatcgtcgccgcggaacggctcgtttttttcccggtgtcggcgccttcggctccgccatggacgtcctcaacaggacgggcatgggccgacgcactccgtgagtacatccaaagggaccgccccttcctaggcatctgcctcggtctccattctctccactcgctccccacacctctct

SEQ ID NO: 213041 - DNA, 6725 bp, Zea Mays
acacttttccttttcatacgaccacacacaagcaaaaacctcgaccggaccacacgcggcgccgccgctccgccgctaagcctccttcccatgcccgccgctaagcttccttcccatgcccgccgtcaccgctgacaagcgcactgtggcccttccgcatccataggctgccgccgcgctcccccgccacgagaccctgccccacttcggatgccctttcgaccacacatccccctccgcttcctactgcctcacctccagcaccgcattgcccgcccacccagacctccacgtagatcgctttcctactctctcgcggcggcgttgtcagcggctggaacagagtccgaggaggaggcggttgtgggtagggacgcgccgttagcccctccacgcccaggcggggcgggaagtggagcgcctgggcgtggctgggcacagcagggggcgctcgatgaggaaagtgcggagctcgagcggaaggcctctatcgtcgcacggttcaggcactgccatgagcttctgtggcagactaggtggcgggagatgcgccacgggttggcccagatggtggatgaacaaggttctgattctgctccgactctatgtgatattctgtggtgtggattcagggaatgggattcaagcagcattgtgtgggatgctctagcaaatagttatgctagagctcagatgaatcatgatgctctttatgttcttagtaaaatgaacagcctaaacatgcaaatctcaataaccacctatgatagtttattgtacagtctaagaaaggcagatgtggcactggcgatttttaaagagatggagtcatgtggtattccccccagtgattattcccatggcattctcatagatggactctgcaagcaaggtaaaattggagaagctttatctttccttcaggaaacaaggaaagaggggaaattcaaacccttgggaatgacctttaacacccttatgtccgcattgtgtaattgggggttcattcaggatgcaaaatcagttttctgcctgatgttgaagtatggattaaatccaagcaggcacacatattcaaccattatacatggtctatgtaaagtaggttctgtaaatgaagcattcgatatttttcagagtgtgacagaagaaggaatggaacttgatattgtcacttgcaacagccttattaatggctttcgcttgcatgggcatacaagagaaattccaaaaatgattgagatgatgaggggcctaggtgtcgaacccgatgttgttacttatactatacttattactggccactgtgaaggcggtgatgtcgaagaagggatgaggataagaaaggacatcttaggccaaggtatagagttgaatattgtcacatatagcgtccttatcaatgctctcttcaagaagggcctgttctatgaggtcgaaaacctatttggtgagatatgcagtattggtctggaattggatgtcattgcatattccatcctcatccatgggttctgcaagctaggagaaattggaagagcacttcaagtctggaatctaatgtgctgttctcagagggtaattccaacttcagtaaaccatgtatctattcttctaggcctttgcaagaaaggattccttgatgaagcgaggtcatatttggaaactgtggctagcaaatatcagccatccgatgtagtcctctacaatgtagttattgatggttatgcaaaagtgggtgatattggtaatgctgttcagctgtatgatgcgattattatggctggtatgtgcccaaccattgtaacatgcaactctcttctatatggctactgcaaatttggggatctacatatggcagaaagctattttatggctattcagttaagtgacctgctgccaacaacagttacctacactactttgatggatgcactctctgaagctgggaaagttcattccatgctaagtatttttaaagaaatgactggaaaaggtatcagaccaaatgcaataacttacagtgtagttattaaaggactttgtaagcagttaatgttccacgatgccaaaaatgttcttgatgatatgtatagagaaggttttgatgctgatccaataccttacaacacgcttatacaaggtttttgtgaaactcaggatgctaaaaatgctttctacgtgtatgaactaatggtatgtcgtggagtgatgccctctcctgttacttataacttgcttgttaatgtgctgtgcttaaagggactagttattcacgctgaaatgaaactggagtccttcagaaaacagggtgccgagctgagaaaatttgcatatacaacacttatcaaagctcaatgtgcaaaagggatgccttacaaggctattatgtgggttggcaagcttctagatgcagggtttgaggcatctattgaagacttcagtgcggcaatcaaccgactatgcaaaagacagttcaccagagaagctttgatgctcatatcgatcatgttatctgttggtgtttatccagatattcaactataccgtgtactgggtacagctgtacagaagaaaaatgagtcattctatctacccatattgcaagcccttgctatcaaaactggtatttagtactttgagtctgaagggcaggcctggtgcagtggtgatagctgtctgactaagtcaccatgtcacgggttcgaagcagcctctccgcatctgcggaggaaggcttgccttggtttatcccgtcgcatctgcggaggtggtgctgctgtgcatcgctgtgggctgtgaggcggaggcactgcatctcgctgtgaagtggactgctccatcctctctatgatcctgcaccatcaggggttcgggtgacctttgaggatggtggttaactggttaccttgaagatcccggtgccattgattctttgctacttggcctctccactgctggcaacagacccagggaatgaattagatacctattcttgaccccttcccgcccaaggaggagcaggcaggaactccggtatatggtggtaattggtggcacctttatgtacttctttaggggcagcctaccatggcaggggctgaaagcaggatcaagaagcagaaatatgacaaaaattagtgcgaaatggatactcccatggaggataccagttttgactggaccattttgaagtatcctcagataggctgcaacctgcggatgaaggcaagtgacagaactagtggaggtgttggaccttcaatggatacaattgagaagaccccaggaggtgtccgatagaaggaatcctagtggttatgtgaatccgagtggcaattatgcccaatgaccacgtgagaacatatgtatgtcattgaacgaaattgtaagttaaatttccctccgcgccttgtatgatcgatgaacattcactgctgttgtatcttccctcatgctaggggcggatccaaggggtgggccatggccccaccttaatttttttaacctcttatacctaggtttaggtacacaccaaaataaacaattttttgtatagttagcgtggacaaatctaataaaaactaggttttgatctatttttctgtcgacgcttcactgctcagtccactcttcacctgagccatttgattctcttccctagcgcaagcccagttgtggctcactcgcttcttcgatcatcgactgaccagtaagtcggtgacctaacccgcctgctgcagcgcaccttgccttctcatcactcatcagctcgtcgtctcgtcaggatcctatagacaatgttgatattttgactcctagtccgcaccagtagatgggcaagttgttggtgggaccgtggcgtcacctgtccctcgctgactcattagagtcccatcgcgccgttgcaacacgacaatgggtgtcgcttgccgtcaccgtcatctatcgctaccttgcttcctgcactcgctcctcctagctgtcgtcgtctcaccaacaccatctcacgacaatttcgatgactcgccagaacgacgcgccgatgcggctgctccgccctagtgcctcgtcctcagtcagtgcacctattttttttctctctagctctccttttggtagccaaaaaagttttttggtattcatatcattttggaaacactagatattatcattaatctatatttatggtctagtctggtgatttgtctcttgcactttcggccccacctagaattttgttctgcgtccgccactgcctcatgcagtcctcgcacatctcatgagtttttcctgcacatgttgtgttacttgtagctgtactgacactcttgctatacaggataaatatgtagccgcactcttgtacagaattggttgatgactataaaattagcagttctagagctatttgtgttttccttgattggtagctcatgccctgtattcctggatagaagaactttgtcaagaactgtacaattcgtagatggcaagctgtctgaacttttatcgtagagcagttccattttatagcattgatctgtgttttcgcacgaacacctgtgtgtcatgtgtggcatattagttgttttagtttctttttccctataaatctgtaataggtaccaactcaccacgtatagtgttctacacgaccttttaattagctggtgattacttcctattttgtggtatcttatgcgcacaacgctctttctgaggatcaaaccttctaatcacaattaacagttgggctgtcctagtgataataccgctgaaggcgctgttttcatattcgttgacagtaggtttacatacgagtgtccagtgagtacatctgctgatgtgtttgtttaagggttttgtgggctttctataaagtttgttggaagccatgttaggaccattgattgatcggtaacccctttgttgatgagtgcaatgtgtgaaaagaaaattgttgctcctcggttcaatccctggcaaaaagaagaaaaatgacaagcgctgttgactgtgttgagatccctaattcattcgtgcttcataggttgattctataatgtcttgtgatgtatatttgtaataattgatgaactccatatttgtgcgttttctgttttttagaagaaaaaaatataattgttctcatgtcatatagttttttgtgcagccatgcactattcaacacggtaagggctcgtttggttgcatgataaattggaggtaagaatcctctccaagtcccacgcgaccaaacaagccctaatgaatttgtagtgcggctgcttaattcacatgcgagagcccacggattcatatacttagggcttgtttggataattttggattggagtggattgaggtggtataaggtgtattgaagtgtaatataaactaatttccctttcaatccctaaaatacacttcaatccacttcaatctctctttatccaaacaaggccctttgcttacttgtctggtgggcaacgcttgctgtgatggccatttaatagagtaggatcagcccgtggagtcgaaacggatcagaggtggatcggatagagctgaataaaatcagtatgggttagagtggtattgggctcagtcccaaatagccgatacggttggagtggggttgggggttggatcctgacccattatcaggccttataactgtcttatcttttagatacataaccacacattattatatattttttgtaatatctaactaactacagatctatgattgtactgtgtggtacacagctcttactaataggaacaattttctgtatatcctggtgcaccatcaagtattcagcgatagcaattaaagcatgggaaaatgaagtgccacatgccattccatacctttctgttttgctcctgttcaagggtcagaatgtgtgtctgctttcgatgagcagagtttaggagtcccctgtatctggaaaaggaatacgtgttctcttcttcataaaaccgtcaatggcacaggctggctgatggcgctaagaatttactctgagctatcagcatcagccaccgctctcacgtcggtgactggagtttgcaatctctactacttattaagtaagcaatagtagtctgcctctgacgtgttctgccgttctgccgtctacgtgttctgccatctacgtgcgcccccagggccagcaaaaatttacacgtactcacgagttgaatctagatagttcagccactaaacacataacaacagagttcttattgttgcgtccgagccaacgcttataagccgctctatgtctcctttactagccagtatggtactaatttttttttgcaagacacaacaccacagcagtaccggcgctctgggctgaaattttggtgcggcccatacgtttggggcggcccatactccaccgcagcagtcttcttccgcacgacgtcgcgcccaaccgctcggtcagctcgtggagagcccggaggagagttccactacgcaattcgctacctcggcttcgacatcggcgacgtgcagagcccggaggacatcgtcgccgcggaacggctcgtttttttcccggtgtcggcgccttcggctccgccatggacgtcctcaacaggacgggcatgggccgacgcactccgtgagtacatccaaagggaccgccccttcctaggcatctgcctcggtctccattctctccactcgctccccacacctctct

SEQ ID NO: 213042 - DNA, 1506 bp, Zea Mays
cctgcccgggcggagggaggcgcggcgcaacggacttcatgctgccacccgccgacccgcacctcaccggctcacctacaccctcctcttcataccgcgctcaggagcattcgagaagccgaagaaaattcgaagacgaggaccagctacactgcggacggacttcgggcatggagggccagttccaggttggcaaggaggaggtcatccaagcatggtacatggacgacagtgaagaggaccagaggcttcctcatcatcgtgagcccaaagaattcattcctctcgacaaactttccgaactaggaatattaagctggcgcctaaatgctgatgattgggagaatgatgagaacctcaagaaaattcgtgaagccaggggttactcttacatggacatttgtgatgtgtgcccagagaagttgccaaattacgaggctaagataaagaatttctttgaagaacacttgcatactgatgaagagatacgatattgccttgagggtagcggctactttgatgtgagggaccaagatgatcagtggatccgtgtagcggtaaagaaagggggcatgatcgttttgcctgcaggaatgtatcatcgctttacgttggatagtgacaactacatcaaggcaatgcgtctatttgtgggtgagcctgtctggacaccatacaatcgtccgcatgaccatctcccggctaggaaggagtacgtcgagaaaatcatcaaccgaggtggaaaccaagccgtcgaagctcgttgagcgtgtccactctacatgtcctcctgccgtctcagcctcttgtgttttacaccctacaactcctagtaccgccgaataagatttgctatctgcaatgtgctcatgccaccgctgtgtgtgccagttaacagtttgcacgaaaccctagatattttgttatacgaatgaatgacatgtggtgtttgataaatgatgaaacgatgatggttcaaatcaacccacctgtctttcacaagttcgatgaaacgttgcgcgcaatggttgtttactgaaaaggatgcctctaaccagccgtcagtctgactggatgtcgtggatcaactgccgaccaacatcttgtctgcgctcgtgccgcgtgagtaactgctgtcgttctcactgagggcgagcagggccttggtaatgatgtactgtttcacagtaacagttctgttgatcaccgaaaggtttgtgcaggttgatgtgatgtgacgatgctgggtggctcctgcctagaaaacgtgtggtggttgaaatgaacgcgttccatgtctgtcgtctagtcactcgtcgagctttggtcggcggagccgatcaccggccaagaacatttgtgatctcgatgatatacttgtgtgcggctgcattgccgcacaaaaggttcatattgccatcatcgttcctgctcacagatggtagtggtgacgcactggcaaatagacctgatttcattgcgcagccagattcatctatggctgac

SEQ ID NO: 213043 - DNA, 1743 bp, Zea Mays
gcggctggggatgctgccacgtgggccacccgggcgtctttaaaccggcccgctgggagttccatgcttcctcgtccctccctgcacgcctggcctgggctggccgcctccgaccaccgtacgtcctccaccgcgtcgccgccggccggcctctgcccagcccgggctgcctgcgagggcttctgatggccctcgacgccgtcctttcctcctagtgcccagctttattgcagatccagccctctgatcctcgtcttctttcacctctccaacatgaaggtcaacaccaagatcaagctggagccggtcatggcgccgtcgtcgtccctgccgcggagcgccagcgagctacccgacccgccgtcaccgttcagctccaacacggcgcaccaccccgtctccgtgcccaccacacctaggttgtccttatcgtgctcgtcgttcggccacatggtgaccccgcccaccgacacaccgccgatcacgcccaccaagaagcaggacgacaagccgaagccgacgccggaggccgccaccgcggcgaactacgcgtcgttgtggtcgcccaagcgcctcatgcagcgcgctgcccgcgctttccgccgcagcaggtcgcgcgcccgcgtcaggacggtcaaggacctcgccgaggaacgggcctcagtgctcgccgccagcagcaaggtctctgatgaggcggcggcggcggctaccgcggtgccgcctgcaggtgccaagacctccagcagcaacgatgcccgcgacggcgccatgggcagcgtgcaggacgagccgcggcagcagcgccacgatgactatcaccaccccgagatcgtccccgagaagatcatacacgaggacgcgttgccggtcgttgctgcggagaaggagactgccgccgccgccgcaacctcgaaggaggaggaggaggtggagtcgcccaagaaaggagcggctctgtcgccggtgccggaggccatcgttgccgtagcagcagtggaagacgtggtggcggacaagttcgtgacggttgtgaaggaggcgatcaagaagcaggaggcggaggaggacgagaaggaggaggcaatgcggaggttccagggcagccgtgtgaggacggcgttggaggcgcgagcggagtcggagcagccgcgtcgccgagaggtggcgcggagcaacgacgtgatcgaggaggcgcgcacgaagctgctggagaagcgtcggagcaaggtcaaggcgctcgtcggcgccttcgagactgtcatcgacaccaagaaggacagcgacgacgcggccgccggcaagccggagcaccacaaccgcaacaagtcggcttaaatgattaaacgtatacgcttcgtgtcttctccttaattattataattattactggccagcccatcgccgcatggatgcatgcacggcgctaattaatccttcttgctactaattaactccggttaattggtggcacaccatgtatagcgtcgtggagttctctatattacaccatagagggaaatgtggagaccggtgttgcattctatacaatttcttcttataattatatgattcatcggttttattctcccctagaattgtgttggtttctcaggtcactcttattagacgcgttttgcttggactttagtttttatgatccatttggaacagctacaccgccttagttcctttaaacccaaactttagggactaaaactgtcctatatttttttggaaggc

SEQ ID NO: 213044 - DNA, 4254 bp, Zea Mays
gccacccggacatccagggaaagcccgccacggaccggaatttaacggaaacaccctctcctcgcatctgttctccctccctgcgtggatccaccgtttctttccattcccgtttccgttcctcggtcctcaccaacaaaccccttccggaactcccaagcctccgatcctcgcctcagaaacctgccggatttgcgggcctctcaggcgtcgtatggaaccagccaggtcagttcgctgcgtgtttcgcgaccgcttctcggcggcggcggcggcgctgctttgcgttgcgcgtttaatctgttcgtgggaaggcgtcacccgttcgtgctggtttcatggaccaatacgagccgcggaaccgcgatcgctgatagctctggagtcgacttgtttgtttccattcgtgttcttcggaacgcgttttcacatgtgcttaatttggtttcgtactttggttttttttttctgttccgcgctgattttgttgggaaggaaacaagatgccctcgtttttttgttcggatcggtaagagatgccaccgttcgatgccatcttttgtatgcacttcaggatttagtgtttcattctgtctatgcttttttttcctttcgagttctgtgcccgacggggacattaagcagttacagtaagcactaaccaataaatctgtcacggaacctgttagagacgtggggctaaaaagtgatttgatttttttttacctttttcatggttccagtgacatgtggagtcatgcaattgctccgtcagcgtgttctcccacctgtgaagctttgagcaatcgtactggcgtctttcactccctcactcttcttggctttgtttgattggagatagccagataggttgatgcgcatcatgatcttatttatgttcatttcttatttatgctggcacttgtgtttgctgttcttgctcatgttcatttcttatttatgctggcaataaatactggacacgagcttagcagtatatgttgcttagcacgtggctaatatttcccaaagtttgcctctccccattagaagcttcctcgctctccttatgtttgtactgagtttttttatttatttagaaacgcggcaagacaattgccgactgaaatgcactggagatgtttggccatggaacaagtacttaagtaaaaaacggcctgaaaatcacaatcttttttttcttcatctgggtggcgtatgactcactcctctataaccatcttatcgttgattagcattagaggcaataatctgattattgattagcaatggatactcgaactaacacggatagggaaatatatcttgtaatcagtctgtcttaataaatgcttacattgcagttggggtttgctgtcttcatgtttcccgaaagcagagtgttgtgtccgcatctttggttgattagtctagaaaaggtgggggggaggggggaagctttgttaagctggcttttattcgcacattagtcgattatggtaaaaattatattctatctttactttatgcgttttctcaggattagctcctcctttagcttactgaatttgtggacactttgtttggagaccatcttttcctgtattaagtttgttaggcgcagacactttttttttaacgcaatgcacatacacttttcgtgtatggtctggtggcaatgatttaaatggagcgggatagacattaggtttgttaatcagtggacagtctgttgctgttcatgacaggtgggaaagttgagcgaagctgaaaccgtgtcccttattttgcaagggtggtgctcataaggaaccacccccctcttctttgctggtgggagaacaccaaatggcccagctgttgcaccatcaggattctgcattctacagcaaggaattgcacgggtgccggtggggtattcttcaattctttgggtttcgccgtcgcctacggtccacaaagatgctctctgacaagagacatggtcaggagaaaaacagccgtggaagtagacgccgaagcagctcctatgctccattgaagaacgaagacagtgcaattctggatgatgaggaaaacactgaggtatatcaggttacaaaaaaacagaaggcctcaaaaaggaattctggcaagtctagtttgaggtccttgattctaacgaagttatatggaaaggaaggccagaaagagaagatgcttccggttgcaccaaagctactccgcactatttcgatacactatctggaaagcaatgaatacgttcttgacggcgaatccacttcgagcggcgatggttcttcaaacagtactaagccgccgatgcaaaatgctggcgatatgatgaatctgcaccatgctacatctagcgtcccagatggctgtggtgtcgattcaagctcctcacttctcctaaagatagacgacgtccgtacgaagcgaaagaagagccaccgtagcatttcgatggacgggattcttcacaaggtcccctatgggaagaaggtgtccggagatgtgatcagtgaaggtctcccccgatcagcctctgccacgtacgatagggacggcgcgaaaccttactttggtggtgctgctgcaaagaggcatgcaaaccaagggtttcggcgttcacgttccctcagtgaatcctgggaaaactactcgcgcctacttgattccatctcgagtggtgagtccaaaagaacactggccagctctaagtctaccagggatcattccctagatggccctgtcgcgagtacttcattgcaaagaacttctgaagccttgaggtctcaaggtctgggtaaacgtgatgagaacctcgtgactgcagaagatgcgttggcgccacatgttcaagagaaaactggtgaagttgctaagggtcagagctccagcgatacgatggtcgctggtggctctgaaaatcctgctttacctgacgagcacgttgacgacaaagctgaagaaaacacatgcgctgctccttcaccttcagaagctgtcggtatctcagaagaacaggcagtgagtcgtgacggtaacagtcagactccctcacctgaagttggcataccagaagaacattctgcagaagcttatgatgatggtgatggtcagatccactcgtcaacacaggctgctgatgcatatgctgctctgtcttcagaggagaccaccgtttcagaagaacgtactccagtttctcatggcaaccaaacgcacccgttccatacttcagagccaacagaaggtacgttgttggacttggacccaagagttgtccattcaaatgacgctgacgcttcaaccggcatcgctgccgtagaacaagaaagcggcttcgacggcctccaagtagacccaaggcacgagaccgagttccgctacgtgaaggagatattcagaaagtcgagcttcagcaccgagacgctgttcgacgaatggtgctcacagaacatcagtgtcctccaggaagcggattgccagcactacgaggccgccgcggcgtcgtacgacctgtcggcggacatgtcggccgagcagctgctcctgttcgacctgacgaacgaaggcctgctggacatctacaggaggcactccgtctccaggtctaggctctcctggttctcgtctttcgaccggccgagacctgtggggagccgtgcgctcggggagctgtggtctgggctgagcctccgtctggacggacggcggccacgggccagcgtccacgtcgacgcggttctgtcgagcgacctagcgaagagcgacccctggacggatttcccgcggggcgctgagcgtctggggagcaggctggcggactctgtgtttgacgagcttctgagtgagctcgttcagcagctcgcggagctttgagtgcgggcaacaaggcgtctgtttttttgtgcctatttttcgtgtttaggggggttctatattgtaggtactagttcatttcttttttaggacaagataatctggggattattgttgttgttattaggtcttaggaattcaattcgtgtgctggaaaagttttgcctgatgcactgatgggtgctagtgtaagtgctgactgaaagagcaacatttgtacgtacaccttcgagagagagagagaaaaaaaatgtatgtatatatagtcttggaaatgaaggttacgaaatagaaatttgtggagcaggcaaaggtgaaagtgaaacgcgaaaagaaacgattgaaagtgaaacgcgaaaagaaatt

SEQ ID NO: 213045 - DNA, 2567 bp, Zea Mays
tactggcgtctttcactccctcactcttcttggctttgtttgattggagatagccagataggtgggaaagttgagcgaagctgaaaccgtgtcccttattttgcaagggtggtgctcataaggaaccacccccctcttctttgctggtgggagaacaccaaatggcccagctgttgcaccatcaggattctgcattctacagcaaggaattgcacgggtgccggtggggtattcttcaattctttgggtttcgccgtcgcctacggtccacaaagatgctctctgacaagagacatggtcaggagaaaaacagccgtggaagtagacgccgaagcagctcctatgctccattgaagaacgaagacagtgcaattctggatgatgaggaaaacactgaggtatatcaggttacaaaaaaacagaaggcctcaaaaaggaattctggcaagtctagtttgaggtccttgattctaacgaagttatatggaaaggaaggccagaaagagaagatgcttccggttgcaccaaagctactccgcactatttcgatacactatctggaaagcaatgaatacgttcttgacggcgaatccacttcgagcggcgatggttcttcaaacagtactaagccgccgatgcaaaatgctggcgatatgatgaatctgcaccatgctacatctagcgtcccagatggctgtggtgtcgattcaagctcctcacttctcctaaagatagacgacgtccgtacgaagcgaaagaagagccaccgtagcatttcgatggacgggattcttcacaaggtcccctatgggaagaaggtgtccggagatgtgatcagtgaaggtctcccccgatcagcctctgccacgtacgatagggacggcgcgaaaccttactttggtggtgctgctgcaaagaggcatgcaaaccaagggtttcggcgttcacgttccctcagtgaatcctgggaaaactactcgcgcctacttgattccatctcgagtggtgagtccaaaagaacactggccagctctaagtctaccagggatcattccctagatggccctgtcgcgagtacttcattgcaaagaacttctgaagccttgaggtctcaaggtctgggtaaacgtgatgagaacctcgtgactgcagaagatgcgttggcgccacatgttcaagagaaaactggtgaagttgctaagggtcagagctccagcgatacgatggtcgctggtggctctgaaaatcctgctttacctgacgagcacgttgacgacaaagctgaagaaaacacatgcgctgctccttcaccttcagaagctgtcggtatctcagaagaacaggcagtgagtcgtgacggtaacagtcagactccctcacctgaagttggcataccagaagaacattctgcagaagcttatgatgatggtgatggtcagatccactcgtcaacacaggctgctgatgcatatgctgctctgtcttcagaggagaccaccgtttcagaagaacgtactccagtttctcatggcaaccaaacgcacccgttccatacttcagagccaacagaaggtacgttgttggacttggacccaagagttgtccattcaaatgacgctgacgcttcaaccggcatcgctgccgtagaacaagaaagcggcttcgacggcctccaagtagacccaaggcacgagaccgagttccgctacgtgaaggagatattcagaaagtcgagcttcagcaccgagacgctgttcgacgaatggtgctcacagaacatcagtgtcctccaggaagcggattgccagcactacgaggccgccgcggcgtcgtacgacctgtcggcggacatgtcggccgagcagctgctcctgttcgacctgacgaacgaaggcctgctggacatctacaggaggcactccgtctccaggtctaggctctcctggttctcgtctttcgaccggccgagacctgtggggagccgtgcgctcggggagctgtggtctgggctgagcctccgtctggacggacggcggccacgggccagcgtccacgtcgacgcggttctgtcgagcgacctagcgaagagcgacccctggacggatttcccgcggggcgctgagcgtctggggagcaggctggcggactctgtgtttgacgagcttctgagtgagctcgttcagcagctcgcggagctttgagtgcgggcaacaaggcgtctgtttttttgtgcctatttttcgtgtttaggggggttctatattgtaggtactagttcatttcttttttaggacaagataatctggggattattgttgttgttattaggtcttaggaattcaattcgtgtgctggaaaagttttgcctgatgcactgatgggtgctagtgtaagtgctgactgaaagagcaacatttgtacgtacaccttcgagagagagagagaaaaaaaatgtatgtatatatagtcttggaaatgaaggttacgaaatagaaatttgtggagcaggcaaaggtgaaagtgaaacgcgaaaagaaacgattgaaagtgaaacgcgaaaagaaatt

SEQ ID NO: 213046 - DNA, 835 bp, Zea Mays
tggctcacttaaatgagattctaccaaaactctgcaaagcgaaatcaaacaagggtacctcgcccagaagcacgcgctgctagtggcgaagaacctgaagctactgaccaagggtctccctaacagcaaactggcgacttacagcaccggctatccgctggcgctcgtctctcttggaaggaaggaagggctggctcagtttccattgctgacgctcagcgggtgcttgccaggcatgatcaaatccggggatctattcgtcagcaagacgaggaagcagatgggcctgaatggttgactccagtccgaggaagcttgaaaaaatagctcgggtcctgggttatatacagacgatggattcctttacacacagcttgtgttttgctcgtatggccatatgtgttcgttctgtatctgtacgtgtgatggtgtcgtcgtgtggatgcttggaatggtgactagcagagtgtatgctacgtacatgtatacatggacctttttggtccaacaaaatgttgcttctgtagtatgtatgggcgcattttgtttgctggcaagtaaacaatgaaatcatctttgcttgctggcaacacgatgtcagcagtggcaatttgatgcctatgggccggcctatggatggagaagatatatgtgcatctggacatctggtcctatggggctatgggcgcctggagcagccgtgcaagtctgggactgcacgagtgtccagtgcccatccattgcaatctgttcccgtgcttgggcttgcactgttctccctgtacggagtagtattcacggttaatgtctgcaaaaaaaaaaaaagttggccttt

SEQ ID NO: 213047 - DNA, 1524 bp, Zea Mays
gtcgccttggctctccaccggaaagactacctggagatcccctgggctgagctgcgctccatggtcgaaccgtcctttgctgagagatcgttgatctaccacaaagattacctcagcgatgcgaccatcgtgacatcttctgcggtcaatatcactgaacacgcggtccttactgctgacggccactctcttccatatgattatctcatcatagcgactggccatgctttggcttctcctgccagcagagctgagaggataaaagaattccagagagataatgggaagatagagtcgtcagaatctgtgctgataattgggggtggtccaactggtgttgaactggctggagagattgtggtagactacccggggaagagggtgacccttatccatagaggaccgcgtttactcgaattcattggagataaggcttcaaagaagtgccttgattggctgacttcaaagaaagtagacgtgctccttcagcaatcagttgagttgggctcattatcagacacagagaaggtgtacaagacatcaggcggagaaacagtaacagctgattgccactttgtatgcattggaaagccactgagttcgtcgtggctacatgataccatcctaaaggaatccttggatagcaaggggagagtaatggtggaaaaggatttaagagtgaaaggttttaataacatttttgcgattggtgacatcacagatattcctgaaatcaaacaagggtacctcgcccagaagcacgcgctgctagtggcgaagaacctgaagctactgaccaagggtctccctaacagcaaactggcgacttacagcaccggctatccgctggcgctcgtctctcttggaaggaaggaagggctggctcagtttccattgctgacgctcagcgggtgcttgccaggcatgatcaaatccggggatctattcgtcagcaagacgaggaagcagatgggcctgaatggttgactccagtccgaggaagcttgaaaaaatagctcgggtcctgggttatatacagacgatggattcctttacacacagcttgtgttttgctcgtatggccatatgtgttcgttctgtatctgtacgtgtgatggtgtcgtcgtgtggatgcttggaatggtgactagcagagtgtatgctacgtacatgtatacatggacctttttggtccaacaaaatgttgcttctgtagtatgtatgggcgcattttgtttgctggcaagtaaacaatgaaatcatctttgcttgctggcaacacgatgtcagcagtggcaatttgatgcctatgggccggcctatggatggagaagatatatgtgcatctggacatctggtcctatggggctatgggcgcctggagcagccgtgcaagtctgggactgcacgagtgtccagtgcccatccattgcaatctgttcccgtgcttgggcttgcactgttctccctgtacggagtagtattcacggttaatgtctgcaaaaaaaaaaaaagttggccttt

SEQ ID NO: 213048 - DNA, 1751 bp, Zea Mays
ggtaggtcacatgcggtcggatggtgagagcctgagagggggtggcagcaccatggcgcgcgcttcaccgtccgtcccgacgcgtcggtcgagtactcgagtcgtcagcggtcgctgggtggcgcgagcgtcaggcgatggcggaggcggaggagaaggcgagggtcgtggtggttggcggcggcgtcgccggctccctcctcgccaagactatgcagggccacgccgacgtcgtcctcctcgacccgaaagactacctggagatcccctgggctgagctgcgctccatggtcgaaccgtcctttgctgagagatcgttgatctaccacaaagattacctcagcgatgcgaccatcgtgacatcttctgcggtcaatatcactgaacacgcggtccttactgctgacggccactctcttccatatgattatctcatcatagcgactggccatgctttggcttctcctgccagcagagctgagaggataaaagaattccagagagataatgggaagatagagtcgtcagaatctgtgctgataattgggggtggtccaactggtgttgaactggctggagagattgtggtagactacccggggaagagggtgacccttatccatagaggaccgcgtttactcgaattcattggagataaggcttcaaagaagtgccttgattggctgacttcaaagaaagtagacgtgctccttcagcaatcagttgagttgggctcattatcagacacagagaaggtgtacaagacatcaggcggagaaacagtaacagctgattgccactttgtatgcattggaaagccactgagttcgtcgtggctacatgataccatcctaaaggaatccttggatagcaaggggagagtaatggtggaaaaggatttaagagtgaaaggttttaataacatttttgcgattggtgacatcacagatattcctgaaatcaaacaagggtacctcgcccagaagcacgcgctgctagtggcgaagaacctgaagctactgaccaagggtctccctaacagcaaactggcgacttacagcaccggctatccgctggcgctcgtctctcttggaaggaaggaagggctggctcagtttccattgctgacgctcagcgggtgcttgccaggcatgatcaaatccggggatctattcgtcagcaagacgaggaagcagatgggcctgaatggttgactccagtccgaggaagcttgaaaaaatagctcgggtcctgggttatatacagacgatggattcctttacacacagcttgtgttttgctcgtatggccatatgtgttcgttctgtatctgtacgtgtgatggtgtcgtcgtgtggatgcttggaatggtgactagcagagtgtatgctacgtacatgtatacatggacctttttggtccaacaaaatgttgcttctgtagtatgtatgggcgcattttgtttgctggcaagtaaacaatgaaatcatctttgcttgctggcaacacgatgtcagcagtggcaatttgatgcctatgggccggcctatggatggagaagatatatgtgcatctggacatctggtcctatggggctatgggcgcctggagcagccgtgcaagtctgggactgcacgagtgtccagtgcccatccattgcaatctgttcccgtgcttgggcttgcactgttctccctgtacggagtagtattcacggttaatgtctgcaaaaaaaaaaaaagttggccttt

SEQ ID NO: 213049 - DNA, 2884 bp, Zea Mays
cgcgtcgttgatccgcgtgccgtgtcaccttcgccgcgtggtccggaccagtgattgatcctgctaaatgtcgattgatgagtgtggatgaaaagcgagaactcgttcgtgatttatcaaagagcccagaaagtgctcctgacaggctccagtcatggacccggcgagaaattgtagagattctttgttctgatcttggaagggagaggaaatatactggtttatccaagcagagaatgctagattatctatttaggttggtgtctggaaaatcatctggtccagtggaacatgtgcaagagaaagagaaagggagagagaaagggaaagagagagaaaaagaatcaattcctgagcccaatacaactaaccaccatcagtcccctgccaaacgaccaagaaagagtgataacccatcacgattaccgattatcacaaacaactcagcagcatctgatgtaactgggccaactaataattcacggttctgtcaaaatgtagcttgcagagctattctcagggacaatttttgcagacgctgttcatgctgcatttgtttcagttatgatgataacaaggacccaagcctctggttgtcctgtagttcagaccaacacttacaaaaggatacctgtggtttctcatgccatcttgaatgtgctctaaaggatgaaagaacaggtattctgcagagtggacaatgcaagaaacttgatggtggctattattgcactcgctgttggaaacagaatgatttgcttgggtcctggaagaaacaactggtgatagcaaaagatgctcggcgattggatgtgttgtgtcatcggatttatctcagtcacaagatcctcgtctccacagaaaagtacttggtattgcatgagattgttgatacagcattgaagaaactggaggctgaggtcggtcctatatctggagctccaaatatgagtcgtggaattgtcagtcgacttactgttggtgccgaagttcagaaactttgtgctcaagcaatagatgctatggaatcattgttctcgggtgtatctcctgctggttcaagaatcccgcgaccatgtatggtaccaccaaattttgtgaagtttgaagctataacccaaacatctgtcatggtatttttggatttggttcactatcctatgcttgcccaagaggcaacttcatttaatatatggcaccgaatggctgttactgaagcttacctgacaaatccgactggcataatacttcccccatcgaaaaaattacctgtcactgggcttgcaccggctacaagctatatctttaagattattgctttcaaaaactcaatcgagttgggttcatgggaaattagaacgaagacaagctatcaaaaggatgatccaaggggttcaatgccaggtggtactagactaggacataatagtgagagcctgaaggcaaacagtgatggccagtctgatccttcctcagagggtgtggactcaaacaataatactgctgtttatgctgatctaaacaagtcccctgaaagtgattttgagtactgtgaaaatcctgagatcctagattcagataaagcgtctcgtcgcctcagcgaacacatcgatgacttgcaaaatatacagatggctgcagatagggtaacagaagtcactgagctggaagaatcgcctgggctctcagcctcagccttggatgaggaacccaacgcttgtgttcaagcagtgcttctcagggagccaaacccactaggacacaatcaaagaactgtagttcctagatcacagcatgcatctaatgtactgggtggaaatgagttggtgattgttggacctcgatatgctggttctgtgccacccattgcaacaagaggtctggaaaacagcaaggagagcggtggaaggggcttcaaacccaaaccttgtaacaacattttccaaaatggctcttcaaagcctgaaagggaaccgggcaattcgtcaaacaaaagaacagctggtaaaacggaggaccttggtcacaaggatagttcatctgaagtgtcctacgagtactgtgtaagggtggtcaggtggctggagtgcgagggctacatcgagacaaacttcagggtgaagtttctcacatggtttagcctgcgtgccaccccgcaggagagaaagatagtcggtgtctatgtggatacccttattgaggaccctgtcagcctttctggccagctcgttgacagcttctcggaggcggtatatagcaaaaagcggacgccttctggtttctgcatggacctgtggcattgaagcaccacaagcacctaccgtttgctttgtagggagcacacattcgggcccattcttttgttgcagatcgttgcattgattcttcattggaaatttcgctgaagtatttgacttgcacatcttcattgaaacttaacttttcaatgacagtaggttaagttaatgggcaatttctttttttctttttccgttctttacatttgctccatagtaggttaccgtgctatcatctgtaccgtccatgttaaccttagagcatcaatgagccgcatcgttcggtcagcctggggcatagtggattttgtggcgtgtggctgctcgaaggatgattgtcaggctggaccaggaatgcgcctttctgtgggatgaagcagattcgtatggacgttgtcagtgaaatggttgtgctgtacctggggttttgcattttcttgctgactttgttgggaatgggaggaatgacgtttaagatgcagaatgtctgccttattaattaatcttatgttgactcatacttctctatcaactgcgtttatggttcgctggtgttctgtctgagggcctccggttttgtgttgcgc

SEQ ID NO: 213050 - DNA, 2862 bp, Zea Mays
cgacacctctccccccccccccccccaccccatcctcctcccctcagcctctccggtgggcgggcgggcgggcgggcaattcggccatggatcccccacgcggaggaccagtgattgatcctgctaaatgtcgattgatgagtgtggatgaaaagcgagaactcgttcgtgatttatcaaagagcccagaaagtgctcctgacaggctccagtcatggacccggcgagaaattgtagagattctttgttctgatcttggaagggagaggaaatatactggtttatccaagcagagaatgctagattatctatttaggttggtgtctggaaaatcatctggtccagtggaacatgtgcaagagaaagagaaagggagagagaaagggaaagagagagaaaaagaatcaattcctgagcccaatacaactaaccaccatcagtcccctgccaaacgaccaagaaagagtgataacccatcacgattaccgattatcacaaacaactcagcagcatctgatgtaactgggccaactaataattcacggttctgtcaaaatgtagcttgcagagctattctcagggacaatttttgcagacgctgttcatgctgcatttgtttcagttatgatgataacaaggacccaagcctctggttgtcctgtagttcagaccaacacttacaaaaggatacctgtggtttctcatgccatcttgaatgtgctctaaaggatgaaagaacaggtcctggaagaaacaactggtgatagcaaaagatgctcggcgattggatgtgttgtgtcatcggatttatctcagtcacaagatcctcgtctccacagaaaagtacttggtattgcatgagattgttgatacagcattgaagaaactggaggctgaggtcggtcctatatctggagctccaaatatgagtcgtggaattgtcagtcgacttactgttggtgccgaagttcagaaactttgtgctcaagcaatagatgctatggaatcattgttctcgggtgtatctcctgctggttcaagaatcccgcgaccatgtatggtaccaccaaattttgtgaagtttgaagctataacccaaacatctgtcatggtatttttggatttggttcactatcctatgcttgcccaagaggcaacttcatttaatatatggcaccgaatggctgttactgaagcttacctgacaaatccgactggcataatacttcccccatcgaaaaaattacctgtcactgggcttgcaccggctacaagctatatctttaagattattgctttcaaaaactcaatcgagttgggttcatgggaaattagaacgaagacaagctatcaaaaggatgatccaaggggttcaatgccaggtggtactagactaggacataatagtgagagcctgaaggcaaacagtgatggccagtctgatccttcctcagagggtgtggactcaaacaataatactgctgtttatgctgatctaaacaagtcccctgaaagtgattttgagtactgtgaaaatcctgagatcctagattcagataaagcgtctcgtcgcctcagcgaacacatcgatgacttgcaaaatatacagatggctgcagatagggtaacagaagtcactgagctggaagaatcgcctgggctctcagcctcagccttggatgaggaacccaacgcttgtgttcaagcagtgcttctcagggagccaaacccactaggacacaatcaaagaactgtagttcctagatcacagcatgcatctaatgtactgggtggaaatgagttggtgattgttggacctcgatatgctggttctgtgccacccattgcaacaagaggtctggaaaacagcaaggagagcggtggaaggggcttcaaacccaaaccttgtaacaacattttccaaaatggctcttcaaagcctgaaagggaaccgggcaattcgtcaaacaaaagaacagctggtaaaacggaggaccttggtcacaaggatagttcatctgaagtgtcctacgagtactgtgtaagggtggtcaggtggctggagtgcgagggctacatcgagacaaacttcagggtgaagtttctcacatggtttagcctgcgtgccaccccgcaggagagaaagatagtcggtgtctatgtggatacccttattgaggaccctgtcagcctttctggccagctcgttgacagcttctcggaggcggtatatagcaaaaagcggacgccttctggtttctgcatggacctgtggcattgaagcaccacaagcacctaccgtttgctttgtagggagcacacattcgggcccattcttttgttgcagatcgttgcattgattcttcattggaaatttcgctgaagtatttgacttgcacatcttcattgaaacttaacttttcaatgacagtaggttaagttaatgggcaatttctttttttctttttccgttctttacatttgctccatagtaggttaccgtgctatcatctgtaccgtccatgttaaccttagagcatcaatgagccgcatcgttcggtcagcctggggcatagtggattttgtggcgtgtggctgctcgaaggatgattgtcaggctggaccaggaatgcgcctttctgtgggatgaagcagattcgtatggacgttgtcagtgaaatggttgtgctgtacctggggttttgcattttcttgctgactttgttgggaatgggaggaatgacgtttaagatgcagaatgtctgccttattaattaatcttatgttgactcatacttctctatcaactgcgtttatggttcgctggtgttctgtctgagggcctccggttttgtgttgcgc

SEQ ID NO: 213051 - DNA, 2226 bp, Zea Mays
cgacacctctccccccccccccccccaccccatcctcctcccctcagcctctccggtgggcgggcgggcgggcgggcaattcggccatggatcccccacgcggaggtcctggaagaaacaactggtgatagcaaaagatgctcggcgattggatgtgttgtgtcatcggatttatctcagtcacaagatcctcgtctccacagaaaagtacttggtattgcatgagattgttgatacagcattgaagaaactggaggctgaggtcggtcctatatctggagctccaaatatgagtcgtggaattgtcagtcgacttactgttggtgccgaagttcagaaactttgtgctcaagcaatagatgctatggaatcattgttctcgggtgtatctcctgctggttcaagaatcccgcgaccatgtatggtaccaccaaattttgtgaagtttgaagctataacccaaacatctgtcatggtatttttggatttggttcactatcctatgcttgcccaagaggcaacttcatttaatatatggcaccgaatggctgttactgaagcttacctgacaaatccgactggcataatacttcccccatcgaaaaaattacctgtcactgggcttgcaccggctacaagctatatctttaagattattgctttcaaaaactcaatcgagttgggttcatgggaaattagaacgaagacaagctatcaaaaggatgatccaaggggttcaatgccaggtggtactagactaggacataatagtgagagcctgaaggcaaacagtgatggccagtctgatccttcctcagagggtgtggactcaaacaataatactgctgtttatgctgatctaaacaagtcccctgaaagtgattttgagtactgtgaaaatcctgagatcctagattcagataaagcgtctcgtcgcctcagcgaacacatcgatgacttgcaaaatatacagatggctgcagatagggtaacagaagtcactgagctggaagaatcgcctgggctctcagcctcagccttggatgaggaacccaacgcttgtgttcaagcagtgcttctcagggagccaaacccactaggacacaatcaaagaactgtagttcctagatcacagcatgcatctaatgtactgggtggaaatgagttggtgattgttggacctcgatatgctggttctgtgccacccattgcaacaagaggtctggaaaacagcaaggagagcggtggaaggggcttcaaacccaaaccttgtaacaacattttccaaaatggctcttcaaagcctgaaagggaaccgggcaattcgtcaaacaaaagaacagctggtaaaacggaggaccttggtcacaaggatagttcatctgaagtgtcctacgagtactgtgtaagggtggtcaggtggctggagtgcgagggctacatcgagacaaacttcagggtgaagtttctcacatggtttagcctgcgtgccaccccgcaggagagaaagatagtcggtgtctatgtggatacccttattgaggaccctgtcagcctttctggccagctcgttgacagcttctcggaggcggtatatagcaaaaagcggacgccttctggtttctgcatggacctgtggcattgaagcaccacaagcacctaccgtttgctttgtagggagcacacattcgggcccattcttttgttgcagatcgttgcattgattcttcattggaaatttcgctgaagtatttgacttgcacatcttcattgaaacttaacttttcaatgacagtaggttaagttaatgggcaatttctttttttctttttccgttctttacatttgctccatagtaggttaccgtgctatcatctgtaccgtccatgttaaccttagagcatcaatgagccgcatcgttcggtcagcctggggcatagtggattttgtggcgtgtggctgctcgaaggatgattgtcaggctggaccaggaatgcgcctttctgtgggatgaagcagattcgtatggacgttgtcagtgaaatggttgtgctgtacctggggttttgcattttcttgctgactttgttgggaatgggaggaatgacgtttaagatgcagaatgtctgccttattaattaatcttatgttgactcatacttctctatcaactgcgtttatggttcgctggtgttctgtctgagggcctccggttttgtgttgcgc

SEQ ID NO: 213052 - DNA, 2833 bp, Zea Mays
cgacacctctccccccccccccccccaccccatcctcctcccctcagcctctccggtgggcgggcgggcgggcgggcaattcggccatggatcccccacgcggaggaccagtgattgatcctgctaaatgtcgattgatgagtgtggatgaaaagcgagaactcgttcgtgatttatcaaagagcccagaaagtgctcctgacaggctccagtcatggacccggcgagaaattgtagagattctttgttctgatcttggaagggagaggaaatatactggtttatccaagcagagaatgctagattatctatttaggttggtgtctggaaaatcatctggtccagtggaacatgtgcaagagaaagagaaagggagagagaaagggaaagagagagaaaaagaatcaattcctgagcccaatacaactaaccaccatcagtcccctgccaaacgaccaagaaagagtgataacccatcacgattaccgattatcacaaacaactcagcagcatctgatgtaactgggccaactaataattcacggttctgtcaaaatgtagcttgcagagctattctcagggacaatttttgcagacgctgttcatgctgcatttgtttcagttatgatgataacaaggacccaagcctctggttgtcctgtagttcagaccaacacttacaaaaggatacctgtggtttctcatgccatcttgaatgtgctctaaaggatgaaagaacaggtattctgcagagtggacaatgcaagaaacttgatggtggctattattgcactcgctgttggaaacagaatgatttgcttgggtcctggaagaaacaactggtgatagcaaaagatgctcggcgattggatgtgttgtgtcatcggatttatctcagtcacaagatcctcgtctccacagaaaagtacttggtattgcatgagattgttgatacagcattgaagaaactggaggctgaggtcggtcctatatctggagctccaaatatgagtcgtggaattgtcagtcgacttactgttggtgccgaagttcagaaactttgtgctcaagcaatagatgctatggaatcattgttctcgggtgtatctcctgctggttcaagaatcccgcgaccatgtatggtaccaccaaattttgtgaagtttgaagctataacccaaacatctgtcatggtatttttggatttggttcactatcctatgcttgcccaagaggcaacttcatttaatatatggcaccgaatggctgttactgaagcttacctgacaaatccgactggcataatacttcccccatcgaaaaaattacctgtcactgggcttgcaccggctacaagctatatctttaagattattgctttcaaaaactcaatcgagttgggttcatgggaaattagaacgaagacaagctatcaaaaggatgatccaaggggttcaatgccaggtggtactagactaggacataatagtgagagcctgaaggcaaacagtgatggccagtctgatccttcctcagagggtgtggactcaaacaataatactgctgtttatgctgatctaaacaagtcccctgaaagtgattttgagtactgtgaaaatcctgagatcctagattcagataaagcgtctcgtcgcctcagcgaacacatcgatgacttgcaaaatatacagatggctgcagatagggtaacagaagtcactgagctggaagaatcgcctgggctctcagcctcagccttggatgaggaacccaacgcttgtgttcaagcagtgcttctcagggagccaaacccactaggacacaatcaaagaactgtagttcctagatcacagcatgcatctaatgtactgggtggaaatgagttggtgattgttggacctcgatatgctggttctgtgccacccattgcaacaagaggtctggaaaacagcaaggagagcggtggaaggggcttcaaacccaaaccttgtaacaacattttccaaaatggctcttcaaagcctgaaagggaaccgggcaattcgtcaaacaaaagaacagctggtaaaacggaggaccttggtcacaaggatagttcatctgaagtgtcctacgagtactgtgtaagggtggtcaggtggctggagtgcgagggctacatcgagacaaacttcagggtgaagtttctcacatggtttagcctgcgtgccaccccgcaggagagaaagatagtcggtgtctatgtggatacccttattgaggaccctgtcagcctttctggccagctcgttgacagcttctcggaggcggtatatagcaaaaagcggacgccttctggtttctgcatggacctgtggcattgaagcaccacaagcacctaccgtttgctttgtagggagcacacattcgggcccattcttttgttgcagatcgttgcattgattcttcattggaaatttcgctgaagttaccgtgctatcatctgtaccgtccatgttaaccttagagcatcaatgagccgcatcgttcggtcagcctggggcatagtggattttgtggcgtgtggctgctcgaaggatgattgtcaggctggaccaggaatgcgcctttctgtgggatgaagcagattcgtatggacgttgtcagtgaaatggttgtgctgtacctggggttttgcattttcttgctgactttgttgggaatgggaggaatgacgtttaagatgcagaatgtctgccttattaattaatcttatgttgactcatacttctctatcaactgcgtttatggttcgctggtgttctgtctgagggcctccggttttgtgttgcgc

SEQ ID NO: 213053 - DNA, 2949 bp, Zea Mays
tggcgctctccgtccttcgtcccccccgcagtcgtcgctgcccgcgaatccgagattcatcgtgcatgcgcggcgcctggcggttcccgcgctccaaattgctggtcgaggaccagtgattgatcctgctaaatgtcgattgatgagtgtggatgaaaagcgagaactcgttcgtgatttatcaaagagcccagaaagtgctcctgacaggctccagtcatggacccggcgagaaattgtagagattctttgttctgatcttggaagggagaggaaatatactggtttatccaagcagagaatgctagattatctatttaggttggtgtctggaaaatcatctggtccagtggaacatgtgcaagagaaagagaaagggagagagaaagggaaagagagagaaaaagaatcaattcctgagcccaatacaactaaccaccatcagtcccctgccaaacgaccaagaaagagtgataacccatcacgattaccgattatcacaaacaactcagcagcatctgatgtaactgggccaactaataattcacggttctgtcaaaatgtagcttgcagagctattctcagggacaatttttgcagacgctgttcatgctgcatttgtttcagttatgatgataacaaggacccaagcctctggttgtcctgtagttcagaccaacacttacaaaaggatacctgtggtttctcatgccatcttgaatgtgctctaaaggatgaaagaacaggtattctgcagagtggacaatgcaagaaacttgatggtggctattattgcactcgctgttggaaacagaatgatttgcttgggtcctggaagaaacaactggtgatagcaaaagatgctcggcgattggatgtgttgtgtcatcggatttatctcagtcacaagatcctcgtctccacagaaaagtacttggtattgcatgagattgttgatacagcattgaagaaactggaggctgaggtcggtcctatatctggagctccaaatatgagtcgtggaattgtcagtcgacttactgttggtgccgaagttcagaaactttgtgctcaagcaatagatgctatggaatcattgttctcgggtgtatctcctgctggttcaagaatcccgcgaccatgtatggtaccaccaaattttgtgaagtttgaagctataacccaaacatctgtcatggtatttttggatttggttcactatcctatgcttgcccaagaggcaacttcatttaatatatggcaccgaatggctgttactgaagcttacctgacaaatccgactggcataatacttcccccatcgaaaaaattacctgtcactgggcttgcaccggctacaagctatatctttaagattattgctttcaaaaactcaatcgagttgggttcatgggaaattagaacgaagacaagctatcaaaaggatgatccaaggggttcaatgccaggtggtactagactaggacataatagtgagagcctgaaggcaaacagtgatggccagtctgatccttcctcagagggtgtggactcaaacaataatactgctgtttatgctgatctaaacaagtcccctgaaagtgattttgagtactgtgaaaatcctgagatcctagattcagataaagcgtctcgtcgcctcagcgaacacatcgatgacttgcaaaatatacagatggctgcagatagggtaacagaagtcactgagctggaagaatcgcctgggctctcagcctcagccttggatgaggaacccaacgcttgtgttcaagcagtgcttctcagggagccaaacccactaggacacaatcaaagaactgtagttcctagatcacagcatgcatctaatgtactgggtggaaatgagttggtgattgttggacctcgatatgctggttctgtgccacccattgcaacaagaggtctggaaaacagcaaggagagcggtggaaggggcttcaaacccaaaccttgtaacaacattttccaaaatggctcttcaaagcctgaaagggaaccgggcaattcgtcaaacaaaagaacagctggtaaaacggaggaccttggtcacaaggatagttcatctgaagtgtcctacgagtactgtgtaagggtggtcaggtggctggagtgcgagggctacatcgagacaaacttcagggtgaagtttctcacatggtttagcctgcgtgccaccccgcaggagagaaagatagtcggtgtctatgtggatacccttattgaggaccctgtcagcctttctggccagctcgttgacagcttctcggaggcggtatatagcaaaaagcggacgccttctggtttctgcatggacctgtggcattgaagcaccacaagcacctaccgtttgctttgtagggagcacacattcgggcccattcttttgttgcagatcgttgcattgattcttcattggaaatttcgctgaagtatttgacttgcacatcttcattgaaacttaacttttcaatgacagtaggttaagttaatgggcaatttctttttttctttttccgttctttacatttgctccatagtaggttaccgtgctatcatctgtaccgtccatgttaaccttagagcatcaatgagccgcatcgttcggtcagcctggggcatagtggattttgtggcgtgtggctgctcgaaggatgattgtcaggctggaccaggaatgcgcctttctgtgggatgaagcagattcgtatggacgttgtcagtgaaatggttgtgctgtacctggggttttgcattttcttgctgactttgttgggaatgggaggaatgacgtttaagatgcagaatgtctgccttattaattaatcttatgttgactcatacttctctatcaactgcgtttatggttcgctggtgttctgtctgagggcctccggttttgtgttgcgc

SEQ ID NO: 213054 - DNA, 2893 bp, Zea Mays
tgcggggggcggccggcggattcggtgccttcctttacgtccttgtccggggatgaccagtgattgatcctgctaaatgtcgattgatgagtgtggatgaaaagcgagaactcgttcgtgatttatcaaagagcccagaaagtgctcctgacaggctccagtcatggacccggcgagaaattgtagagattctttgttctgatcttggaagggagaggaaatatactggtttatccaagcagagaatgctagattatctatttaggttggtgtctggaaaatcatctggtccagtggaacatgtgcaagagaaagagaaagggagagagaaagggaaagagagagaaaaagaatcaattcctgagcccaatacaactaaccaccatcagtcccctgccaaacgaccaagaaagagtgataacccatcacgattaccgattatcacaaacaactcagcagcatctgatgtaactgggccaactaataattcacggttctgtcaaaatgtagcttgcagagctattctcagggacaatttttgcagacgctgttcatgctgcatttgtttcagttatgatgataacaaggacccaagcctctggttgtcctgtagttcagaccaacacttacaaaaggatacctgtggtttctcatgccatcttgaatgtgctctaaaggatgaaagaacaggtattctgcagagtggacaatgcaagaaacttgatggtggctattattgcactcgctgttggaaacagaatgatttgcttgggtcctggaagaaacaactggtgatagcaaaagatgctcggcgattggatgtgttgtgtcatcggatttatctcagtcacaagatcctcgtctccacagaaaagtacttggtattgcatgagattgttgatacagcattgaagaaactggaggctgaggtcggtcctatatctggagctccaaatatgagtcgtggaattgtcagtcgacttactgttggtgccgaagttcagaaactttgtgctcaagcaatagatgctatggaatcattgttctcgggtgtatctcctgctggttcaagaatcccgcgaccatgtatggtaccaccaaattttgtgaagtttgaagctataacccaaacatctgtcatggtatttttggatttggttcactatcctatgcttgcccaagaggcaacttcatttaatatatggcaccgaatggctgttactgaagcttacctgacaaatccgactggcataatacttcccccatcgaaaaaattacctgtcactgggcttgcaccggctacaagctatatctttaagattattgctttcaaaaactcaatcgagttgggttcatgggaaattagaacgaagacaagctatcaaaaggatgatccaaggggttcaatgccaggtggtactagactaggacataatagtgagagcctgaaggcaaacagtgatggccagtctgatccttcctcagagggtgtggactcaaacaataatactgctgtttatgctgatctaaacaagtcccctgaaagtgattttgagtactgtgaaaatcctgagatcctagattcagataaagcgtctcgtcgcctcagcgaacacatcgatgacttgcaaaatatacagatggctgcagatagggtaacagaagtcactgagctggaagaatcgcctgggctctcagcctcagccttggatgaggaacccaacgcttgtgttcaagcagtgcttctcagggagccaaacccactaggacacaatcaaagaactgtagttcctagatcacagcatgcatctaatgtactgggtggaaatgagttggtgattgttggacctcgatatgctggttctgtgccacccattgcaacaagaggtctggaaaacagcaaggagagcggtggaaggggcttcaaacccaaaccttgtaacaacattttccaaaatggctcttcaaagcctgaaagggaaccgggcaattcgtcaaacaaaagaacagctggtaaaacggaggaccttggtcacaaggatagttcatctgaagtgtcctacgagtactgtgtaagggtggtcaggtggctggagtgcgagggctacatcgagacaaacttcagggtgaagtttctcacatggtttagcctgcgtgccaccccgcaggagagaaagatagtcggtgtctatgtggatacccttattgaggaccctgtcagcctttctggccagctcgttgacagcttctcggaggcggtatatagcaaaaagcggacgccttctggtttctgcatggacctgtggcattgaagcaccacaagcacctaccgtttgctttgtagggagcacacattcgggcccattcttttgttgcagatcgttgcattgattcttcattggaaatttcgctgaagtatttgacttgcacatcttcattgaaacttaacttttcaatgacagtaggttaagttaatgggcaatttctttttttctttttccgttctttacatttgctccatagtaggttaccgtgctatcatctgtaccgtccatgttaaccttagagcatcaatgagccgcatcgttcggtcagcctggggcatagtggattttgtggcgtgtggctgctcgaaggatgattgtcaggctggaccaggaatgcgcctttctgtgggatgaagcagattcgtatggacgttgtcagtgaaatggttgtgctgtacctggggttttgcattttcttgctgactttgttgggaatgggaggaatgacgtttaagatgcagaatgtctgccttattaattaatcttatgttgactcatacttctctatcaactgcgtttatggttcgctggtgttctgtctgagggcctccggttttgtgttgcgc

SEQ ID NO: 213055 - DNA, 2573 bp, Zea Mays
atgcctccgccctcgccctcccgccaatctcgtagcagcgcccgccccatccccgcagccgtcaccagcgcgtacatagaagctgaacaccggcaacgtgttcgcggcgctcgagtccctcaagaagaagaagaagggcggcaaaggcaaggcagccgggaggaggacggcgagggggccgcgcagcggcaagagccaccgcagaagaagcagttctgggctcccgcaccacttaccaccaagtcatgggcggacgtcgaggacgacaacgactacttcgccaccaccgcgtcgccacgcctcgtctggggcactgccggtgagcccgccaaggaagaggacgacatcgatgatgttgtgcgcgccgcccttcaggaggtagcaaccttgggcaacaaagttgagaaagagatggaggacatggccttcttctttgctgaattggcgctgatgcaatacggatacggcttggtgacacgtctgccttctctggttgctgcttctgctgtctacgcggtcaggctcactgtcaagagagctccctctggaccgacgccctcaagcaccacactgttgtgtaccaggtgctcggaggagcgacccgcgaagggcagcggcagctggtcttcacctgttggttcagtgccggctggagggcaaccaagagcagacaatggatccactacaattgaaattgctctgaagattgcatttcgtaaattttctcttgatcatggaattatggccagtagtgaaaatagtacaagaaatgaaagaaacattaagttgaaggtacttgttctaaatggttcctatcatggtgatactctgggtgttatggaagctcaagctccatcgtcttatacatctttttcttcagtagccatggtccacgttcagaggcggatctgcgcggcccagttactacagcgaataggcggcccatcaggtcacgttccgtcccgacgtagagtcgccagtcctcccacaatctccagccgccactacgcctccctctagctccagccgccactacgccggtcgcagagtcgccagctgcctagacgcccggaggcccgcgggcgctccctcctgggctgctggcctccttcacattattggagccagaggagcgggcggcggcttgcactccatcccatcgcttgggtgcgtcgccccgaatccaatcgcctggtcaagtctgttgctgccggaggtagacggacgccttatcgtgctcgtggccgcagctagcgcgccggagccacagctggagcgctcgccggcgacgagtcgccgccccgcaaggagcctacgcaggcacgcaccgccacgtctaggcgccaggcggagacgttattaccacaacattaaaggagatgccttcactccagaaagcattgcctccagaacttgctgataatgtgctcagggtaacgtttcttttgcaccttttgctttttgctgtggtctccttgtattatgggtcacggccaactttcaaatcaacttgtactgttgtactgttaatgaatagtcagtcatcaggcttcattcatttgcatcagttaccctaaattctagcttcagcttttccagaagacacatctaatatgcaccctgtagcctagttttttgttacttttattaaaaattgtcatgaatgaaacaaaacaaaatcatagtcgatgctggagaaaaaacattttttttccatttattgttctctcctttttcatgatgtagttatatcgtgaatgcttacggagggcgaagtatattggccatcagaaacacaatacagaacttttagtcgccatggtgagacaacaattcaagaaaaacatgcatgaaactgatccagagaagatacagaaaatgaaggacgatgctgcaaggggccttatcaatcatattctatatgagtccgagaagattacaggacgcaagttttcagcatgggggcagtttctacagctaaagcttcgcaatcttagaaagtgtctccttatcctggcagaagagtcatccatggacctggacctgaagatcctcccgccttttgccgccacgcctttgaattccagccgctactttctcgtgagccctcgcatcattcaccagatccttctgctgaggccactcctttcatctttcagcacagtttcatcgcctgtatcagctactcccatcaccagtcctagcgcacgggctctcgaggaaaattgtcgatccgggaaaggaagacggacggccataattgccgacaaggggcgtgtcgtttagcctgctgcaatgaggtgagcctgcatcctgagggaatttcatggtggggctatgacatgttggcttcagcaggtcaacgcttcagggccaatgcagggggtttcttctaaagctggaatcatggctgcagtagagagaaggatggattgtagctgtgctgtgcttgggtgccaccctcaagtttctacactttctacctactgcaggcatgtgttgcagttgttcccaccacaaggagcctttccctctatagtagcatgagcaagtacgatttcaaggctgtattc

SEQ ID NO: 213056 - DNA, 1160 bp, Zea Mays
cgccagcatagtcacgatgatgttgtgattgctgcgcgtggagctggtgacgtcgctggggtcaactctggcgatcaagctggtgagcagagtccacgtggccgacgcgaggttcggcgtgtacagccaccgcctggacgacgtgtggctcgtcggcggggcgtccaacaccgggggagccgtgctccggcagctcttcacggacgaccagctcgcggcgctgagcgagcacatcgacccggccgtcccttcccctctcgactactaccccctgccgaagaaaggcgagaggttcccggtctccgacccagacatgatgccaaggttcagtatgttcaataggcgtgcctgtgtgtcttcctccattctgcaacttcaaattcggtctcttcttcttgttgtcgtcgtcgtcgtctctgcaggctgcagccgcgccctgggagcgacgcggagtacctgcacggcatactggaatcgatcgcgcgaatcgaggccaaggggtacagcctgctgaaggagctcggcgcgacggcggtggaggaggtgttcacagcggggggaggagcgcagaacgacaggtggacggccatccgggagagggtgctcggcgtggcgtccggaaggcccagcagactgaggcggcctatggagctgcactgctagcactcaagggcgccaagagcttggctggctagtgtgtcttgttgtgcttggtagggctggacgaaaaactcgtagctcgttaactcgctcgactcgactcaatagtggctcggctcgactcgactcgtttataatttgtaacgagttgagcttgtatttcaactcgttacgataacgagccagctcgagctggctcgcgagctgactcgcgagccaaacgagttgaagtaattagtcaaactacaataatcttggatccaaaatagttaatcttgtactctactatagttaatcttgttctttgttgagtgtgaaatcttaagttgcaaactctattctgtttttctaaatagatctccttcttttcttttgctacatgtttttatatccgttcgtagacactagacatggtattatcgagctggctcacgagctaaacgagccagctcgagttggcaaacgagtcgagccgagttggatcttcagctcgttaacat

SEQ ID NO: 213057 - DNA, 753 bp, Zea Mays
aatagaaaagcgacggggaaagggtaggaagaaaaaaagagaaaaaaaaacgccggaggccggagggatcacggaatctgagcccaccactcccccgcccccacttgtataaagcgaccccgataccagcccgtcatgggaagaaaaggaaggaagaagggcctcctgtatcctctcacttccctcagtcctcgtccgtctgctccctcctctctctacctagctctagctagccttcctgtagcgcggcagagatggctgcccctgcctccaccacggcggcggcggcggcagcgctgctgctgctgctcctcctgtcgctcgccgcggcggcggacatgtcgatcgtgtcctacggggagcgcagcgacgaggaggcgcggcggatgtacgcggagtggatggcggcgcacggccggacctacaacgccgtcggcgaggaggagcggcggtaccaggtgttccgggacaacctccgctacatcgacgcgcacaacgccgccgccgacgcgggcgtccactccttccgcctcggcctcaaccgcttcgccgacctcaccaacgacgagtaccgcgccacctacctcggcgccaggaccaggccgcagagggagaggaagctcggcgccaggtaccacgccgccgacaacgaggacctgccggagtccgtcgactggagggccaagggcgccgtcgccgaggtcaaggaccagggcagctgcgctagaacatgggaagcttctccagccgtgt

SEQ ID NO: 213058 - DNA, 1994 bp, Zea Mays
gcctctcttgtactgcccccacgaagcattcgtgctcgtttcgcctcgcgcccgcgctgctgtcctgctgctgctattttgccattgcatccatttccgggggacggagtggaggaggagggcgtcgcctgcgttgcttcgcgtgggaagcgtagcgtgcttcgtttaggcctctcgccaatatccgagggttaatctagagaggcctttggctttgccagacgcgcctgtacgcgcctttctgggaggcagccgcttgctctcgcctccaatggccgagatctgctgcgaagaagccaagtccacgccggcgaccgccgtggctgcggcttcagtctccgccacggccgctgcggccgccgccgtggcagtggcctcctcggcgttagagaggaggcgacgcaggttggagatgaggaggttccgcgtcgcgggcgatcccgaggcgccggtcgcggaggacgtccgcgccgccaagcggcagaggctggcgcgcacgctgtccagcacctgccccgacgcgggctcaggctcgggctcggactccgacaggcctgccctaccggagcggttgcccaggtacggggtcacctccgtctgcggccgacgccgcgagatggaggacacggtctccgttaggccggactttgtgcccggcaccagcaaacagcacttcttcggcgtcttcgacggccacggctgctcccaccaaccatgtgccagaacatgatgcacgaggtggtcgcggacgagcacaggaaggcagattgttctggcgaagagacggcgtggaaggccgtgatggagaggagcttcgcgcgactggacgagcaggccgccagctgggcgaccagccgcagccgcgacgagccctcctgcaggtgcgagcagcagaagcccttgcgttgcgatcacgtggggtccaccgccgtggtcgccgtcgtcagccccacccacgttgtcgtcgccaacgccggcgactcccgcgccgtcctatcccgcgccggcgtccccgttccgctgtccgtcgaccacaagcctgaccggcctgacgagctggcgcgcatcaaggcggcgggcggccgcgtcatttactgggacggtgctcgtgttctcggcgtcctcgccatgtctcgagccataggcgacggatacctgaagccgttcgtgtcgtcggagccggaggtaacggtgacggagcgcaccgacgacgacgagtgcctgatcctggccagcgacggcctgtgggacgtcgtgaccaacgagatggcgtgcgaggtcgtccgcgcgtgcttccacagcaacggtccgccggcgccggccgctcgggcgaacggcgcggccctccgggcagccgagaacggatccgcggccgccaagggcgtgagcgtggaggattccgacaaggcgtgctccgacgcggccatgctgctggcgaagctggcgctggcccggcggagcgccgataatgttagcgtggtcgtcgtggatctccgccgggggatatgatttgccttccttcctttttagccctcttggaatccaagctaatttctcccccgttttcttccatacttttaggttctgttttggtttagtattaatactgtagtagttaccaaccagacgcttttcttctctcaaacgaggaattaaaagccagtcggaccaaggaaatagaacatcgaattgcacacagatgcacaaggtagtggtaatcgttaatcatagctttttttggccgtcgattaacgcgctaaaaagtgctgattccattctttgactgaagtagattaacggggcgattggtgtagaaattggcgctaagaccacgtttagcgggagcagattgcgattggttggcccaggcaggcggtaggattcggagacggattaacaaaggcacggcaagatgctgatctatctgtggggtgtgggcccgtcgtctatcgagtgaagggaaatgctccgaagttctcgtttacggaaatgag

SEQ ID NO: 213059 - DNA, 644 bp, Zea Mays
atatggtatacagaagacgaaatagaaggattattaccagtgtcatcttcttcagggagttttcagttcttctccagaatggctggtttccaaaaatcttcatggttctcctcagtggagtagtggcaggcttttacttctatcgcattgcagctggtagccccaaagagctgagcagcaacagtgattcagtgaactaatgcacttggatgaatcagatgatcatgggggaacgcagacccagaaggctatggcctgtttgctttcgatttccttcatcatccttcaattcaggcaaagctcggttgtaaggtgtccgcatgatgaccacatggattcagaagaattgcttgtttactcggccctcttcccgcactcctttgttcctttgctcatgtagtatagatgatagacttgaacaacatcaataaacgacattcaaaggccatgcagttagctcttcagtttgtctgctgtttgtttttcatggggacagcccgaaaggtcggtgaagcgttcaatgtttcgtgaagtgtccgaaaacagtcagtgttattactctgtagattccagctcgctcaaaactattcaaggccgatgacaagttgataacaattagtggcactgtgatttgttcctattcg

SEQ ID NO: 213060 - DNA, 925 bp, Zea Mays
cattcatggaatgccgcctccaccacctcgcgctgctgctcggcctcctcgtctgggcggcggcggccgccacgggaggcggggcgcagccggtgtgcgagccctccatcatcgccacccagatcgcgctcttctgcatgccggacatgcccacagcgccctgctgtgagccgatcatcgcttccatcgacctcggcggcggcgtcccctgcctatgccgcgtcgccgcccagccgcagctcgtcctcgcccgcctcaacgccacccaccacctcgcgctctacgcctcctgcggaggacaacacactatgggcgcccacctcgccgccgcctgccaacaagctccgtcacctcccgccaccgtcctcgtgctcgccccgccgccgccacaagcagccaacacgcgagacgacccctcccccgctgcagccgagcaagaagccgtcccctacaggggccaccgccgccgcccacggcctggccaaccccacgccagcccggccgccgcgcccacgatgcccccgcccccgccaccgcactccggctccgacaagggctgcgtcgtagtcgtctccgccgctctcgagctcgtcttcttcgtcatggctggcatcgtcttcgtcctcgagtgagcccacggcgacgccctggccggccgccaaccatcgccggttcctggcttgaggcagtagcaactgcagtcgtcgtagtgcaactcgttttcacgattcccttttggcagtagtatagtggtagtagtgccactaggccatcgtcgtagttcgatctgttgcatcttagcagtagcatcggtagtactagcttgatcggtggagttggaagaatgcggtggagttaaatttcccatcctagttgtgaatcacccacgatcaaacttctcttattgtcccttggtcaaggctcg

SEQ ID NO: 213061 - DNA, 4079 bp, Zea Mays
atccccttccgttcacggttcacccacgtgcgtttctgtcggctcggctcttgcacccccttttgctctccgccgcctggtgcttcgcccccctcgctctccgacgactggtgggccgccggcgccggtgccgccctacggcagttgggccttcgttggcctcttcgccggccttttcgccggtgacgagcagccactaggaaagcttctgttgctctgcatgcaacgatgaactgatgattattgttgataacagcttctcttcttgtttacatggagtgcaacagagatgaggctgctagagcgaaagttcttgcggaaagaaaaatgctggacaaggattttgttggtgcaaaaaagttgattatcaaggtgcagcaactcctcaaagaagtggaagatattgacattccaaaaatgttaactgtttgtgatgttcattgtgctgctggagctaaggtaaatactgagattgattggtacggaatactgcaagtacctgtaaatgctgacgacgcactgataaagaagcagtatcgtaagcttgcccttttgctacaccctgacaagaacaaatttggaggtgcggaggcagcattcaaattagttggagaagcaaacataactctcacagacccatcaaaacgttatgtgcatgacatgaaaagaaacaccttcagaagcgttacggcaagacccaatcgtcagccaccaaaaagacctgcacctgctagatctagttctactcctgtgaatctctacaatatgcatcagcaacatcagcgtcaagcctcaaatcctacagggacgcaaacaacattttggactatttgtccagcttgtggcatgagatatcagtattacctctcgatcttgaagaaagctttgcgctgtcagaattgtttgaagccatttattgcacatgatttgaaggaccaagctattccttccggggcaaatcagcgatctgctggggtttggaaaaatgcaggcacaccacagaactctgcaggacctcaatcaaatgtcactggtcagaaaggctggtctgccacttcaggagttcatgttaataccggttctcatcatgctaatgtgaatacaaagaggaaaactgatggtaacgcaggtggactgaaaaacaaaatgaaatctgcccaggccaccaggaaaccttcaaaagcttcatcaactgctggattgaaaaggggcaggagggcggtgtttgaatctagtgaatctagcatatcagaaactgacagcgacggtgaggtagagattccaaaacatggtcctgctgaaaatagtgcagggccaggtcaacaaactcgcagatctagcaggcagaagcaagaagttaagtataatgaggatagtgatgatgataatgatgatgtggaagatgatgataacacggttgaggatgattttgttgattctcctgcgttgaaaaggctgagaaaaggtggcatgttccatggtgatcacagtactaaaacagcaaagctgaatgaagacaccgctggccataatagtgtgaatagctggggtaacataaaagataaaaagaacggtggtatgccatgtgaagagaaaacttccaatggggttgagcagatgaagagagaaacaatgcatgttggagaaaatagtgatggcaaagaagagctatttcattctgtcagcaacaatggccttggtctaaacgatgatgatgcttcagatgataacaaattcactttcccagatcctgaattttttgattttgacaaacttcgagatgcaagtcaatttagagccaaccaggtctgggctgtctatgatgatcaaggttgtatgcctagattttatgctcgaatcacaagggtaaaaatggttccaaagtttatgctacaatttgtttggttggagttcaatcctgcaaataaagcggaggaggcatggtcttacaggggtctgcctgttgcatgtggacactttacgcatggactgtcagagacaactagtgaaactggtatgttctcccggattatatcattagagagaagcaagacaaagaacttctatgaaatatatccaaggaaaggtgaagtttgggccctttttaagggatgggatattggttggagctcagatgctggcattcacaaaaaaatgaaccatcgctatgaagttgttcaagttctttctgatctcaccacgagcactagcattattgtcatgccacttgtgaagttaaaaggctatgttagcttatttgtgcagtctggagaggcagctccatatgtgatacctcaggttgacacactaaggttttctcattgtgtcccacattatttgacgagcggaactgaaaaagaaggcattccagaaggatctcttgaacttgatcctgcagcgcttccctccaacttggaagaggcttttccttctgctaacccagaatgcagttcagcaagaagccaggagtctgactccaaaaatgctggtttgtccagtggaaatcgcaaaggatccatgaatgtggggcaggggcaacataaaatagccgcgaatggaagggtttgtacaaagacaacaaaggtagagaatatcaagcataacattgatctgtctgaagttacagatgtcgttgacgatagcatttgccaaacagagtatgtatgcgccgattcagaattctacgatttttcagtaagaagatcgctccaaaggttttcacctgggcagatctgggctctctacagtgatatagataaattccccaattactatgcatttatacagaaagtagatctcaagaatgataaagtacaagttagatggcttgatgtctgtcctcaaggagaagtggagaaaagattgtcccaagatcggaccattggcattggaacctttagggttggctacatccacgacatgatgacttacactggtacagatgccttttctcatcttgttgaggccagacctactggcagaaaaggtgaatatgaaatacttcctcgtctcggtgagatatgggcagtttacaaaaattggagcgctggatggactgcgcaggattttgaaaaatgtgaatacgaactggtggagatatttggctatactgattcctccatacaagttcagcttgtgaggaaggtggatggttataagatggtatttatgtcatatagagcagggggtgtgaagacaatacggagggatgagtacccgaagttctctcaccagattccatgctttcacttgacacatgaaaaaggtggcaagcttcgaggctatttggagctcgatcccctatcactaccagaggaatttctctgctgattcgatctgagataaaccttatctacatcaaatctggagcctccggtaatgaagtttctggaacatccacaatttcgtagcactgacgttgttacggtggactcaatctgcacaactaaggcattggcttttggacttttttgctggatggctgtcctgcagctgcaattcacatgtctagtattttttttgcagtaactatttgttgttagcattagctgtatctacggtttgagttctagtgtaaaaattgctacttttaacatcttgcagtgtactctaaattgcagtactgtgtttgaactgtgagatgctagcctgattaatttcctggaactgaaaaatgaaatcgagctggagcaaggttaggctgatcaatcaatgtgtcatgcttgtgttgctgtgcggggacatagatggcatccttcagcgtattatcagaatttatttctattcgcatctctctgtgtataaatgttacacgtcctaattttgatatgaccatgccttttcttgaactctttttatttgctgacaagtattaaagccttgtttgttcctatttgttttatgattaaagtttagttctaggactttagtctctacctgtttgtttgatctcagggactaaacaggttcagagcacattaaatacactatagaaagactaaaatacctcttatatgcttaagttgtctaagagagagaatgttaaaaacacattaatgcactatagaaaactgaaatac

SEQ ID NO: 213062 - DNA, 2185 bp, Zea Mays
agatcttctccattcgtgcatgtggagtactgtggaccgaggaagtagccggagagatgaacgcgaaattccagcaccattgtaagagatggctgagctgagctgaactgaatctgcgacggcgcctctgcactttcatctgattccggcgaattaggagacagacacagacgcgttgttttctgtagtcgagccggtttccccacgttgacaagtgatcgcgtcagatccgatcaggacgacgccatggccgccaaccaggaggagcaggagcaggagcagcgccgccgccttatcgccgccgcgacccgcttccctctcccaagcggctgcaggttctcctatggcacggcgggcttccgcgccgacggcgccaccatggcgcctgccgtctgccgcgccggcatcctcgccgcgctccgctccgtcaagctcgcaggcgccgccgtcgggatcgtcatcaccgcctcccacaaccccatcggcgacaacggcgtcaagatcgccgaccccgacggcggcatgatggcccagcactgggagcccttcgccgacgcgctcgccaacgcccccgaccctgacgccctcctccagggaataaatgctatagttggcgcacgcgcagtcgatatgggaattttgaccacccctcaactgcattggatggtccggagcaaaaacaaaggtgtcatggcttccgagtcatattattttaggcagcttattggatcgttcaggcgtatgttggaattagtgccaaaaggtaaaggtggggatgaggttgccaagaaacttattgtcgatggagcgaatggcattggtggggtgaagctcgaacaaataaaggtggagctttcaggcatagatattagtgtgaggaattcgggcaaggaaggagaagggatactaaatcacatgtgtggcgcagactttgttcaaaaggagcgagttactccacatggatttaaccctgaagatgttggtgtcaggtgtgcaagtttggatggtgatgctgatcgactcgtctacttccggttgtcatcagctagtgacaatagggttgatcttgttgatggagataagatactatctctgtttgccctatttatcagagagcagctagatatcgttaataacaatggtggccaagcaaacaagtcattgtctgcaaggcttggaatagttcagacagcttatgcaaatggagcgtcgacgctgtttctgaagagccttggcctcgaagtggtattcactcctacaggagtgaaatatctgcacaaaagggccttggagtatgacattggtatatactttgaggcaaatgggcatgggactgtggtattctcagaggatttcatctctcaactagagtcattaagcaatgagctctcctctcaagctgacattggttcagcacagtaccacgctgtaatgagattgttggcagcgagtcagctgatcaatcaggcagtaggtgatgctctgagtggtttgcttttagtagaggctattttacagtataaaggatggtcatttcaggattggtgtggactgtatagtgatttgcccagtagacaactgaaagtgaaagttaaagatcgaagtgtgattgttacaacagatgcagagacaaaagttagccaaccttctagtttgcaagaattgatagataaggagaccgccaactacacccacgggcgatgctttgtgcgtccatccggtacagaagatgtggtacgggtgtacgcagaggcatctacgcaggtagaagctgacggtctcgcaaaatccgtggcacaccatgtggaacgcctccttggataacaatttgcagccttgtttgcgactattgagtagactacatcctctaatttcatttctcttacattttgacctgtaacttatacaaaacgtgagtccaattttttgaattttgtgattgatatgcgctgaacagagatcttgtatcgagacatgatacaagatatttgaacgggtgtaaatcattccgtcgcaatactcattcttcttgattggttgcactcattgtcatactgtgcagttccttgtttgttgataaattttgaattttgtgattgatatgtgcatcactgatcactctcccctgcatgatgacttgatgagatcatatactgtgcagttccttgttcgttgctaaaagttc

SEQ ID NO: 213063 - DNA, 1708 bp, Zea Mays
accttgacgagtttcttgaaatatcattatccagaaagggtcgtgctgaatctattaacagtggatgccacgccgcgagtgactgtgagtggagctcctgcggacgccgatccgccatcaccgtggcaaagaaggagcctgctcggccctccgactctaggccgtggagagaaattgagtgaactccaagacaagacttctgagctatatattcaggcccagcagttcaagaaacagggagtgaagattcgcaggaagacatggttacagaacatgaaaattaagttggtgattcttggaatccttttgctccttgtaatcatagcttctttcaagagactgatgttgaagcagcaaggaatgcgaactacgtgggagtacccctttgcggtcgcagggagctgttgggctttctcaacaatagcagctgtggaaggcatcaaccagattgttacaggcgacttgatctccttgtctgagcaagagcttgtcgactgtgacacttcatacaatcaggggtgcaatggaggtctgatggactatgcgtttgagttcatcatcaacaatggcggaatcgacaccgagaaggattacccttacaagggcacggacggacggtgtgatgtcaacaggaaaaacgcgaaggttgtcactattgacagctacgaagatgtaccagcgaacgatgagaagagtctgcagaaggcagttgcaaaccagcctgtcagtgtcgcaattgaggctgctggcacaacatttcagctctacagctcgggtatcttcactggaagctgtggaacagcgctggaccatggtgtcacggtcgtcggctatgggacagagaacggcaaggactattggatcatgaagaactcatggggcagcagctggggcgagtccgggtacgtgaggatggagcggaacatcaaggcgtccagcggcaagtgcggtatcgcggttgagccgtcatacccgttgaaggagggcgccaacccgccgaaccctggccccggcgcccgccgtgcctgcatcgtgcgtccatcgataaacattgcagcgccagggttgccaccttctgagccgcgggaagggaatactgggaacccagcccccactccaccagattgtgctgaccgggcgggcggttcttgtccagagcgcgctgcccagacagcagctccagaagaaccacaccgtagctgtacacatcgctcttcgctgtcaaatggcctgtgtaccatgaggatgttgctattgctgcgatgggaccgatccaaggacttccagactacaactggttcagacgccggacctacatgctccgttactaagatcaatctgccggtgtaccatgtttacagtgtgcaaggacaaagataaaatttgcctcttacggcgtctgtatatcaaggcctcagcactgcacatcgcttgctgcgacagaggtttttttcttcttcagaatttgttttatttcttttcttgctcagaatccacaaatctgccaataatgataggcaggttcgactgacgtggcttacttgggtggtcagcctatgttatttttcttacaatgagtcatgacccttaccgttccatcttttgttggaaggtttttactttggcaaataatttgatgtggctcgttatatgtaaagatggtacaattttagcttgtgcaattttttttaaaccttgttggaaggtt

SEQ ID NO: 213064 - DNA, 1402 bp, Zea Mays
tgcgccctttcggattcacacgacgcgaagcttctggactaatcgaccacctcctttcctttcctttcctttcctagagttgcaaattctcttcaacacgcgcacatgtgacatgccccatggtcgtcgccgctccaggcatcctcccgtggcctcacctccctctcccttcctcctcccacccgtctgacgcctctgacgccgccgcagcagcaacagacgccaacacctccgcgtatgacatccagatcttcgagcccacctccatcgaggagcgtcgtcgcctcctgatccagcggcgtcgcctccgactcgccgcctcccatgcctcgcggctcaccgttgcctcgcgcgtctcctccaaactcatcagcaccactgcctcctgctccagcggcgtcgcatccgatctgccgcctcccctcctcatggctcgtcgttgcctcccgcctcttccccaacctcgcccttgccgcccttggaggatcccaaatccgacgacgagctcagtaggcccacgcagacgcggatgtgctatgaacttcagacaacatattcctaccgagaagtatgaaaagtacacttcagagcatgtcaaggtcctcacgaaagcttcctatcaagtggttgtttgcaagattgacgagttgtaggcaccaaatatatcgagtccttgctatcaacatatgagcatattattgtcaaaattctgtatcgatggcaatgggttccagaacagtacacaaggcaatttcaagacggttattcaattgctcaaatagttcaaatgtgatgtgaagtattcaccttttgacatggataaacatcttctctctgttacatttgcaggcgaaagaaggctcatgtgctgcttcgaaaatcagttctaagaaggcaaccagggacaacaaacctgataagggaagaaacatgttctggataaatattggcctttgtttcaagactccaagcccgccaccatccagggatcaatcctcaccacgaggaccaggggtgatgccaacaaggtgtacgtgaacctttcctggggtgttgataatttagctctcgcaaacctgttcactgagcaaggaccatctatgacagtgagaacaagtcaagagggtttgattttttgtcatgtatggttccacagaagagcctgagaatgcattatcgaatctcaatggagctatgagttctgaaacccttttttcttccccttgctgctcgcggcatagcatttggaaattgaagtacaatttgtctttcaggatatactgaattgatttatcattgtcctgcaggacttggatgatagatccgtgttacgataccagcatcaaagccgcctagaagcaatactgaactttcacttgagatgtaccttcggactcagaat

SEQ ID NO: 213065 - DNA, 1831 bp, Zea Mays
tgcgccctttcggattcacacgacgcgaagcttctggactaatcgaccacctcctttcctttcctttcctttcctagagttgcaaattctcttcaacacgcgcacatgtgacatgccccatggtcgtcgccgctccaggcatcctcccgtggcctcacctccctctcccttcctcctcccacccgtctgacgcctctgacgccgccgcagcagcaacagacgccaacacctccgcgtatgacatccagatcttcgagcccacctccatcgaggagcgtcgtcgcctcctgatccagcggcgtcgcctccgactcgccgcctcccatgcctcgcggctcaccgttgcctcgcgcgtctcctccaaactcatcagcaccactgcctcctgctccagcggcgtcgcatccgatctgccgcctcccctcctcatggctcgtcgttgcctcccgcctcttccccaacctcgcccttgccgcccttggaggatcccaaatccgacgacgagctcagtaggcccacgcagacgcggatgtgctatgaacttcaggttcgtcttttttcctgtacaccaattatagtcctccagcgcctacgaattttttttgcaaactttatacaagtccttcgctcaacaccgcctttggttgcaacggaagctgctactgttgttgaacgttagttgcttttattagatttatgcattttttttaaattcgagttcaaaattaagcaaaacacacgcttaatcaatttttttgcgttgttttcaactgatatatagacaacatattcctaccgagaagtatgaaaagtacacttcagagcatgtcaaggtcctcacgaaagcttcctatcaagtggttgtttgcaagattgacgagttgtaggcaccaaatatatcgagtccttgctatcaacatatgagcatattattgtcaaagtaggcaacatctcatttaacagacaactctccgctctatcattctctcaaggctgatgtgcatttctgatatattgagctcaagcgtcagattctgtatcgatggcaatgggttccagaacagtacacaaggcaatttcaagacggttattcaattgctcaaatagttcagtaagtgagaacaaagaaacttcctaaatgtattaatatggtatgatgaatagtgtctcacacattgtgttgttgagctctggtctccatttccgtgctgctagaatgtgatgtgaagtattcaccttttgacatggataaacatcttctctctgttacatttgcaggcgaaagaaggctcatgtgctgcttcgaaaatcagttctaagaaggcaaccagggacaacaaacctgataagggaagaaacatgttctggataaatattggcctttgtttcaagactccaagcccgccaccatccagggatcaatcctcaccacgaggaccaggggtgatgccaacaaggtgtacgtgaacctttcctggggtgttgataatttagctctcgcaaacctgttcactgagcaaggaccatctatgacagtgagaacaagtcaagagggtttgattttttgtcatgtatggttccacagaagagcctgagaatgcattatcgaatctcaatggagctatgagttctgaaacccttttttcttccccttgctgctcgcggcatagcatttggaaattgaagtacaatttgtctttcaggatatactgaattgatttatcattgtcctgcaggacttggatgatagatccgtgttacgataccagcatcaaagccgcctagaagcaatactgaactttcacttgagatgtaccttcggactcagaat

SEQ ID NO: 213066 - DNA, 1865 bp, Zea Mays
aattctcttcaacacgcgcacatgtgacatgccccatggtcgtcgccgctccaggcatcctcccgtggcctcacctccctctcccttcctcctcccacccgtctgacgcctctgacgccgccgcagcagcaacagacgccaacacctccgcgtatgacatccagatcttcgagcccacctccatcgaggagcgtcgtcgcctcctgatccagcggcgtcgcctccgactcgccgcctcccatgcctcgcggctcaccgttgcctcgcgcgtctcctccaaactcatcagcaccactgcctcctgctccagcggcgtcgcatccgatctgccgcctcccctcctcatggctcgtcgttgcctcccgcctcttccccaacctcgcccttgccgcccttggaggatcccaaatccgacgacgagctcagtaggcccacgcagacgcggatgtgctatgaacttcagctcaagcgtcagattctgtatcgatggcaatgggttccagaacagtacacaaggcaatttcaagacggttattcaattgctcaaatagttcagtaagtgagaacaaagaaacttcctaaatgtattaatatggtatgatgaatagtgtctcacacattgtgttgttgagctctggtctccatttccgtgctgctagaatgtgatgtgaagtattcaccttttgacatggataaacatcttctctctgttacatttgcaggcgaaagaaggtctgttgaagcagcctaaactattttcattgtgatttccaacgctacattttccaatatgcctttgtttcatacatttttccttttttcaaataaggctcatgtgctgcttcgaaaatcagttctaagaaggcaaccagggacaacaaacctgataagggaagaaacatgttctggataaatattggcctttgtttcaagactccaagcccgccaccatccagggatcaatcctcaccacgaggaccaggggtgatgccaacaaggtgtacgtgaacctttcctggggtgttgataatttagctctcgcaaacctgttcactgagcaaggaccatctatgacagtgagaacaagtcaagagggtttgattttttgtcatgtatggttccacagaagagcctgagaatgcattatcgaatctcaatggagctatgagttctgaaacccttttttcttccccttgctgctcgcggcatagcatttggaaattgaagtacaatttgtctttcaggatatactgaattgatttatcattgtcctgcaggacttggatgatagatccgtgttacgataccagcatcaaagccgcctagaagcaatactgaactttcacttgagatgtgagtagttgttgttgggggccttcgtcctccgaaggtcctcaaaaacatgatttgacaatgttttccaagtggattatgtgaacaggtaccttcggactcagaattacgaacatgaagtgcggtcaggacgaagcctgaaccagacgaaggacgggctgattaccaagctccacgaaggatggtgcacagccgaagctgtgcgcagggaagcttcgtcgtgatagcagagaggggaaccgacctaaagataaaaagactacgtgggccttgtcagatttccataagtcattgacaaatgtaatggacataaatgtaattttacgtgggctgcgtcccgcgtctataaatagatgaacagtactctcgtactgttcacgcggacttggcatttgcttttgcgtcacgcttgtactttttatcttctctcaggaccgaaggtacatttgtaatttgaaatcatttctatttttccatgttaataaaatagaaatgattctatgatgatgctt

SEQ ID NO: 213067 - DNA, 2088 bp, Zea Mays
aattctcttcaacacgcgcacatgtgacatgccccatggtcgtcgccgctccaggcatcctcccgtggcctcacctccctctcccttcctcctcccacccgtctgacgcctctgacgccgccgcagcagcaacagacgccaacacctccgcgtatgacatccagatcttcgagcccacctccatcgaggagcgtcgtcgcctcctgatccagcggcgtcgcctccgactcgccgcctcccatgcctcgcggctcaccgttgcctcgcgcgtctcctccaaactcatcagcaccactgcctcctgctccagcggcgtcgcatccgatctgccgcctcccctcctcatggctcgtcgttgcctcccgcctcttccccaacctcgcccttgccgcccttggaggatcccaaatccgacgacgagctcagtaggcccacgcagacgcggatgtgctatgaacttcagacaacatattcctaccgagaagtatgaaaagtacacttcagagcatgtcaaggtcctcacgaaagcttcctatcaagtggttgtttgcaagattgacgagttgtaggcaccaaatatatcgagtccttgctatcaacatatgagcatattattgtcaaagtaggcaacatctcatttaacagacaactctccgctctatcattctctcaaggctgatgtgcatttctgatatattgagctcaagcgtcagattctgtatcgatggcaatgggttccagaacagtacacaaggcaatttcaagacggttattcaattgctcaaatagttcagtaagtgagaacaaagaaacttcctaaatgtattaatatggtatgatgaatagtgtctcacacattgtgttgttgagctctggtctccatttccgtgctgctagaatgtgatgtgaagtattcaccttttgacatggataaacatcttctctctgttacatttgcaggcgaaagaaggtctgttgaagcagcctaaactattttcattgtgatttccaacgctacattttccaatatgcctttgtttcatacatttttccttttttcaaataaggctcatgtgctgcttcgaaaatcagttctaagaaggcaaccagggacaacaaacctgataagggaagaaacatgttctggataaatattggcctttgtttcaagactccaagggatcaatcctcaccacgaggaccaggggtgatgccaacaaggtgtacgtgaacctttcctggggtgttgataatttagctctcgcaaacctgttcactgagcaaggaccatctatgacagtgagaacaagtcaagagggtttgattttttgtcatgtatggttccacagaagagcctgagaatgcattatcgaatctcaatggagctatgagttctgaaacccttttttcttccccttgctgctcgcggcatagcatttggaaattgaagtacaatttgtctttcaggatatactgaattgatttatcattgtcctgcaggacttggatgatagatccgtgttacgataccagcatcaaagccgcctagaagcaatactgaactttcacttgagatgtgagtagttgttgttgggggccttcgtcctccgaaggtcctcaaaaacatgatttgacaatgttttccaagtggattatgtgaacaggtaccttcggactcagaattacgaacatgaagtgcggtcaggacgaagcctgaaccagacgaaggacgggctgattaccaagctccacgaaggatggtgcacagccgaagctgtgcgcagggaagcttcgtcgtgatagcagagaggggaaccgacctaaagataaaaagactacgtgggccttgtcagatttccataagtcattgacaaatgtaatggacataaatgtaattttacgtgggctgcgtcccgcgtctataaatagatgaacagtactctcgtactgttcacgcggacttggcatttgcttttgcgtcacgcttgtactttttatcttctctcaggaccgaaggtacatttgtaatttgaaatcatttctatttttccatgttaataaaatagaaatgattctatgatgatgctt

SEQ ID NO: 213068 - DNA, 1540 bp, Zea Mays
aattctcttcaacacgcgcacatgtgacatgccccatggtcgtcgccgctccaggcatcctcccgtggcctcacctccctctcccttcctcctcccacccgtctgacgcctctgacgccgccgcagcagcaacagacgccaacacctccgcgtatgacatccagatcttcgagcccacctccatcgaggagcgtcgtcgcctcctgatccagcggcgtcgcctccgactcgccgcctcccatgcctcgcggctcaccgttgcctcgcgcgtctcctccaaactcatcagcaccactgcctcctgctccagcggcgtcgcatccgatctgccgcctcccctcctcatggctcgtcgttgcctcccgcctcttccccaacctcgcccttgccgcccttggaggatcccaaatccgacgacgagctcagtaggcccacgcagacgcggatgtgctatgaacttcagacaacatattcctaccgagaagtatgaaaagtacacttcagagcatgtcaaggtcctcacgaaagcttcctatcaagtggttgtttgcaagattgacgagttgtaggcaccaaatatatcgagtccttgctatcaacatatgagcatattattgtcaaacgtcagattctgtatcgatggcaatgggttccagaacagtacacaaggcaatttcaagacggttattcaattgctcaaatagttcaaatgtgatgtgaagtattcaccttttgacatggataaacatcttctctctgttacatttgcaggcgaaagaaggctcatgtgctgcttcgaaaatcagttctaagaaggcaaccagggacaacaaacctgataagggaagaaacatgttctggataaatattggcctttgtttcaagactccaagcccgccaccatccagggatcaatcctcaccacgaggaccaggggtgatgccaacaaggtgacttggatgatagatccgtgttacgataccagcatcaaagccgcctagaagcaatactgaactttcacttgagatgtgagtagttgttgttgggggccttcgtcctccgaaggtcctcaaaaacatgatttgacaatgttttccaagtggattatgtgaacaggtaccttcggactcagaattacgaacatgaagtgcggtcaggacgaagcctgaaccagacgaaggacgggctgattaccaagctccacgaaggatggtgcacagccgaagctgtgcgcagggaagcttcgtcgtgatagcagagaggggaaccgacctaaagataaaaagactacgtgggccttgtcagatttccataagtcattgacaaatgtaatggacataaatgtaattttacgtgggctgcgtcccgcgtctataaatagatgaacagtactctcgtactgttcacgcggacttggcatttgcttttgcgtcacgcttgtactttttatcttctctcaggaccgaaggtacatttgtaatttgaaatcatttctatttttccatgttaataaaatagaaatgattctatgatgatgctt

SEQ ID NO: 213069 - DNA, 3246 bp, Zea Mays
aattctcttcaacacgcgcacatgtgacatgccccatggtcgtcgccgctccaggcatcctcccgtggcctcacctccctctcccttcctcctcccacccgtctgacgcctctgacgccgccgcagcagcaacagacgccaacacctccgcgtatgacatccagatcttcgagcccacctccatcgaggagcgtcgtcgcctcctgatccagcggcgtcgcctccgactcgccgcctcccatgcctcgcggctcaccgttgcctcgcgcgtctcctccaaactcatcagcaccactgcctcctgctccagcggcgtcgcatccgatctgccgcctcccctcctcatggctcgtcgttgcctcccgcctcttccccaacctcgcccttgccgcccttggaggatcccaaatccgacgacgagctcagtaggcccacgcagacgcggatgtgctatgaacttcagacaacatattcctaccgagaagtatgaaaagtacacttcagagcatgtcaaggtcctcacgaaagcttcctatcaagtggttgtttgcaagattgacgagttgtaggcaccaaatatatcgagtccttgctatcaacatatgagcatattattgtcaaactcaagcgtcagattctgtatcgatggcaatgggttccagaacagtacacaaggcaatttcaagacggttattcaattgctcaaatagttcaaatgtgatgtgaagtattcaccttttgacatggataaacatcttctctctgttacatttgcaggcgaaagaaggctcatgtgctgcttcgaaaatcagttctaagaaggcaaccagggacaacaaacctgataagggaagaaacatgttctggataaatattggcctttgtttcaagactccaaggtaagccattgaatgtaagtactcaatgtttcttttcttgtccagccaagtagccaagtagttgttgtgtctgttagattagtagcccatatgtatctaaaaagattccaaaggacacataaaaaattgtttgcaataatatagatgtgtgctttagtgcccatagacactgacctgctgccaaatttctagccaagatataactttctgagcactacttaatttatctaaaatgcacgatcgtatatgaagtcaaaataaagtgtgatgcacaaacgaatgtatcccatgagctctacgtttcttttcctatgcaatattattgacatcatttataaaaagctacattttgtgtcagttagcgaacatagaatcctattgacagcttctataataagaaaaatcaataaaagaaatgcttggaaaaatggaatataatttacactcattaaattgtagtaatttccttaccttgatataggtgtttggaaattcttccttcaaatcattcaggcccttttgccaccacgtctctgtcaagtagatggttgtattagcagaaaaagccaacactcctcacgagagccaaaaccttatcagggttagaccagtcttttgttcaagcgtcactggttgtcttacaactcttcttttccaacaagttcgcaaattgattgctaacaccttcccatctgattttttgcacacaacaaaatccacaataacactataaagtgaatatataaatcagaaaaaagatattcccactcatgctcaggcaattattttcaggatatgaatccttctaatttagactataaagtcacccattaggccattacaacttttttactatgcatttatgctttatttatacaccaaaaaaacttcaaaccctcgacaccattcatgcttcatttggtgtatgttttgctactttttccttgaacgtaaaagcattcttctctgatatctgtaactgtaaaaagattattgttctataactatctgttatttattgttccatcgctacctcactacctatttcctatctgatgttttgctataacatcgccatcgctgtgttgttcagacttaagttatgtgatgcttgttctttttagatgtaaatcctacaattttcgcctccaaagtcacccattacaatattttttactgaatctatatcttttacttatgtgtcactctgcattttttaagattcaaaaaaacattccttattttatacgcggtaaaacaacaaccttcataattcaccggatcttcttagtattatctctgacaaaaaaatataaagtctgtccccacaaatgcaaattagtttcttgattttcaattggttgttaaatgtctgacatgagcaatcagtttggttagcataaaaggatggtgattttgacaactacacagtttgtaggaacaacaataaaaacacttcattatatattagggttctatgatgttcaccattcatggcttcctaccagatcacacattgcataaatcaagttctacgctattggttacttttcagagattcagacagaacatttatattctgtttcctggattgagcatattccgttatagaatgtctagaatttttttcaaacttatgcatctgatatgatctctcaatatataagtactgacgaaagaagtgtgatggtcaattccagcccgccaccatccagggatcaatcctcaccacgaggaccaggggtgatgccaacaaggtgacttggatgatagatccgtgttacgataccagcatcaaagccgcctagaagcaatactgaactttcacttgagatgtgagtagttgttgttgggggccttcgtcctccgaaggtcctcaaaaacatgatttgacaatgttttccaagtggattatgtgaacaggtaccttcggactcagaattacgaacatgaagtgcggtcaggacgaagcctgaaccagacgaaggacgggctgattaccaagctccacgaaggatggtgcacagccgaagctgtgcgcagggaagcttcgtcgtgatagcagagaggggaaccgacctaaagataaaaagactacgtgggccttgtcagatttccataagtcattgacaaatgtaatggacataaatgtaattttacgtgggctgcgtcccgcgtctataaatagatgaacagtactctcgtactgttcacgcggacttggcatttgcttttgcgtcacgcttgtactttttatcttctctcaggaccgaaggtacatttgtaatttgaaatcatttctatttttccatgttaataaaatagaaatgattctatgatgatgctt

SEQ ID NO: 213070 - DNA, 3402 bp, Zea Mays
aattctcttcaacacgcgcacatgtgacatgccccatggtcgtcgccgctccaggcatcctcccgtggcctcacctccctctcccttcctcctcccacccgtctgacgcctctgacgccgccgcagcagcaacagacgccaacacctccgcgtatgacatccagatcttcgagcccacctccatcgaggagcgtcgtcgcctcctgatccagcggcgtcgcctccgactcgccgcctcccatgcctcgcggctcaccgttgcctcgcgcgtctcctccaaactcatcagcaccactgcctcctgctccagcggcgtcgcatccgatctgccgcctcccctcctcatggctcgtcgttgcctcccgcctcttccccaacctcgcccttgccgcccttggaggatcccaaatccgacgacgagctcagtaggcccacgcagacgcggatgtgctatgaacttcagacaacatattcctaccgagaagtatgaaaagtacacttcagagcatgtcaaggtcctcacgaaagcttcctatcaagtggttgtttgcaagattgacgagttgtaggcaccaaatatatcgagtccttgctatcaacatatgagcatattattgtcaaaattctgtatcgatggcaatgggttccagaacagtacacaaggcaatttcaagacggttattcaattgctcaaatagttcaaatgtgatgtgaagtattcaccttttgacatggataaacatcttctctctgttacatttgcaggcgaaagaaggctcatgtgctgcttcgaaaatcagttctaagaaggcaaccagggacaacaaacctgataagggaagaaacatgttctggataaatattggcctttgtttcaagactccaaggtaagccattgaatgtaagtactcaatgtttcttttcttgtccagccaagtagccaagtagttgttgtgtctgttagattagtagcccatatgtatctaaaaagattccaaaggacacataaaaaattgtttgcaataatatagatgtgtgctttagtgcccatagacactgacctgctgccaaatttctagccaagatataactttctgagcactacttaatttatctaaaatgcacgatcgtatatgaagtcaaaataaagtgtgatgcacaaacgaatgtatcccatgagctctacgtttcttttcctatgcaatattattgacatcatttataaaaagctacattttgtgtcagttagcgaacatagaatcctattgacagcttctataataagaaaaatcaataaaagaaatgcttggaaaaatggaatataatttacactcattaaattgtagtaatttccttaccttgatataggtgtttggaaattcttccttcaaatcattcaggcccttttgccaccacgtctctgtcaagtagatggttgtattagcagaaaaagccaacactcctcacgagagccaaaaccttatcagggttagaccagtcttttgttcaagcgtcactggttgtcttacaactcttcttttccaacaagttcgcaaattgattgctaacaccttcccatctgattttttgcacacaacaaaatccacaataacactataaagtgaatatataaatcagaaaaaagatattcccactcatgctcaggcaattattttcaggatatgaatccttctaatttagactataaagtcacccattaggccattacaacttttttactatgcatttatgctttatttatacaccaaaaaaacttcaaaccctcgacaccattcatgcttcatttggtgtatgttttgctactttttccttgaacgtaaaagcattcttctctgatatctgtaactgtaaaaagattattgttctataactatctgttatttattgttccatcgctacctcactacctatttcctatctgatgttttgctataacatcgccatcgctgtgttgttcagacttaagttatgtgatgcttgttctttttagatgtaaatcctacaattttcgcctccaaagtcacccattacaatattttttactgaatctatatcttttacttatgtgtcactctgcattttttaagattcaaaaaaacattccttattttatacgcggtaaaacaacaaccttcataattcaccggatcttcttagtattatctctgacaaaaaaatataaagtctgtccccacaaatgcaaattagtttcttgattttcaattggttgttaaatgtctgacatgagcaatcagtttggttagcataaaaggatggtgattttgacaactacacagtttgtaggaacaacaataaaaacacttcattatatattagggttctatgatgttcaccattcatggcttcctaccagatcacacattgcataaatcaagttctacgctattggttacttttcagagattcagacagaacatttatattctgtttcctggattgagcatattccgttatagaatgtctagaatttttttcaaacttatgcatctgatatgatctctcaatatataagtactgacgaaagaagtgtgatggtcaattccagcccgccaccatccagggatcaatcctcaccacgaggaccaggggtgatgccaacaaggtgtacgtgaacctttcctggggtgttgataatttagctctcgcaaacctgttcactgagcaaggaccatctatgacagtgagaacaagtcaagagggtttgattttttgtcatgtatggttccacagaagagcctgagaatgcattatcgaatctcaatggagctatgagacttggatgatagatccgtgttacgataccagcatcaaagccgcctagaagcaatactgaactttcacttgagatgtgagtagttgttgttgggggccttcgtcctccgaaggtcctcaaaaacatgatttgacaatgttttccaagtggattatgtgaacaggtaccttcggactcagaattacgaacatgaagtgcggtcaggacgaagcctgaaccagacgaaggacgggctgattaccaagctccacgaaggatggtgcacagccgaagctgtgcgcagggaagcttcgtcgtgatagcagagaggggaaccgacctaaagataaaaagactacgtgggccttgtcagatttccataagtcattgacaaatgtaatggacataaatgtaattttacgtgggctgcgtcccgcgtctataaatagatgaacagtactctcgtactgttcacgcggacttggcatttgcttttgcgtcacgcttgtactttttatcttctctcaggaccgaaggtacatttgtaatttgaaatcatttctatttttccatgttaataaaatagaaatgattctatgatgatgctt

SEQ ID NO: 213071 - DNA, 1957 bp, Zea Mays
aattctcttcaacacgcgcacatgtgacatgccccatggtcgtcgccgctccaggcatcctcccgtggcctcacctccctctcccttcctcctcccacccgtctgacgcctctgacgccgccgcagcagcaacagacgccaacacctccgcgtatgacatccagatcttcgagcccacctccatcgaggagcgtcgtcgcctcctgatccagcggcgtcgcctccgactcgccgcctcccatgcctcgcggctcaccgttgcctcgcgcgtctcctccaaactcatcagcaccactgcctcctgctccagcggcgtcgcatccgatctgccgcctcccctcctcatggctcgtcgttgcctcccgcctcttccccaacctcgcccttgccgcccttggaggatcccaaatccgacgacgagctcagtaggcccacgcagacgcggatgtgctatgaacttcaggttcgtcttttttcctgtacaccaattatagtcctccagcgcctacgaattttttttgcaaactttatacaagtccttcgctcaacaccgcctttggttgcaacggaagctgctactgttgttgaacgttagttgcttttattagatttatgcattttttttaaattcgagttcaaaattaagcaaaacacacgcttaatcaatttttttgcgttgttttcaactgatatatagacaacatattcctaccgagaagtatgaaaagtacacttcagagcatgtcaaggtcctcacgaaagcttcctatcaagtggttgtttgcaagattgacgagttgtaggcaccaaatatatcgagtccttgctatcaacatatgagcatattattgtcaaaattctgtatcgatggcaatgggttccagaacagtacacaaggcaatttcaagacggttattcaattgctcaaatagttcaaatgtgatgtgaagtattcaccttttgacatggataaacatcttctctctgttacatttgcaggcgaaagaaggctcatgtgctgcttcgaaaatcagttctaagaaggcaaccagggacaacaaacctgataagggaagaaacatgttctggataaatattggcctttgtttcaagactccaagcccgccaccatccagggatcaatcctcaccacgaggaccaggggtgatgccaacaaggtgtacgtgaacctttcctggggtgttgataatttagctctcgcaaacctgttcactgagcaaggaccatctatgacagtgagaacaagtcaagagggtttgattttttgtcatgtatggttccacagaagagcctgagaatgcattatcgaatctcaatggagctatgagttctgaaacccttttttcttccccttgctgctcgcggcatagcatttggaaattgaagtacaatttgtctttcaggatatactgaattgatttatcattgtcctgcaggacttggatgatagatccgtgttacgataccagcatcaaagccgcctagaagcaatactgaactttcacttgagatgtaccttcggactcagaattacgaacatgaagtgcggtcaggacgaagcctgaaccagacgaaggacgggctgattaccaagctccacgaaggatggtgcacagccgaagctgtgcgcagggaagcttcgtcgtgatagcagagaggggaaccgacctaaagataaaaagactacgtgggccttgtcagatttccataagtcattgacaaatgtaatggacataaatgtaattttacgtgggctgcgtcccgcgtctataaatagatgaacagtactctcgtactgttcacgcggacttggcatttgcttttgcgtcacgcttgtactttttatcttctctcaggaccgaaggtacatttgtaatttgaaatcatttctatttttccatgttaataaaatagaaatgattctatgatgatgctt

SEQ ID NO: 213072 - DNA, 2039 bp, Zea Mays
gcagcagtgtgagagctcgattcgttgccgtccacttgtctcacggcctgtcgccatctccttcctggttttttcatccgaccatccccggctcctccgcgccgtcggcgacgactccatcgagtcactcggccgcagcaaccggcgaccatgtaccgagtcgcctccgggctcggcgccctcaagaggcatggggcaaatgctcaaatgatgaatgctgcaattaggtgtgccagcacaagtgttgcacagaggtcttcgggtggcttctggacctggttgactggtgcgcgttcaaatgaaatacctcctccagatttcacacttccaggagtgactattcctcctccgctgcctgaccatgtggaggctggcaaaacaagagtcacaacacttcccaatggtgttaaaatagcctctgagacatctgcgggatcatcttgttctgttggagtttatgttgattgtggttctgtatatgaagcacctgaaacaacaggcgccagtcaactgttgaagacaatggccttcacaaccactgccaacaggagtgagttgcgggttgtgcgtgaaattgaggcaataggtggcagtgccaaagcatctgctagccgtgagatgatgagctacacttacggagccctgaagacttacatgcctgaaatggttgaggtgcttattgattgtgtacgcaaccctgcttttcttgattgggaggtcaaggaacagattttgaggctacaggcagagcttgcaaaatcatcaagttttcctgaaaattttcttttggaggctcttcattctactggctattctggtgctttagcaaatccactaattgtgccagaatattcagttagcagattgaatgcagatgtcctggaacaatttataactgagaactacactgcttcccgaattgttctagctgcatcaggcgttgatcatgatgaattggtatctattgccgaaccccttctgtctgacattcccagtgtatctggaacaacaaggccaaaatcaacctacattggtggagaatacagaagaagtgcagattcatcgagcacagacgttgcattggcattcgaggtcccaagtggttggctcaaagaaaaagattgcgtcactgtatcagttcttcaggcacttctgggtggtggtggcaagttttcttggggaaggcaaggaaaggggttacattcacgtctaaaccgcctcgtaaatgaatttgatcagatcaagtcaatctctgctttcaaggatgttcacagtaatactggcatctttggaatccatacatctactgatgcatcatttgttcctaaagctattgacctagcagccagagagctcacttcccttgcaactcctggacaagttgaccaaagccaactggaccgcgctaaagcctcagctaaatatgcgatactggcaaatttggaatcacaggcatcgctaacagaggacatggggcgccaagttttggcatttggtgaaaggaaacctgctgagcaccttctcaaggctgtagatggtgttactatgaaagatataacgtctgttgctgaaaagatcatttcatccccattgacaatggcatctcatggaaacgttctgaatatgcctacttatgagtcggtcagtggcaagttccgctcaaaatgaggagtacatgacccttcccttcattttatcaccttgtttgctggacaagttttaccagtaccttgtcattcacgtctaggccatggttcttggtcagtttcagaagaaataagcaacctcatgcagttttgttcgtgaaacctgtgatcacttcacaattattcccttttctcattcttttgcggaacattcgtgtggttaatgctggtgatagaccagtaacgtgcttgtaaatttaaccgaaccctggcccctcattcggtaccaaggccccaagagaatgtacaaaattgtcgtaaaactcttgacaaaaatgttgtcgcacatgaataatgattctacagaactgaagtttgcatgaaaaaataaca

SEQ ID NO: 213073 - DNA, 1377 bp, Zea Mays
acgcgcccgagcttgatgcgtcagcctgggagctgagctgatggaggcatggggcaaatgctcaaatgatgaatgctgcaattaggtgtgccagcacaagtgttgcacagaggtcttcgggtggcttctggacctggttgactggtgcgcgttcaaatgaaatacctcctccagatttcacacttccaggagtgactattcctcctccgctgcctgaccatgtggaggctggcaaaacaagagtcacaacacttcccaatggtgttaaaatagcctctgagacatctgcgggatcatcttgttctgttggagtttatgttgattgtggttctgtatatgaagcacctgaaacaacaggcgccagtcaactgttgaagacaatggccttcacaaccactgccaacaggagtgagttgcgggttgtgcgtgaaattgaggcaataggtggcagtgccaaagcatctgctagccgtgagatgatgagctacacttacggagccctgaagacttacatgcctgaaatggttgaggtgcttattgattgtgtacgcaaccctgcttttcttgattgggaggtcaaggaacagattttgaggctacaggcagagcttgcaaaatcatcaagttttcctgaaaattttcttttggaggctcttcattctactggctattctggtgctttagcaaatccactaattgtgccagaatattcagttagcagattgaatgcagatgtcctggaacaatttataactgagaactacactgcttcccgaattgttctagctgcatcaggcgttgatcatgatgaattggtatctattgccgaaccccttctgtctgacattcccagtgtatctggaacaacaaggccaaaatcaacctacattggtggagaatacagaagaagtgcagattcatcgagcacagacgttgcattggcattcgaggtcccaagtggttggctcaaagaaaaagattgcgtcactgtatcagttcttcaggcacttctgggtggtggtggcaagttttcttggggaaggcaaggaaaggggttacattcacgtctaaaccgcctcgtaaatgaatttgatcagatcaagtcaatctctgctttcaaggatgttcacagtaatactggcatctttggaatccatacatctactgatgcatcatttgttcctaaagctattgacctagcagccagagagctcacttcccttgcaactcctggacaagttgaccaaagccaactggaccgcgctaaagcctcagctaaatatgcgatactggcaaatttggaatcacaggcatcgctaacagaggacatggggcgccaagttttggcatttggtgaaaggatgctgtcagatattg

SEQ ID NO: 213074 - DNA, 1607 bp, Zea Mays
cgagagcttccacctccctcctccccgtcccggccgctctctgcagggcaggcccatgcgggtgaggtaccggtgacgacgcggcggcccacggccggagacgatgaaggggaggctgctgttcaagagccctctcccccgcagctacctctcccatacctccagcgtcacgtccgccgccgtcgccacccaccgcgtctaccaagtctggagaggaaagaatgacgtggtggtgctggtgctgacgtcggggcgggaccccgggatcatcccccggaacgcccggccgcctgagcccgactccttcgcgacgacgacgacggagatgagctccggctcccccgcgacgggcgcgtcgtggtcgctgcccccgacgcgggacgtgtacgtgaacggcgtggcggtgaaggtgaagtactgccacacgtgcatgctgtaccggccgccgcgctgctcgcactgctccgtgtgcaacaactgcgtggagcgcttcgaccaccactgcccctgggtggggcagtgcatcgggcgccggaactaccgcttcttcttcctcttcatcgcgtccaccacgttcctgtgcctctacgtgttcggcttctgctgggtggacctgctgctcacctcccggcggcgcggcggcgtcggcatcggccgcgccgtggccgagtcgcccgtctccggctgcctcatcgcctacacgttcgtgacggcgtggttcgtgggcgggctcacggcgttccactcctacctcgtgtgcaccaaccagaccacgtacgagaacttccggtaccggtacgagcgcaaggccaacccgttcaaccgcggcgccggcagtaacgtggccgagatcttctgctcgccggtcccgccgtcccggaacgacttccgggccagggtgtcccccgccgacccggacgccgccgcgctctattacctcggcccgctggcgtccgagtcccggatcagtttctacaccagggccagcggcctcagcttcgatatggccaaggccagcttcgaccgcaactactccgccgccagcgtcgcctcgtcctccgacttcggcgacatctacggcgccggcggcgggctcgaccgagtatcgtcgcaccagcagccgcggcactccatcttcggcgttggcggtggcggccatgccagggagggcaagaagcaggcggaggacgaagcggacgccgtgacggcggagctcggggccaccatgcacatgcactacggccgcggcgccggccgcacgcgcgggagggagttcgggatggtgtgaatgtgatcgagcgcatgcacgcaggggaacgaggggacgggtcgagaagaagcagatgctgccgtgttctcagtctctcagctcgatcgagaatgtgatttgtgcgtgtgcaattttgcgtgatgtgtcgtacgtaagtgtaagtcgtagcatcagcttcgttctcctcgtatatgtctggaaatgggatgccattctacttccggtgcatggtaccctgtagttcaaggattcatgtatatatatagcagtattatacacatatgcatatacatagcaggctgcctatgcacatgaattggtgtctagtcccatgttg

SEQ ID NO: 213075 - DNA, 1841 bp, Zea Mays
cacgcagacggttgccggttgtcagatccgaatattgaggacactggtccatattctgggcggcgatccgcaggcgggctacacacacatacatggcggcggagggcgccggaggccggggacgagccatgcggtacccgcctctgtcggcgctcgtggtctccgccatcgcggccttctcggccgtgatcgtcctcgccgtcgtccactcggcgtacgacgacgccatgtcgcggacgcggacgctgctgggccacaacctggagccgacgccgtggcacccgttcccgcacgacaagggccggccgccggcgcgcgcggcgctgcggtgcgcgccctccatcgcctgcctgccgccgctatcgtcgtcgtcgtcgtcgccgcagccgcaaggtaacaagaagaagaagcaaaagcagtgccctgcctacttcgctgccatccaccgggacctggctccgtggcgcgggcagggccggggcgtgacgcgcgcgctcctggacgaggcgcggcggcgcgcgtccatgcgcgtcaccatcacgggcggcgggcggcggctgcacgtggacctctactacgcctgcgtgcagagccgcgccctgttcacggtgtggagcctgctgcagctgatgcggcggtaccccgggcgcgtgcccgacgtggacctcatgttcgactgcatggaccgccccgccatcaaccggaccgagcacggggacggcgctctgccgccgccgccgctcttccgctactgcaccaccagggaccacttcgacatccccttccctgactggtccttctggggctggccggagacgaacatcgagccatggaaccacgagttcaagaacatcagggcgggcgccagggcaacgagatgggcggacagggtgccgacggcgtactggaagggcaacccggacgtggcgtcgccgctgcgggaggcgctgctgggctgcaacgacacggccctgtggcgcgccgagatcatgcgccagaactgggacgacgaggccaggtccggctaccagcactcgaggctctcggcgcagtgcacgcaccgctacaagatctacgccgagggcttcgcgtggtcggtcagcctcaagtacatcctctcctgcggctccatggcgctgctcatcgagccgcgctaccaggacttcttcagccgcgggctggagccccgggtgaactactggccggtcgccgccctgggcatgtgcgagtccatccgggacgccgtcgactggggcaacgccaacccggacgaggccgagcgcgtcggcaggcgcgggcagaggctcgtgcaggacctccgcatgcacgccgtctacgactacatgctgcacctgctcaccgagtatgcgcgcctcctcatagaccaggaccacggcttgagcccgccgccccacgcgcaggaggcatgcgaggcatccctgctctgcctcgcagacgacaagcagcggaggttcctccacgcatccaaggcagaccccgcgccgggcgacccgtgcgtgctcccgccgccgtgatccctccccctccctctctctctaggatttctttctttctttatttatttatttattagactcaacagacagatcagaacgagttgggaggatttcaatgatggttctaaagcttctgacaaaagcatgttcagatttcatttttaggtcaattgcaatttccttgaatttaaattgtattatgtatcctgccgtcctgcctcttacaaaactagatgccttcaactatgcaaaatgctaatatgaatgacgctataattaattagtgaagaaaaaaggagctgcaagattttttaaaaaaaaata

SEQ ID NO: 213076 - DNA, 2832 bp, Zea Mays
atctggatatacgtacctcattatgtggctatgttttctgttgtgatttacttacgatggatcagaggaaacaagtctgaaacacatactactacgcagcaagtgagagtagctgactcaaatgatatgaaagtaccaaattcttgccagtgtcagtgcaatggtgactagcaaatcctcgtggagccaggttgtaaaaaataccaggccgacaaacctgtccgttgctgcaagaaacctccaaccacaggaccttggagccgtgatatttggttgcacaaacagtaccattcaagagtgtcactcacggcaactttttggcttgccaaaaacacatatttcatatgtacgaaacattaaggaaggactacctctcttcctcttcaattatgatgatcgaagattgtatggtatttacgaagcttcagggaatggaaaattctgtcctgaatcaaatgcatggtcacaagatagcaagggcaaaacaagctatcctgcccaggttgcaatgcgggtaaaggtgtggtgttttccgctagcagagaatcagttcagaaatgcaattatagccaattactaccagaaaattcccggtgtccctggccagaagcttcattttttcaagtttgaattggatcatgctcaaacacgtgttttgatggatatgtttactccttctccttctcccaacagtttctggacgccccctgctgcagcaccagctgacgagcatgcgaaagaattagtgttgtcacctggatgggcaccagagtgtgaagggaacaataacctcaaatcagaaaaggttgtcaagtcatatgcagacatagtgaagaagaacacatttgtggaagttgggacaagagatgtggatgtggaacatgcaggctcaggtgatgaatcttctggtggtttcgatgaactggattgtcagtacacaccaacagagagggaggactacgctctatcagatagggtggttcaagtgcaacaacagtaccctgataagcaggcagaagtgcttagctttgatcgggttttacaagggcgcatcacttttcctggtcagcagtggcattctgatttttatgccaatactacccaaactgaggataacgatgcatatagctgcgagtatgcccaagaggtcaaatatgcaattctggatggcagctctaatttgccagaaaccttagattctgaagttgataaactgtccctggggcattctgatttgctggtgcagttgttggactctgaatcatgcacagaagctaagctgattgatgcagtgaaacagttatctggacgaatagaggtgatggagaagaagcaggcttggtccaacaaagaagtcaaacatctacaagggatgaatgagaggttactgaaaagaattgttgaactaaagggaaccgttatgacattgaattctaaaatagatcctttaaccctagatgattcacttaaccagtttgtagaacaatgtttgggttcagaagatgtcatttatttagttggtggttttgatggcttctcatctttgccatcactagactctttttccccttcattggacatactaacaccccttaaaccaatggctgttggcaagtcatattcctcaactgttgcactagagggcaagatatttgttcttggtggtggtgatggtgcttgctggtttgatacagttgactgttatgaccgaagccgtgatgattggtccacatgcccatcgttgacttgtgacaaggggagccttgctggggttagtgtcaacgggagaatctatgcatttggtggtggagatggaaccaagtgtttctctgatgttgaaatgtttgatcctgtgcatggaaagtggataaagaatcaacctatgctggaaaagcgctttgctctagctggtgtagcactaaatggtgcgatttatgctgttggtggcttcaatggtgttcaatatttgagctgtgctgaaagacttgatcctcgggagcctaactggaaaatgctaccaaagatgagtgcaggaaggggctgtcatacacttacagttcttaatgagaagatattctcgattggtggatatgacactagggctaaagcaatggtgtctactgttgaggtgtatgagccaaggatgccatcgtgggtgatggttgaacccatgaactacaccagaggatatcattcttcagctgtgctcggtggctcaatattcacctttggtggggtgaaaggtgaagcagacacaatcttggatgtggtggaacactacaaggaagggtgtggctggatgacaacgggattgaagtcgattggcagaagatgctactgctcagcgattgttctctgactgtaactgccttaaaaccaagtgagaatgaggagactgataataggtaaaactaatatattaatattaggtaaaaactaagaaggctcttgcttagcctgaactgacaacactagacacgatggacctcgtagtttctgaatcggcgaactgtaaaacaaacattgagctgtttgtgttgtccgacactggatggtgggtggatgcatgcatgagtgaatcggtactgaactgatgtagagatgacacttccatggatgaatatccaagtatttgactctgtatgttgagctttttctctttccggttccagctttttactaaagcagcttgcctaaacaaaaaaaggcactgtaaatggacctgtgacatttacctgaatttgtttgtcagggcgcttaagcatgctttgcactttcttattatctatcagggatctgtaaatggcttctacaatgcagtctatggtagtt

SEQ ID NO: 213077 - DNA, 2536 bp, Zea Mays
ggatgatcgacgtaatttgggctggcttgccaaaaacacatatttcatatgtacgaaacattaaggaaggactacctctcttcctcttcaattatgatgatcgaagattgtatggtatttacgaagcttcagggaatggaaaattctgtcctgaatcaaatgcatggtcacaagatagcaagggcaaaacaagctatcctgcccaggttgcaatgcgggtaaaggtgtggtgttttccgctagcagagaatcagttcagaaatgcaattatagccaattactaccagaaaattcccggtgtccctggccagaagcttcattttttcaagtttgaattggatcatgctcaaacacgtgttttgatggatatgtttactccttctccttctcccaacagtttctggacgccccctgctgcagcaccagctgacgagcatgcgaaagaattagtgttgtcacctggatgggcaccagagtgtgaagggaacaataacctcaaatcagaaaaggttgtcaagtcatatgcagacatagtgaagaagaacacatttgtggaagttgggacaagagatgtggatgtggaacatgcaggctcaggtgatgaatcttctggtggtttcgatgaactggattgtcagtacacaccaacagagagggaggactacgctctatcagatagggtggttcaagtgcaacaacagtaccctgataagcaggcagaagtgcttagctttgatcgggttttacaagggcgcatcacttttcctggtcagcagtggcattctgatttttatgccaatactacccaaactgaggataacgatgcatatagctgcgagtatgcccaagaggtcaaatatgcaattctggatggcagctctaatttgccagaaaccttagattctgaagttgataaactgtccctggggcattctgatttgctggtgcagttgttggactctgaatcatgcacagaagctaagctgattgatgcagtgaaacagttatctggacgaatagaggtgatggagaagaagcaggcttggtccaacaaagaagtcaaacatctacaagggatgaatgagaggttactgaaaagaattgttgaactaaagggaaccgttatgacattgaattctaaaatagatcctttaaccctagatgattcacttaaccagtttgtagaacaatgtttgggttcagaagatgtcatttatttagttggtggttttgatggcttctcatctttgccatcactagactctttttccccttcattggacatactaacaccccttaaaccaatggctgttggcaagtcatattcctcaactgttgcactagagggcaagatatttgttcttggtggtggtgatggtgcttgctggtttgatacagttgactgttatgaccgaagccgtgatgattggtccacatgcccatcgttgacttgtgacaaggggagccttgctggggttagtgtcaacgggagaatctatgcatttggtggtggagatggaaccaagtgtttctctgatgttgaaatgtttgatcctgtgcatggaaagtggataaagaatcaacctatgctggaaaagcgctttgctctagctggtgtagcactaaatggtgcgatttatgctgttggtggcttcaatggtgttcaatatttgagctgtgctgaaagacttgatcctcgggagcctaactggaaaatgctaccaaagatgagtgcaggaaggggctgtcatacacttacagttcttaatgagaagatattctcgattggtggatatgacactagggctaaagcaatggtgtctactgttgaggtgtatgagccaaggatgccatcgtgggtgatggttgaacccatgaactacaccagaggatatcattcttcagctgtgctcggtggctcaatattcacctttggtggggtgaaaggtgaagcagacacaatcttggatgtggtggaacactacaaggaagggtgtggctggatgacaacgggattgaagtcgattggcagaagatgctactgctcagcgattgttctctgactgtaactgccttaaaaccaagtgagaatgaggagactgataataggtaaaactaatatattaatattaggtaaaaactaagaaggctcttgcttagcctgaactgacaacactagacacgatggacctcgtagtttctgaatcggcgaactgtaaaacaaacattgagctgtttgtgttgtccgacactggatggtgggtggatgcatgcatgagtgaatcggtactgaactgatgtagagatgacacttccatggatgaatatccaagtatttgactctgtatgttgagctttttctctttccggttccagctttttactaaagcagcttgcctaaacaaaaaaaggcactgtaaatggacctgtgacatttacctgaatttgtttgtcagggcgcttaagcatgctttgcactttcttattatctatcagggatctgtaaatggcttctacaatgcagtctatggtagtt

SEQ ID NO: 213078 - DNA, 2463 bp, Zea Mays
agagcgtcttgccatgaaacagcttgaggcttgccaaaaacacatatttcatatgtacgaaacattaaggaaggactacctctcttcctcttcaattatgatgatcgaagattgtatggtatttacgaagcttcagggaatggaaaattctgtcctgaatcaaatgcatggtcacaagatagcaagggcaaaacaagctatcctgcccaggttgcaatgcgggtaaaggtgtggtgttttccgctagcagagaatcagttcagaaatgcaattatagccaattactaccagaaaattcccggtgtccctggccagaagcttcattttttcaagtttgaattggatcatgctcaaacacgtgttttgatggatatgtttactccttctccttctcccaacagtttctggacgccccctgctgcagcaccagctgacgagcatgcgaaagaattagtgttgtcacctggatgggcaccagagtgtgaagggaacaataacctcaaatcagaaaaggttgtcaagtcatatgcagacatagtgaagaagaacacatttgtggaagttgggacaagagatgtggatgtggaacatgcaggctcaggtgatgaatcttctggtggtttcgatgaactggattgtcagtacacaccaacagagagggaggactacgctctatcagatagggtggttcaagtgcaacaacagtaccctgataagcaggcagaagtgcttagctttgatcgggttttacaagggcgcatcacttttcctggtcagcagtggcattctgatttttatgccaatactacccaaactgaggataacgatgcatatagctgcgagtatgcccaagaggtcaaatatgcaattctggatggcagctctaatttgccagaaaccttagattctgaagttgataaactgtccctggggcattctgatttgctggtgcagttgttggactctgaatcatgcacagaagctaagctgattgatgcagtgaaacagttatctggacgaatagaggtgatggagaagaagcaggcttggtccaacaaagaagtcaaacatctacaagggatgaatgagaggttactgaaaagaattgttgaactaaagggaaccgttatgacattgaattctaaaatagatcctttaaccctagatgattcacttaaccagtttgtagaacaatgtttgggttcagaagatgtcatttatttagttggtggttttgatggcttctcatctttgccatcactagactctttttccccttcattggacatactaacaccccttaaaccaatggctgttggcaagtcatattcctcaactgttgcactagagggcaagatatttgttcttggtggtggtgatggtgcttgctggtttgatacagttgactgttatgaccgaagccgtgatgattggtccacatgcccatcgttgacttgtgacaaggggagccttgctggggttagtgtcaacgggagaatctatgcatttggtggtggagatggaaccaagtgtttctctgatgttgaaatgtttgatcctgtgcatggaaagtggataaagaatcaacctatgctggaaaagctgtgctgaaagacttgatcctcgggagcctaactggaaaatgctaccaaagatgagtgcaggaaggggctgtcatacacttacagttcttaatgagaagatattctcgattggtggatatgacactagggctaaagcaatggtgtctactgttgaggtgtatgagccaaggatgccatcgtgggtgatggttgaacccatgaactacaccagaggatatcattcttcagctgtgctcggtggctcaatattcacctttggtggggtgaaaggtgaagcagacacaatcttggatgtggtggaacactacaaggaagggtgtggctggatgacaacgggattgaagtcgattggcagaagatgctactgctcagcgattgttctctgactgtaactgccttaaaaccaagtgagaatgaggagactgataataggtaaaactaatatattaatattaggtaaaaactaagaaggctcttgcttagcctgaactgacaacactagacacgatggacctcgtagtttctgaatcggcgaactgtaaaacaaacattgagctgtttgtgttgtccgacactggatggtgggtggatgcatgcatgagtgaatcggtactgaactgatgtagagatgacacttccatggatgaatatccaagtatttgactctgtatgttgagctttttctctttccggttccagctttttactaaagcagcttgcctaaacaaaaaaaggcactgtaaatggacctgtgacatttacctgaatttgtttgtcagggcgcttaagcatgctttgcactttcttattatctatcagggatctgtaaatggcttctacaatgcagtctatggtagtt

SEQ ID NO: 213079 - DNA, 672 bp, Zea Mays
aaacaattagggaataccagaaagcagtatcatattatgcaaaggcactcacttttccaaccaaaagtttgagtgcatttgctggtcttgcttacacttatcatcttatggatgattttgaggctgccataaattattaccataaggctctatggttgaaaccagacgaccagttttgcacagacatgctaacatatgctcttgagtccatctgccaaatcactgctcgtagaaagcctggtcgaggtttgctaaccgcaacaggtggtgtcacatgctagggtattattttccttacagacatagtagtagctaattatatgtaaatttgttggtgtacaatatgtaattgctcaagttcatttcagtcactcgaggctgatcgtagtgtaaagccagacattttctgtaccttttaatttatactagaaataggcagcgtccgaggacgctttgtaccagccacctacactatggaaaaactggggagagaccggagttgcaagatcaggttgttcagaggtatttttgcaaatcctaatagaaatgcatttacagaaatagagcatcgtgtcagacaagaaataggttagtgatgctcaggaaattgaagttttcctcttcctgaatattcattctcctgtgtgttagagttcaaaaaaaaaaatacaa

SEQ ID NO: 213080 - DNA, 804 bp, Zea Mays
ctgcaggcaacattggagaaacaattaggtaccgaaaggcagttcagttgtttgagttaacattggaccatacttcatcctctctgaatgaaatgtgggaaccaacattggtgaatcttgggcatgcacttcggaaactcaaggaataccagaaagcagtatcatattatgcaaaggcactcacttttccaaccaaaagtttgagtgcatttgctggtcttgcttacacttatcatcttatggatgattttgaggctgccataaattattaccataaggctctatggttgaaaccagacgaccagttttgcacagacatgctaacatatgctcttgagtccatctgccaaatcactgctcgtagaaagcctggtcgaggtttgctaaccgcaacaggtggtgtcacatgctagggtattattttccttacagacatagtagtagctaattatatgtaaatttgttggtgtacaatatgtaattgctcaagttcatttcagtcactcgaggctgatcgtagtgtaaagccagacattttctgtaccttttaatttatactagaaataggcagcgtccgaggacgctttgtaccagccacctacactatggaaaaactggggagagaccggagttgcaagatcaggttgttcagaggtatttttgcaaatcctaatagaaatgcatttacagaaatagagcatcgtgtcagacaagaaataggttagtgatgctcaggaaattgaagttttcctcttcctgaatattcattctcctgtgtgttagagttcaaaaaaaaaaatacaa

SEQ ID NO: 213081 - DNA, 2681 bp, Zea Mays
gtccgctcgaccaccacgagggagtgggctgtgactcggacagcaccaaaacctcgcccgccatggcgtcgccgtcgtcgtctccgccgccgaagctgccgatccccggccgccgcaacatactcatcaccagcgccttaccctatgtgaataacgtcccgcacctcgggaacatcatcggatgcgttctgagcgccgacgtgttcgcgcgctactgcaggctacgcgggtacaacgcgctctacatatgcgggacggacgagtacgggacggccacggagaccaaggccatggaggaggagtgctcgcccaaggagatctgtgacaagtaccatgctatccacagtgaggtttacaagtggtttgacatagaatttgacaaatttgggcgtacatcctctcctcaacagacaacaatctgccaagcaattttccataaattgatggaaaacaattggctatcagaaaacaccatgcagcagctttactgtgatacatgtcaaaggtttttggcagatagacttgtagaaggagcatgcccaacagaagggtgtactaataaagctgcgcgaggtgatcaatgtgacaattgcagccacatgttgaatccaactgaactaattgatccaaagtgtaaggtctgtaagaatactcctcatattcgtgaaacggatcacttgttcttggatctccctcgaatagaagacaagttggtaaactacattaatgatacttcagtagctggtatgtggagtcaaaatgccattcaagctacaaatgcatggttaaaggaaggactaaaatcacgctgtatcacaagagatcttaaatggggagttcctgttccaattgagaagtataaagataagttattttcaggttttctatgtctggttcgatgcaccgattggctacgtgtccatcacatcatcttatacacctgagtgggagaggtggtggaagaatcctgataatgtggaattatttcagttcatgggcaaagataatgtgccatttcatacgatcatgtttccttcaacactactaggaactggtgaaaattggacaatgatgaagaccatttgtgtcaccgaatatctaaattacgaaggaggaaaattctccaagagtaagggtatcggagttttcggtaatgatgccaaggataccaatattcctcctgaagtatggcgatactacctgcttatgaatcgacctgaggcatcagatacactctttacctggactgatttgcaagccaaattgaacagcgaattgttaaacaacttgggaaatttcatcaatcgtgtgctaagctttattgcaaaaccagctggggctggatatgattcaattatacccgatgctcctggtgctgagtcacatccatcgacaagtgtcattgcagaaaaagttagtaaatcggttgaacaatatcttgatgcaatggaaaaggtaaagctgaaacaaggactgaagagtgcaatgggcatctctactgatggaaatcgttatttgcaggacagcgaattttggaaactttataaggacaatccagcaagctgtgcgattgtgatgaaaacttcagttggtcttgtatatctccttgcctgtctcctggaacctttcatgccttccttttcaaaagaagtgctacgtcaattaaacctgtccccagaagaaaatatttctttcagtgaagaaaatggcgaaagtgtgaaggcaaaacccccttgggatcttgtaccagcagggcacaaaatagggaggcctgtacctctgtttgaggaattgaaagatgaaaaggtgagtgagtatagggaaaaatatgcgggcagtcaagctgagaggaactcgaaagcagtggctgacgctgaagccacaaaaattgctaaccaaacccaaagcatagcattatctggaggctcaaaaaaggaacaaaagaaacagtctggtaactcaaaatcaaaggtggctgaggcagaattatccgttgcaaagttggagattcgagtggggcttatcagaaaagcggagaagcatccagacgccgattcgctgtatgtagaggaaatcgatgttggagaggaggctccaagaacggtggttagtggccttgtcaaatacattcctcttgaagaaatacagaaccggaaagtctgtgttctctgcaatctgaaaccggtggtgatgcgtggtataaaatcggatgccatggttttggctgcttctaatgaggaccatactagggttgagctggtcgagccaccagcggatgctgccgtgggggagagggtgacctttgccgggcactccggtgagaccgaggcttctctcagtggcaagagcaaggtgtgggagaagctagcggctgacctgcgtagcaatggcgaccttgtggcctgctaccaagatgtccccttcatgacttcggctggagtctgcaaggtacagacaatagcgaatggggaaatccgctagatgacgcgatgcctgaaggcagcgtgacgccgtggcctaactgccgtctgatgttactgaagtactagctgattggttttttgttgtaaattttctccttggatctgaattttcttgtattgaaaattggcaatagagaaaacgacggtgtttaattaattctgtggtggagatgggttgccatggaatgtatgacaccg

SEQ ID NO: 213082 - DNA, 2760 bp, Zea Mays
gtcagaatctgttggtacacaggcacaaaagctgtccgcttcgaacccgggaaggcgatcggcgtaagaatccattggagcggcagcggtttatatagaggcaaaaacccgccggccgtcaacgtccgctcgaccaccacgagggagtgggctgtgactcggacagcaccaaaacctcgcccgccatggcgtcgccgtcgtcgtctccgccgccgaagctgccgatccccggccgccgcaacatactcatcaccagcgccttaccctatgtgaataacgtcccgcacctcgggaacatcatcggatgcgttctgagcgccgacgtgttcgcgcgctactgcaggctacgcgggtacaacgcgctctacatatgcgggacggacgagtacgggacggccacggagaccaaggccatggaggaggagtgctcgcccaaggagatctgtgacaagtaccatgctatccacagtgaggtttacaagtggtttgacatagaatttgacaaatttgggcgtacatcctctcctcaacagacaacaatctgccaagcaattttccataaattgatggaaaacaattggctatcagaaaacaccatgcagcagatagacttgtagaaggagcatgcccaacagaagggtgtactaataaagctgcgcgaggtgatcaatgtgacaattgcagccacatgttgaatccaactgaactaattgatccaaagtgtaaggtctgtaagaatactcctcatattcgtgaaacggatcacttgttcttggatctccctcgaatagaagacaagttggtaaactacattaatgatacttcagtagctggtatgtggagtcaaaatgccattcaagctacaaatgcatggttaaaggaaggactaaaatcacgctgtatcacaagagatcttaaatggggagttcctgttccaattgagaagtataaagataaggttttctatgtctggttcgatgcaccgattggctacgtgtccatcacatcatcttatacacctgagtgggagaggtggtggaagaatcctgataatgtggaattatttcagttcatgggcaaagataatgtgccatttcatacgatcatgtttccttcaacactactaggaactggtgaaaattggacaatgatgaagaccatttgtgtcaccgaatatctaaattacgaaggaggaaaattctccaagagtaagggtatcggagttttcggtaatgatgccaaggataccaatattcctcctgaagtatggcgatactacctgcttatgaatcgacctgaggcatcagatacactctttacctggactgatttgcaagccaaattgaacagcgaattgttaaacaacttgggaaatttcatcaatcgtgtgctaagctttattgcaaaaccagctggggctggatatgattcaattatacccgatgctcctggtgctgagtcacatccatcgacaagtgtcattgcagaaaaagttagtaaatcggttgaacaatatcttgatgcaatggaaaaggtaaagctgaaacaaggactgaagagtgcaatgggcatctctactgatggaaatcgttatttgcaggacagcgaattttggaaactttataaggacaatccagcaagctgtgcgattgtgatgaaaacttcagttggtcttgtatatctccttgcctgtctcctggaacctttcatgccttccttttcaaaagaagtgctacgtcaattaaacctgtccccagaagaaaatatttctttcagtgaagaaaatggcgaaagtgtgaaggcaaaacccccttgggatcttgtaccagcagggcacaaaatagggaggcctgtacctctgtttgaggaattgaaagatgaaaaggtgagtgagtatagggaaaaatatgcgggcagtcaagctgagaggaactcgaaagcagtggctgacgctgaagccacaaaaattgctaaccaaacccaaagcatagcattatctggaggctcaaaaaaggaacaaaagaaacagtctggtaactcaaaatcaaaggtggctgaggcagaattatccgttgcaaagttggagattcgagtggggcttatcagaaaagcggagaagcatccagacgccgattcgctgtatgtagaggaaatcgatgttggagaggaggctccaagaacggtggttagtggccttgtcaaatacattcctcttgaagaaatacagaaccggaaagtctgtgttctctgcaatctgaaaccggtggtgatgcgtggtataaaatcggatgccatggttttggctgcttctaatgaggaccatactagggttgagctggtcgagccaccagcggatgctgccgtgggggagagggtgacctttgccgggcactccggtgagaccgaggcttctctcagtggcaagagcaaggtgtgggagaagctagcggctgacctgcgtagcaatggcgaccttgtggcctgctaccaagatgtccccttcatgacttcggctggagtctgcaaggtacagacaatagcgaatggggaaatccgctagatgacgcgatgcctgaaggcagcgtgacgccgtggcctaactgccgtctgatgttactgaagtactagctgattggttttttgttgtaaattttctccttggatctgaattttcttgtattgaaaattggcaatagagaaaacgacggtgtttaattaattctgtggtggagatgggttgccatggaatgtatgacaccg

SEQ ID NO: 213083 - DNA, 2758 bp, Zea Mays
gtcagaatctgttggtacacaggcacaaaagctgtccgcttcgaacccgggaaggcgatcggcgtaagaatccattggagcggcagcggtttatatagaggcaaaaacccgccggccgtcaacgtccgctcgaccaccacgagggagtgggctgtgactcggacagcaccaaaacctcgcccgccatggcgtcgccgtcgtcgtctccgccgccgaagctgccgatccccggccgccgcaacatactcatcaccagcgccttaccctatgtgaataacgtcccgcacctcgggaacatcatcggatgcgttctgagcgccgacgtgttcgcgcgctactgcaggctacgcgggtacaacgcgctctacatatgcgggacggacgagtacgggacggccacggagaccaaggccatggaggaggagtgctcgcccaaggagatctgtgacaagtaccatgctatccacagtgaggtttacaagtggtttgacatagaatttgacaaatttgggcgtacatcctctcctcaacagacaacaatctgccaagcaattttccataaattgatggaaaacaattggctatcagaaaacaccatgcagcagctttactgtgatacatgtcaaaggtttttggcagatagacttgtagaaggagcatgcccaacagaagggtgtactaataaagctgcgcgaggtgatcaatgtgacaattgcagccacatgttgaatccaactgaactaattgatccaaagtgtaaggtctgtaagaatactcctcatattcgtgaaacggatcacttgttcttggatctccctcgaatagaagacaagttggtaaactacattaatgatacttcagtagctggtatgtggagtcaaaatgccattcaagctacaaatgcatggttaaaggaaggactaaaatcacgctgtatcacaagagatcttaaatggggagttcctgttccaattgagaagtataaagataaggttttctatgtctggttcgatgcaccgattggctacgtgtccatcacatcatcttatacacctgagtgggagaggtggtggaagaatcctgataatgtggaattatttcagttcatgggcaaagataatgtgccatttcatacgatcatgtttccttcaacactactaggaactggtgaaaattggacaatgatgaagaccatttgtgtcaccgaatatctaaattacgaaggaggaaaattctccaagagtaagggtatcggagttttcggtaatgatgccaaggataccaatattcctcctgaagcatcagatacactctttacctggactgatttgcaagccaaattgaacagcgaattgttaaacaacttgggaaatttcatcaatcgtgtgctaagctttattgcaaaaccagctggggctggatatgattcaattatacccgatgctcctggtgctgagtcacatccatcgacaagtgtcattgcagaaaaagttagtaaatcggttgaacaatatcttgatgcaatggaaaaggtaaagctgaaacaaggactgaagagtgcaatgggcatctctactgatggaaatcgttatttgcaggacagcgaattttggaaactttataaggacaatccagcaagctgtgcgattgtgatgaaaacttcagttggtcttgtatatctccttgcctgtctcctggaacctttcatgccttccttttcaaaagaagtgctacgtcaattaaacctgtccccagaagaaaatatttctttcagtgaagaaaatggcgaaagtgtgaaggcaaaacccccttgggatcttgtaccagcagggcacaaaatagggaggcctgtacctctgtttgaggaattgaaagatgaaaaggtgagtgagtatagggaaaaatatgcgggcagtcaagctgagaggaactcgaaagcagtggctgacgctgaagccacaaaaattgctaaccaaacccaaagcatagcattatctggaggctcaaaaaaggaacaaaagaaacagtctggtaactcaaaatcaaaggtggctgaggcagaattatccgttgcaaagttggagattcgagtggggcttatcagaaaagcggagaagcatccagacgccgattcgctgtatgtagaggaaatcgatgttggagaggaggctccaagaacggtggttagtggccttgtcaaatacattcctcttgaagaaatacagaaccggaaagtctgtgttctctgcaatctgaaaccggtggtgatgcgtggtataaaatcggatgccatggttttggctgcttctaatgaggaccatactagggttgagctggtcgagccaccagcggatgctgccgtgggggagagggtgacctttgccgggcactccggtgagaccgaggcttctctcagtggcaagagcaaggtgtgggagaagctagcggctgacctgcgtagcaatggcgaccttgtggcctgctaccaagatgtccccttcatgacttcggctggagtctgcaaggtacagacaatagcgaatggggaaatccgctagatgacgcgatgcctgaaggcagcgtgacgccgtggcctaactgccgtctgatgttactgaagtactagctgattggttttttgttgtaaattttctccttggatctgaattttcttgtattgaaaattggcaatagagaaaacgacggtgtttaattaattctgtggtggagatgggttgccatggaatgtatgacaccg

SEQ ID NO: 213084 - DNA, 2824 bp, Zea Mays
ggtgcatcagcgtcagaatctgttggtacacaggcacaaaagctgtccgcttcgaacccgggaaggcgatcggcgtaagaatccattggagcggcagcggtttatatagaggcaaaaacccgccggccgtcaacgtccgctcgaccaccacgagggagtgggctgtgactcggacagcaccaaaacctcgcccgccatggcgtcgccgtcgtcgtctccgccgccgaagctgccgatccccggccgccgcaacatactcatcaccagcgccttaccctatgtgaataacgtcccgcacctcgggaacatcatcggatgcgttctgagcgccgacgtgttcgcgcgctactgcaggctacgcgggtacaacgcgctctacatatgcgggacggacgagtacgggacggccacggagaccaaggccatggaggaggagtgctcgcccaaggagatctgtgacaagtaccatgctatccacagtgaggtttacaagtggtttgacatagaatttgacaaatttgggcgtacatcctctcctcaacagacaacaatctgccaagcaattttccataaattgatggaaaacaattggctatcagaaaacaccatgcagcagctttactgtgatacatgtcaaaggtttttggcagatagacttgtagaaggagcatgcccaacagaagggtgtactaataaagctgcgcgaggtgatcaatgtgacaattgcagccacatgttgaatccaactgaactaattgatccaaagtgtaagggtattgtgttttttgtaggtctgtaagaatactcctcatattcgtgaaacggatcacttgttcttggatctccctcgaatagaagacaagttggtaaactacattaatgatacttcagtagctggtatgtggagtcaaaatgccattcaagctacaaatgcatggttaaaggaaggactaaaatcacgctgtatcacaagagatcttaaatggggagttcctgttccaattgagaagtataaagataaggttttctatgtctggttcgatgcaccgattggctacgtgtccatcacatcatcttatacacctgagtgggagaggtggtggaagaatcctgataatgtggaattatttcagttcatgggcaaagataatgtgccatttcatacgatcatgtttccttcaacactactaggaactggtgaaaattggacaatgatgaagaccatttgtgtcaccgaatatctaaattacgaaggaggaaaattctccaagagtaagggtatcggagttttcggtaatgatgccaaggataccaatattcctcctgaagtatggcgatactacctgcttatgaatcgacctgaggcatcagatacactctttacctggactgatttgcaagccaaattgaacagcgaattgttaaacaacttgggaaatttcatcaatcgtgtgctaagctttattgcaaaaccagctggggctggatatgattcaattatacccgatgctcctggtgctgagtcacatccatcgacaagtgtcattgcagaaaaagttagtaaatcggttgaacaatatcttgatgcaatggaaaaggtaaagctgaaacaaggactgaagagtgcaatgggcatctctactgatggaaatcgttatttgcaggacagcgaattttggaaactttataaggacaatccagcaagctgtgcgattgtgatgaaaacttcagttggtcttgtatatctccttgcctgtctcctggaacctttcatgccttccttttcaaaagaagtgctacgtcaattaaacctgtccccagaagaaaatatttctttcagtgaagaaaatggcgaaagtgtgaaggcaaaacccccttgggatcttgtaccagcagggcacaaaatagggaggcctgtacctctgtttgaggaattgaaagatgaaaaggtgagtgagtatagggaaaaatatgcgggcagtcaagctgagaggaactcgaaagcagtggctgacgctgaagccacaaaaattgctaaccaaacccaaagcatagcattatctggaggctcaaaaaaggaacaaaagaaacagtctggtaactcaaaatcaaaggtggctgaggcagaattatccgttgcaaagttggagattcgagtggggcttatcagaaaagcggagaagcatccagacgccgattcgctgtatgtagaggaaatcgatgttggagaggaggctccaagaacggtggttagtggccttgtcaaatacattcctcttgaagaaatacagaaccggaaagtctgtgttctctgcaatctgaaaccggtggtgatgcgtggtataaaatcggatgccatggttttggctgcttctaatgaggaccatactagggttgagctggtcgagccaccagcggatgctgccgtgggggagagggtgacctttgccgggcactccggtgagaccgaggcttctctcagtggcaagagcaaggtgtgggagaagctagcggctgacctgcgtagcaatggcgaccttgtggcctgctaccaagatgtccccttcatgacttcggctggagtctgcaaggtacagacaatagcgaatggggaaatccgctagatgacgcgatgcctgaaggcagcgtgacgccgtggcctaactgccgtctgatgttactgaagtactagctgattggttttttgttgtaaattttctccttggatctgaattttcttgtattgaaaattggcaatagagaaaacgacggtgtttaattaattctgtggtggagatgggttgccatggaatgtatgacaccg

SEQ ID NO: 213085 - DNA, 2083 bp, Zea Mays
caggaattctgctcgcttgtattaaaccggtgaaagcagctgcctgcctgcctcgattttttttatatgtgccccctctctccctcactgctctcgctctctcctttgcactgctcctccgacttgctcttcgcgcagcaagacggagaaacaagaaccatccctccccctaccgctgctactcatgcacgcgcgcactgcctcctggtgccgccgcgtatgatccagacatgaatagggcgcacagcagcagctccaagctcatcaacgagaagctcgtggaacaccggatctccactgcgaagcactgcccccactgcggcgagaaaatcgacagcaaaccggattgggtggggctgccggcaggcgtcaagttcgatccaactgaccaggagctgatcgagcacctcgaggcgaaagtgaaggatgaaggctcgagatctcaccctctcatcgacgagttcatacccacaatagatggggaggacggcatatgttacacccaccccgagaaacttccaggtgtgacgagggatggcctaagcaagcacttcttccaccggccgtccaaggcctacacgacgggcacgaggaagaggaggaagatacagacggagtgcgacgtccacaagggggagacgaggtggcacaagaccggcaagacgcggccggtgatggtgaacggccggcagaaggggtgcaagaagatattggtgctgtacaccaacttcggcaagcaccgcaagccggagaagacgaactgggtcatgcaccagtaccacctcggcgacctagaagaggagaaggagggggagctggtggtgtgcaagatcttctaccagacgcaacccaggcagtgcagctggtcctccgaccggggcgccgccgccactgccttggcagcaacggcggcagcggcggcggcgcaggagcagcataggagggatagtggcagtggcagctgctcgtctagggaccacgaggtgtcagccacatcgttcccagccggatacacagtcaccacggccgtcgagatgcagcagcatatgaagcagcctgcggaccatttcagcttcgcgcctttcaggaaaaccttcgaccaggaggttggtataggtggtgatcaggtgccatctaatcagcttggacgttcagagccgcatcatgccggcctggggcagcagccacacggcccggtgctcgcgacgaagacggctgtgcctgctacagctttcctgatcagtaggccatcgaaccctgtctcgactatagtgccacctgcaatgcagcacgcatcagttgttctcgatcatgatcagttccatgtgccagcaatccttctccatcaccatgacaaatttcagccacaacaaaagcttgaccgcagatctgccggcttggaagaactgataatgggctgcacgtcgtccacaagcacaaaaggagatgcttccattgctcacccccaagagacagaatggccttacacgtactggccacctgacaaccaagatcatcatgggtagtagcaacagggacctggtaaatagtggcgatgtgaatgctgaaggaacactaaccgcaaccactttcactggaatggtttttgtctgcttgaatatgcagcgttgctttcttggagaatgtacacctacaatagtggggaaagaacagagaaaaaaaacgtatctctgtagatctccctcaataaagaaatgaggataaaactagttaacagtgtgagctctccaagacagaagagacaaaatggccaacgaaaagagaagggggaaagaccgatgggaggaaaggtactgtgtgtgctgacattgaagggatcatgtgtggacagtttagatgtattagaacaccttaatcaagtataactataatcagtttacggtttatcacagttttttattcgtgctacctgttagtggcattgtttgcatgtacattaacccttttaatttcttttagtttctaaattgatgctgattttcctttggttagttcatgctaatatgcatcacgaagaaataaagttagtaagaagctcataattccttcctttttttagcac

SEQ ID NO: 213086 - DNA, 3140 bp, Zea Mays
cgcctctattttatctatctatttccaccacgcgctcgttgtctcttgtcgctgcagcctcgtcccgtccaatccttccaagtctctcttcttgctgcaggctgccccaagcccaggctcaatccggctggacgaggagacggcattgctcgcatcgcctgccctgccctgccccccatgcgtgttgtgcgcatgaacagaggctaggctaccaacaacgcatagcatagccatggatcccgagttcggcgtcggcacggcgccacaaaaggggcggcgggcgtggcggacgacgctgctgctggcgtaccagagcctcggggtggtgtacggcgacctcagcatctcgccgctgtacgtgtacaagagcaccttcgccgaggacatcacgcactcggagaccaaccaggagatcttcggcgcgctctccttcgtcttctggacgctcaccctcgtcccgctcctcaagtacgccaccatcgtcctgcgcgccgacgacagcggcgagggcggcacgttcgcgctctactccctcatctgccgccacgccaatgtcagcctcctccccaaccgccaggtcgccgacgaggagctctccacctacaggctggagcgcccgcgcgaggccgccgggaggtccggcctgctcagggcgtggctggagaagcacacgaggctgcacaccgcgctgctcgtcatggtcatgatcggcacctgcatggtcatcggcgacggcgtcctcacgccagccatctccgtgttctccgccgtctcagggctcgagctctccctgtccaaggatcagcatgaatatgccgtcatcccgataacctgcgccatactggtgttcctgttcgcgctgcagcactacggcacccaccgcgtggggttcctcttcgcgcccatcatcctcgcctggctgctctgcatgagcgccatcggcctgtacaacatcgtccgctggaacccccagatctaccaggcactcaaccccgtctacatgatcaggttcctcaggaagaccaagaagtccggctggatgtcactgggaggaattctgctgtgcatgacagggtcagaagcaatgttcgcggatcttggacacttctcctacagcgccatccagcttgctttcacttctctagtgtacccttcactgatcctgggttacatgggccaagctgcttatctgtcccagcaccataaccttgacgcaagctaccagatcgggttctacattgcagttcctgagtgtgtacggtggcctgtgctggtgctggccatcttggcgtccgtggtgggcagccaggccatcatcagcgggaccttctccatcatcaaccagagccagtctctgagctgcttccctagggtgaaagtcgtgcacacgtctgacaaagttcatggccagatatacatccctgaggtcaactggatcctcatgatcctctgcgttgctgtcactgttggtttccgtaacaccaagcacatggggaacgcgtctggcttggccgtgatcacggtgatgctggtgaccacgtgcctcatgcccctggtgatcatgctgtgctgggaccgctccccctggctggccctcgccttcttcctcttcttcggctccatcgaggcgctctacttctcggcgtcgctgatcaagttcctggacggcgcgtgggtgcccatcctcctggccctcatcctgctcgccgtcatgttcgtgtggcaccacaccaccatcaggaagtacgagtacgacatgcacaacaaggtgaccctggagtggctgctggcgctgggcgacaagctgggcatggtgcgcgtcccgggcatcggcctcgtctacaccgacctcacctccggcgtgcccgccaacttctcccgcttcgtcaccaacctgccggcgttccaccgggtgctggtcttcgtctgcgtcaagtcagtgccggtgccgcacgtgctccccgccgagcgctacctcgtcggccgcgtcggcccgccgggacaccgctcctaccgctgcatcgtgcgctacggctaccgcgacgtgcaccaggacgtggactccttcgagacggagctcgtcgagagcctcgccacgttcatcaagctggacgcgctgttccgctgcagcgacgccgccggcgaccagcagcgggacagcagctactacgagcgcgagaacgcgctcacggtcatcgggagcaacccgctgcggcgccacctggccctgggctacgacgactcccactcccacgacgacggcgcgtcgtcagctggctctgaccgcgtggacggcatagagctcgccgcggcggcgccggcgccggcggtcgttaagaagcaggtgaggttcgcggtggctccgcccaggagccccggtgtggacgagaccgtgctggaggagctgcacgagctgtgcgaggcgcgcgaggccggcacggcgttcatcctgggccactcgcacgtgaagaccaagcccgggtcgtcgatactcaagaggctggccgtcggcgtcggctacaacttcctgcgccggaactgccgcggcccggacgtggtgctgcgcgtgccgccggcgtcgctgctcgaggtgggaatggtgtacgtgctgtaaccagaacgtggcggtgatgggtgactgcgatctctgcgtccggttttcgctgcgtgaactacggatctctctgctgtctgatatgctcttatgcacatctcgatttgcccatgtataaattgtaacgagatgcgatggtaacagaggatgccctgtcatttcccaatgatgagttgactaaggattataggccattttaactttatactaaatcaatcaatgcaaaattttgactacgtcttttaataaaaaacactgacacgtataagttcaaaaaaaaaataacatgtggtccttaaccttggcaaagggggaactgagctcagtggtaaaagctctatggtacaagctggccggtccaatttcctaccattatatggtggggagcctcttcctctgtgaaagtcaaaaaaaaaacttgccaaaggctcattggacaatgatatagttaagattttgtctcgtaattcacttatatagtcaccaaaatactgttgtttgcacttttttttgttgtgcagacaat

SEQ ID NO: 213087 - DNA, 279 bp, Zea Mays
gttgcatcttcggtaattcggttctggaaccgagtttaggatacgataatggtaagaatttgaagaaaccaaagccttggaagcacacccaagcaataacgccggcacaactcagacagatgcgtgatgaattttgggacactgctcctcactatggtggacagaaagagatttgggacgcacttagagccgctgcagactctgacctagcgcttgcgcaaaccatagtggatagtgctggcatcatcgtatcgaatctgacagacgaatctctagaat

SEQ ID NO: 213088 - DNA, 351 bp, Zea Mays
aattcggttctggaaccgagtttaggatacgttcatttgtacattagttggcgtcaaataaaaaaggatggaggtagtacaatatactacaattgaaactaatatcttgaaaatcagataatggtaagaatttgaagaaaccaaagccttggaagcacacccaagcaataacgccggcacaactcagacagatgcgtgatgaattttgggacactgctcctcactatggtggacagaaagagatttgggacgcacttagagccgctgcagactctgacctagcgcttgcgcaaaccatagtggatagtgctggcatcatcgtatcgaatctgacagacgaatctctagaat

SEQ ID NO: 213089 - DNA, 351 bp, Zea Mays
ttatctttgctgcacctacattatccataagttcatttgtacattagttggcgtcaaataaaaaaggatggaggtagtacaatatactacaattgaaactaatatcttgaaaatcagataatggtaagaatttgaagaaaccaaagccttggaagcacacccaagcaataacgccggcacaactcagacagatgcgtgatgaattttgggacactgctcctcactatggtggacagaaagagatttgggacgcacttagagccgctgcagactctgacctagcgcttgcgcaaaccatagtggatagtgctggcatcatcgtatcgaatctgacagacgaatctctagaat

SEQ ID NO: 213090 - DNA, 260 bp, Zea Mays
tgtttttttacaagaggaattaatagataatggtaagaatttgaagaaaccaaagccttggaagcacacccaagcaataacgccggcacaactcagacagatgcgtgatgaattttgggacactgctcctcactatggtggacagaaagagatttgggacgcacttagagccgctgcagactctgacctagcgcttgcgcaaaccatagtggatagtgctggcatcatcgtatcgaatctgacagacgaatctctagaat

SEQ ID NO: 213091 - DNA, 2362 bp, Zea Mays
aacctggtgaattgatgaagaggctgttgttagagtccgggtcgaggaggaggagctggctggcgacggcgtccgcgagtaagtccacgatctcgttgccgaggaagactatgcgctcccggaagaggaggcccataacgtcgccggcgccggcgccggcaccaccgcccgcggcatccgactccgctcgtcacagcggtgcgtgcggtgtcagtgaggcgcaaggcttgaggctgagtgccccttgctgcgcccactgggagggagcccaagcgcgagcgcatggccgcttgacacgcagagcggctgctcttcccgccgcgacggagagggacgcggtggcactggaacttccggccgccatatatgtaccgaatgggactgagccgaactgctctgcagtagcggccggcggcggtgttccccaccagagagaagggagcagagccgaggagaggaaatggataacacacaacatacctttcagagttttgatgagttttcccttgagacagcatgactgcaggcgggaaagaggaccttgcgttgcgtgggcctggtcttatgtggactgggccgtcattctctttgggcctaaaaatatagtcttggactcttggtccacttaagcgcgagcagatatgttagcacttagcagcattctttggtccaacaagtcgagagaagcgggccgtacgccaccacggcaacggagaagaggactttcagctgcggcggctggccggcgcggcgacggggatgggggatgggcgcacaggcggcgccaaccgtccggcgtggctgcagcagtacgaactgattggcaagattggggaggggacctatggcctcgtcttcctcgcgcgccttaagccgccccacccggcacctggccgacgcggcccccctatcgccataaagaagtttaagcagtcaaaggagggggacggagtatcacccaccgcaattagagagatcatgctcctgcgcgagatcaaccacgagaatgtcgtcaagctcgtcaatgtgcacatcaaccacgctgacatgtccctatacctcgcattcgattacgcagagcacgacctctatgagattatcaggcatcacagggagaagctgagttcctccattaacccatacactgtcaaatccttgctgtggcaactgctcaacggcctcaactatcttcacagtaactggattatacatcgagatctaaagccttccaacatactggtcatgggagaaggagatgaacatggaattataaagatagccgattttggacttgctaggatatatcaagctccactgaaaccattatgtgataatggggttgttgtaactatctggtatcgtgctcctgagctgttacttggggggaaacactacaccagtgctgtcgatatgtgggcagttggttgcatttttgctgaactgcttacactgaaacctctattccaaggtgtggaagcaaaaaatcctccgaacccattccagcttgatcaactcgacaagatttttaaggtcttaggccaccctacagttgaaaagtggcctacccttgccaatcttccatggtggcaaaacgaccaccaacacattcaaggacataagtatgagaacccaggtttccataacattgttcatttaccaccaaagagtcctgcatttgatcttctctcaaaaatgcttgagtatgatccccgaaagcgtataacagctgcacaagctttggagcatgaatactttcggatggacccactacctggacgaaacgcgcttttaccatcccagccaggggagaaaattgtacagtatcctattcgtccagtagatactacaacagattttgaaggaacaacaagccttcaaccaactcaaccgccatcagggaacgctcctcctggaggtcaatctgtagcaagacccatgccacgacaaatgccgcagcaacctatggttggggggattccaagagtggcaggtggagtaaccatggctgccttcaacgctgcctcacaggctggcatggctgggctaaatcctggtaacatgcctatgcagagaggcgcaggtggtcagtctcatccgcaccagttgagaaggaaggcggatcaagggatggggatgcagaaccctgggtatcctcagcagaagagacgattctgacgctatcaagatggagccatctgctgtatatcagaaaaatggttctagatgctctttttggagatgggaggaggactacttggacatgattagcaagatgcagaagaaacaagaagggttggaggatgaaacaaagaaggattacagattcaggaagggtgaacaagatttggagatgtctgtttag

SEQ ID NO: 213092 - DNA, 908 bp, Zea Mays
cttgggttcatggtggggcatatgagtaacttcatggaagatccactggaagatcatttggatgatgaaatcaaggatctattgtactgtggatgggagttgcaattacgaggactggtattgcctttccaagacactggcagagatggaggcatttgactacgccaagagaaccggagtggacgtggtttcagtttgtccatccctagtgatcgggccaatgctgcaactgacagtgaacgcgagcagttcggtcgtggttgacttcctcaaaggagaccgtttggtgaaaatgaaactcagacacttcgtggatgttcgcgacgtcgccgatgctcttctcctggtgtatgagaccccggaggcatctgggaggtatatctgcaattcgcacgcgaggctggtgtctgatgtcataaggctactcaggagctggtacccgacctatcaatgtgccaccaagttcgtgcaagtgagccacgagcccgcgttcagttccaacaagttgcaggcgcttggctggaaattcaggccgtttgaggagaccctcagggacagcgttgaatccttcaaggctgcaggcgtcatccactgaggaaacaccactgccgtgagcatttgaaaaatccaagccattgcctcgtgcagtacaccagtcttgatcgataattgggatgagtaatgtgtaatcatcaaaaggggatcaatgtttgttcgtgtcatagactgcatttagcaatagcagtaataagtacatggaatttatatgaaggtatgttatcttcttttttttgaaagggagaggcaaaagagtccaagcgaagaagcgacactttggttcagtttttgctttccaaatggaacagattttcattgtgcagaagtttgttgagaactgaatgttatat

SEQ ID NO: 213093 - DNA, 1786 bp, Zea Mays
cttgtgttgggtgctttgtttcccttttgcttctaagaatctatggtagtggttagaaatgacatcgttaagctgtttgacaccatcaagagttacgatgatgggaccttctactttgatgaaaagcatgttgatgctaccgaatacaagggtcctataatgacttctgcttcggtggtacgtggtgtcacctcttttgcagctgttgcttctggaaaattggatatccctggtgacaagatacttggcttggcaaaattcttccttggtattgggctcccaggtagctcaaaggattgctttaatcagattgactctttgtcagtcctggaggacaatagggtcttcgttcctttgatactctcacttcctaccaaagtattctcattgtctttgaaagatcagcttaaggttgaagttaccacagtgtttggatctgcagcacctttactcaaagtgaatcttgtgcaagtgttgggaactgactctaaagtcatcaccaatgggaacagggagcttcaatatgaccttgacaaaaatgtccattacttggacattgctccattggaaatagatgttgggaaatactcggtagtttttgaggactgatcaaagttgataaggcagaaataggaatatccgacaatgatgctgggaccgtggagtctgtccaaaagttagatcttctgaaagatacaaaggtgtctctttctgcaaaccacctacagaagctgcgtttatcttttcaattaactactccgcttgggctcacatttaaacctcaccaggtgttcttgaagttgaagcatgagagtaaggttgaacacttatttgtggtacctggctctgcaaggcaattcaaaattgttctcgacttcctagggttggtggagaaattttactacctctctggaagatatgaccttgagcttgccgttggtgatgctgcaatggaaaattcatttctacgacctcttggccatttggagttggacctaccagaggccccagaaaaagccccacgtcctcctgcacaagctgttgacccattctcaaaatttgggccgaaggcagagatattgcatatattccgtgccccagagaagaggccacccaaggaactctcgctcgcattcacgggtctcacgcttctgccttttatcggattcttgattgggctcgtgcgtcttggagtgaacgtgaagaacttcccgtccttgccgggaccggccgcatttgcctcagttttccatgctggaataggagcagtcttgctgctctacgttctcttctggctcaagttggaccttttcacaactctgaagtaccttggcttcctcggcatcttcctcgtgtttgtgggccataggaccctgtcctacctttcctcggcgtcagcaaaacagaagacggcatgagtggacagtgcaagcagagctttcccgatcatcaattcgttttttgaggtggccattccaggccactgggtgtctttgcttggtactctgaccgcaccctagtttttctttagctaacatgcattttgagggaggactcggtttatttcagttgtctttgacgaatactgatactaggacaagtaacaggacctcacatcacagtttctgaatagaatggatgtttaatcatagcatttatatgatcattcgatatacatcatccttaatcgaactgaaacgttatatgtacacagaaatgatgcaaagttaaagaatttttgagcgtgtttggatgcacgccacagccggccggcacaaaaaataat

SEQ ID NO: 213094 - DNA, 2584 bp, Zea Mays
cggacaagcggacacaccatcggcggtgctgcgagcctgcgactgctcccgctccacaatttcaacctccagatctggccactcccactctcacacgcccagtcttctcaatcctcacatcctattggccacggcaactgccatcgccatggccgggaggcgtccggcaccggcggccctcctcctcctcgccgtagccttcgctcccatctcctccgccgttcgcccagtctccgatgcgcacagatccgctgccgaggagctcttcgccccctccgccgacggatcctttggcgatttggagagtacgtatgaggcagtgaaaacattccagatactcgggctggagaaatataatagtttatctgggaaggcgtgcaagtttgccgcggagaacctggcttccaccgattccaccgcgaaagatctgttccacgcagtccggatcagtggcgcgctgggatgtggcgttgatgccggcgtgtatgatggtgttgtggcgagactcaaggcagtgattaaggataccaattccctgttggaattctactattctgtgggaggtttgcttagcattaaggaacaaggccataatgttgttctgcctgatgcagaaagtacatttcatgccattaagccaaagtgacgggagatggcgttatggcactaacagcgctgaatctagcacatttgctgctggtatcgcactagaagcattggcgggcgttgtttcactggcagatgcagaggttgatccatccatgatggtagtggttagaaatgacatcgttaagctgtttgacaccatcaagagttacgatgatgggaccttctactttgatgaaaagcatgttgatgctaccgaatacaagggtcctataatgacttctgcttcggtggtacgtggtgtcacctcttttgcagctgttgcttctggaaaattggatatccctggtgacaagatacttggcttggcaaaattcttccttggtattgggctcccaggtagctcaaaggattgctttaatcagattgactctttgtcagtcctggaggacaatagggtcttcgttcctttgatactctcacttcctaccaaagtattctcattgtctttgaaagatcagcttaaggttgaagttaccacagtgtttggatctgcagcacctttactcaaagtgaatcttgtgcaagtgttgggaactgactctaaagtcatcaccaatgggaacagggagcttcaatatgaccttgacaaaaatgtccattacttggacattgctccattggaaatagatgttgggaaatactcggtagtttttgagatttcacttcaggaacaagagcgtgagactgtttatgctactggagggaggaacactgaaagtgtatttgtcacaggactgatcaaagttgataaggcagaaataggaatatccgacaatgatgctgggaccgtggagtctgtccaaaagttagatcttctgaaagatacaaaggtgtctctttctgcaaaccacctacagaagctgcgtttatcttttcaattaactactccgcttgggctcacatttaaacctcaccaggtgttcttgaagttgaagcatgagagtaaggttgaacacttatttgtggtacctggctctgcaaggcaattcaaaattgttctcgacttcctagggttggtggagaaattttactacctctctggaagatatgaccttgagcttgccgttggtgatgctgcaatggaaaattcatttctacgacctcttggccatttggagttggacctaccagaggccccagaaaaagccccacgtcctcctgcacaagctgttgacccattctcaaaatttgggccgaaggcagagatattgcatatattccgtgccccagagaagaggccacccaaggaactctcgctcgcattcacgggtctcacgcttctgccttttatcggattcttgattgggctcgtgcgtcttggagtgaacgtgaagaacttcccgtccttgccgggaccggccgcatttgcctcagttttccatgctggaataggagcagtcttgctgctctacgttctcttctggctcaagttggaccttttcacaactctgaagtaccttggcttcctcggcatcttcctcgtgtttgtgggccataggaccctgtcctacctttcctcggcgtcagcaaaacagaagacggcatgagtggacagtgcaagcagagctttcccgatcatcaattcgttttttgaggtggccattccaggccactgggtgtctttgcttggtactctgaccgcaccctagtttttctttagctaacatgcattttgagggaggactcggtttatttcagttgtctttgacgaatactgatactaggacaagtaacaggacctcacatcacagtttctgaatagaatggatgtttaatcatagcatttatatgatcattcgatatacatcatccttaatcgaactgaaacgttatatgtacacagaaatgatgcaaagttaaagaatttttgagcgtgtttggatgcacgccacagccggccggcacaaaaaataat

SEQ ID NO: 213095 - DNA, 2598 bp, Zea Mays
ctcgagccgttcccgctccggacaagcggacacaccatcggcggtgctgcgagcctgcgactgctcccgctccacaatttcaacctccagatctggccactcccactctcacacgcccagtcttctcaatcctcacatcctattggccacggcaactgccatcgccatggccgggaggcgtccggcaccggcggccctcctcctcctcgccgtagccttcgctcccatctcctccgccgttcgcccagtctccgatgcgcacagatccgctgccgaggagctcttcgccccctccgccgacggatcctttggcgatttggagagtacgtatgaggcagtgaaaacattccagatactcgggctggagaaatataatagtttatctgggaaggcgtgcaagtttgccgcggagaacctggcttccaccgattccaccgcgaaagatctgttccacgcagtccggatcagtggcgcgctgggatgtggcgttgatgccggcgtgtatgatggtgttgtggcgagactcaaggcagtgattaaggataccaattccctgttggaattctactattctgtgggaggtttgcttagcattaaggaacaaggccataatgttgttctgcctgatgcagaaagtacatttcatgccattaaggcacttagccaaagtgacgggagatggcgttatggcactaacagcgctgaatctagcacatttgctgctggtatcgcactagaagcattggcgggcgttgtttcactggcagatgcagaggttgatccatccatgatggtagtggttagaaatgacatcgttaagctgtttgacaccatcaagagttacgatgatgggaccttctactttgatgaaaagcatgttgatgctaccgaatacaagggtcctataatgacttctgcttcggtggtacgtggtgtcacctcttttgcagctgttgcttctggaaaattggatatccctggtgacaagatacttggcttggcaaaattcttccttggtattgggctcccaggtagctcaaaggattgctttaatcagattgactctttgtcagtcctggaggacaatagggtcttcgttcctttgatactctcacttcctaccaaagtattctcattgtctttgaaagatcagcttaaggttgaagttaccacagtgtttggatctgcagcacctttactcaaagtgaatcttgtgcaagtgttgggaactgactctaaagtcatcaccaatgggaacagggagcttcaatatgaccttgacaaaaatgtccattacttggacattgctccattggaaatagatgttgggaaatactcggtagtttttgagatttcacttcaggaacaagagcgtgagactgtttatgctactggagggaggaacactgaaagtgtatttgtcacaggactgatcaaagttgataaggcagaaataggaatatccgacaatgatgctgggaccgtggagtctgtccaaaagttagatcttctgaaagatacaaaggtgtctctttctgcaaaccacctacagaagctgcgtttatcttttcaattaactactccgcttgggctcacatttaaacctcaccagttgaagcatgagagtaaggttgaacacttatttgtggtacctggctctgcaaggcaattcaaaattgttctcgacttcctagggttggtggagaaattttactacctctctggaagatatgaccttgagcttgccgttggtgatgctgcaatggaaaattcatttctacgacctcttggccatttggagttggacctaccagaggccccagaaaaagccccacgtcctcctgcacaagctgttgacccattctcaaaatttgggccgaaggcagagatattgcatatattccgtgccccagagaagaggccacccaaggaactctcgctcgcattcacgggtctcacgcttctgccttttatcggattcttgattgggctcgtgcgtcttggagtgaacgtgaagaacttcccgtccttgccgggaccggccgcatttgcctcagttttccatgctggaataggagcagtcttgctgctctacgttctcttctggctcaagttggaccttttcacaactctgaagtaccttggcttcctcggcatcttcctcgtgtttgtgggccataggaccctgtcctacctttcctcggcgtcagcaaaacagaagacggcatgagtggacagtgcaagcagagctttcccgatcatcaattcgttttttgaggtggccattccaggccactgggtgtctttgcttggtactctgaccgcaccctagtttttctttagctaacatgcattttgagggaggactcggtttatttcagttgtctttgacgaatactgatactaggacaagtaacaggacctcacatcacagtttctgaatagaatggatgtttaatcatagcatttatatgatcattcgatatacatcatccttaatcgaactgaaacgttatatgtacacagaaatgatgcaaagttaaagaatttttgagcgtgtttggatgcacgccacagccggccggcacaaaaaataat

SEQ ID NO: 213096 - DNA, 1997 bp, Zea Mays
cgcgccaccgctcgtctccgcgcgacgcgccaccgctcgcctccgcgcgacgcgccaccgcctgccccgcccccacctgccccgcgccgtcgtggagagaagcgccgtcgtggtgatgacgggcgacggagagggagtcgagagctctgccgccggcgaacggcagggcgtgcccttcgctctaggcggcccgctgttcgtccccttcatggtgggccccatcaccaccataccagagttcatgtcctcagccctccacgagctccaggccttggaagacgaattaggagacaccagagacgaattcagcaatgagctttgtgtcgatgagctcaaggtgctctctgaggaggagctggtggagcgcgccctgcaggaggctatggaggtgtcctctactgataagcatctcaatttaatcactttgttttggattgcattttcgtttgaagctttgatgatttttgtgtctaggactcggattctggcactcaaccacaaccagaggatcaaacacttgatggaggcatgtcagcgaatccaacacctacaattcaggcccccacattaagcccattggctgaaagagagagctctggattgcaagatatggcggacgtattaaatgaaccacaaagcagcaatggcaagcctagaggcaaagaggcaaacagcagatgcaggaagggggaaactggaaccttcacactagattctccggttgtaggagagagccatggatcagctattgacatgtcaattgtaccatttgaaccggaaggaagggcaaaaagagaggcaggcattttgatagagaggttcgagcagagattttacagggaagctatcttactaaagcagataagtgggtacaaatcaaggccaagcaagacgaagacaaatttgcagcaaggctgcattctttcagtggcaattctgtgaagcccaaaggttcaaagtcatcatgtgagaaaattgaaatggcgagatctcttaatctaatcggtgcaccttggaagaacaaagctttaagatctgatgagcacagacctgtggtccgtccagaagtaattctctgtgttgaaatttatcagaagacatatgcctctgttaagtcccaggaacttcttttgctgggaagccaattccttactgatctgagggacaacatttattgtttgactgataaggtgatgaaggtggctgggcaacacgatcattctgggtattttcttattgaggacacgttctacaatgatacgagacatcgttctgccactgattacagtaagcctatactggattggcttgagaattccagtgatgaggtaacagagaagtgggatgccataacatctggtgttctgaagaagcgacaaaaggacttgctgcgcggtctgagtatttctaacgtgcctgaatttaaatctgaaaagatgcaaacgactcgtatctctgacctgcacttccggcccggtgctgggtacctctactgccaccaggggaactgcaagcacacgatcgtgataagggacatgaggttgattcacccagatgacacacagaaccaagcggagtaccctctccagacgttccagctgcagaggcgcttgcagaagtgctcggtgtgccagatctatcttgcgacgaaggtaacggtcgacgataagtgggctctgaacaacccctgctacttctgcatcaaatgctactacctcctccactacaaggaggacagcacactgctatatcctcacactgtatatgatttcatccaagagtgatgtttctctgtttttttttcttcgtagaaaagtagtctgtagtttatcctacactgtacattcttcactgcaagaaatccatgcgggcttcgtgcattttgctgagttattaaatggctatatggacctgggtcagacgtcagacttccaagttccaaaggcctaggcctcgacgctctgtcgagctctgacgaactgaagacgagactgaag

SEQ ID NO: 213097 - DNA, 2155 bp, Zea Mays
cgcccccgcccccgctcgacgcgcccccgctcgcctccgcgcgacgcgccaccgcctgccccgctcgacgcgccaccgctcgcctccgcgcgacgcgccaccgctcgcctccgcgcgacgcgccaccgcctgccccgctcgacgcgccaccgctcgcctccgcgcgacgcgccaccgcctgccccgctcgacgcgccaccgctcgcctccgcgcgacgcgccaccgctcgtctccgcgcgacgcgccaccgctcgcctccgcgcgacgcgccaccgcctgccccgcccccacctgccccgcgccgtcgtggagagaagcgccgtcgtggtgatgacgggcgacggagagggagtcgagagctctgccgccggcgaacggcagggcgtgcccttcgctctaggcggcccgctgttcgtccccttcatggtgggccccatcaccaccataccagagttcatgtcctcagccctccacgagctccaggccttggaagacgaattaggagacaccagagacgaattcagcaatgagctttgtgtcgatgagctcaaggtgctctctgaggaggagctggtggagcgcgccctgcaggaggctatggaggactcggattctggcactcaaccacaaccagaggatcaaacacttgatggaggcatgtcagcgaatccaacacctacaattcaggcccccacattaagcccattggctgaaagagagagctctggattgcaagatatggcggacgtattaaatgaaccacaaagcagcaatggcaagcctagaggcaaagaggcaaacagcagatgcaggaagggggaaactggaaccttcacactagattctccggttgtaggagagagccatggatcagctattgacatgtcaattgtaccatttgaaccggaagagggaattaatggacaaacaacatgtaggaagggcaaaaagagaggcaggcattttgatagagaggttcgagcagagattttacagggaagctatcttactaaagcagataagtgggtacaaatcaaggccaagcaagacgaagacaaatttgcagcaaggctgcattctttcagtggcaattctgtgaagcccaaaggttcaaagtcatcatgtgagaaaattgaaatggcgagatctcttaatctaatcggtgcaccttggaagaacaaagctttaagatctgatgagcacagacctgtggtccgtccagaagtaattctctgtgttgaaatttatcagaagacatatgcctctgttaagtcccaggaacttcttttgctgggaagccaattccttactgatctgagggacaacatttattgtttgactgataaggtgatgaaggtggctgggcaacacgatcattctgggtattttcttattgaggacacgttctacaatgatacgagacatcgttctgccactgattacagtaagcctatactggattggcttgagaattccagtgatgaggtaacagagaagtgggatgccataacatctggtgttctgaagaagcgacaaaaggacttgctgcgcggtctgagtatttctaacgtgcctgaatttaaatctgaaaagatgcaaacgactcgtatctctgacctgcacttccggcccggtgctgggtacctctactgccaccaggggaactgcaagcacacgatcgtgataagggacatgaggttgattcacccagatgacacacagaaccaagcggagtaccctctccagacgttccagctgcagaggcgcttgcagaagtgctcggtgtgccagatctatcttgcgacgaaggtaacggtcgacgataagtgggctctgaacaacccctgctacttctgcatcaaatgctactacctcctccactacaaggaggacagcacactgctatatcctcacactgtatatgatttcatccaagagtgatgtttctctgtttttttttcttcgtagaaaagtagtctgtagtttatcctacactgtacattcttcactgcaagaaatccatgcgggcttcgtgcattttgctgagttattaaatggctatatggacctgggtcagacgtcagacttccaagttccaaaggcctaggcctcgacgctctgtcgagctctgacgaactgaagacgagactgaag

SEQ ID NO: 213098 - DNA, 1223 bp, Zea Mays
acgagaggcagtggcgcaccgcggccttatccgcagcgtccaatccccgcgcgtcttcacgccgcgccacgccgtccgggccatgggccaccaatggcgacccccaccgccaccgcactcacctgctcctgccgcccttcgtcgccctcctcatcatccgccgccttccgccggctgaacatcttcgcccccgtctcgggcgcccattctcctcctcgacgccgcctccgtctcgcgccattgcactcgtcgacgactccaagaacccccccgaggagaggtctgagacggataagatggtggacggcatggacttcggggagctctgcagcgacttcgagtgcataagcagcccctacgtggagtcgacggcgaggcaggtcgcgcgggacatcctggagctccgcgaggacaaccgcgcattcaactgctacgccgtctccgtcaagtacaaggacccactcaggacatttgttgggcgtgagaagtacaggaggccgttgtggatcaccaaggcgttggaaaaccctgtagtgtccaggaaatgtcaatgcagtcgacgagcaacctgaccatcagatgggcgttgagagggaagcctaagaacccgttgttcgcgagcgtcggaggagacgtcatcgtccgcgtcgagtcacggttcgtcctgaaccagataagcgggcaggtgctggagcaggccgagtcctgggacctctccgcctcgtccctccctgcccaggcctacttctggctgtcccgaagggtctactccgccgtggagtccgggaaggacgcgatcgaagccgccaagagcgcggcgtcgtctgggctgacgaccaagggagaccagaatctcgaggcctatccggatccttctgctgatcctacaaagttctttcagaggccggatgatgggttcagccaagacgtgtaccagatcggccttctcctggccgtgatctacttcattgtacagtttctgaaggcgaccctgtgaccggctgcagcctgtcgaagaatgtagcctgtgtgcagtatacatgtatgtaactatgcctagcaacattataaaatacgggcatatatcatcctgccatctgacctgcgacagatttgtgacctttcaccactgctgtcggtgatattagtttggcacgcaagttgccaatttacaggtgttaaacttgacatcggccgccggtcgtgcttatctttgcgtagca

SEQ ID NO: 213099 - DNA, 1219 bp, Zea Mays
acgagaggcagtggcgcaccgcggccttatccgcagcgtccaatccccgcgcgtcttcacgccgcgccacgccgtccgggccatgggccaccaatggcgacccccaccgccaccgcactcacctgctcctgccgcccttcgtcgccctcctcatcatccgccgccttccgccggctgaacatcttcgcccccgtctcgggcgcccattctcctcctcgacgccgcctccgtctcgcgccattgcacgtcgtcgacgactccaagaacccccccgaggagaggtctgagacggataagatggtggacggcatggacttcggggagctctgcagcgacttcgagtgcataagcagcccctacgtggagtcgacggcgaggcaggtcgcgcgggacatcctggagctccgcgaggacaaccgcgcattcaactgctacgccgtctccgtcaagtacaaggacccactcaggacatttgttgggcgtgagaagtacaggaggccgttgtggatcaccaaggcgttggaaaaccctgtagtggaaatgtcaatgcagtcgacgagcaacctgaccatcagatgggcgttgagagggaagcctaagaacccgttgttcgcgagcgtcggaggagacgtcatcgtccgcgtcgagtcacggttcgtcctgaaccagataagcgggcaggtgctggagcaggccgagtcctgggacctctccgcctcgtccctccctgcccaggcctacttctggctgtcccgaagggtctactccgccgtggagtccgggaaggacgcgatcgaagccgccaagagcgcggcgtcgtctgggctgacgaccaagggagaccagaatctcgaggcctatccggatccttctgctgatcctacaaagttctttcagaggccggatgatgggttcagccaagacgtgtaccagatcggccttctcctggccgtgatctacttcattgtacagtttctgaaggcgaccctgtgaccggctgcagcctgtcgaagaatgtagcctgtgtgcagtatacatgtatgtaactatgcctagcaacattataaaatacgggcatatatcatcctgccatctgacctgcgacagatttgtgacctttcaccactgctgtcggtgatattagtttggcacgcaagttgccaatttacaggtgttaaacttgacatcggccgccggtcgtgcttatctttgcgtagca

SEQ ID NO: 213100 - DNA, 3824 bp, Zea Mays
cttcggcgcgcaactctccgcgccacccagcacccacggagagcaaacatgagcgagaagacgaggggaggacgcgtgcgaggaaggaggggtccgacatgagtcttctccccgtctccctcccattgcgcctcgctccctcccctctgcccgatcggtgtccatggcgtcgtccctcctcgtgtgcctcgtctttctgtccgcggctgcggccgccggcgctgtgaccccccgccggtccctcgcggcacaggcgagatcaggcgacattgcgtccctggcggctgggagcccgatggtggcagggctcatgaacgaacggctcaaggccctcaccacctcctttgcgcagcagatgggcagggagttccactactgcatcaagaacatggaccgggagtggaacactgccttcaatttctcttccgatcccgccttcctgacagcctgcatgaaggaaaccgacggtgacctaccgcagcgcgtgtgcacggccgcagagatgaagttctacttcgagagcttcctcgaaggcaacggaaggaagaactacgtgagaccgaacaagaactgcaaccttacttcatggatcgacgggtgtgagcctggatggtcctgcagcgccggcaaggaccaggaggtcaacttaaaagacgccgtcaacatcccgtccagaacccttgactgccgaggttgctgtgctggcttcttttgccctcatgggctcacttgcatgataccatgtcctctgggagcctactgccctcagtccactctgaataaaacaactggaatctgtgatccctaccactatcaaccacctgccgggaagccgaatcacacgtgtggcggtgctgatagatgggcggacgtcgttagcaccgacgatgttttctgtccacctggctactactgtccaagcacagtgaagaaactcgattgtagtagttctattgtcggaagggttcaattttgaaaaccaaatgcttccacaaaggaagctgtaaaccaaactccacaaatcaggacatcaccatattcggtgcgctgcttgtgggtgctctgagtttggtgctgttgatcatttacaacttctccggacaactcctgatgaaccgggagaagaagcaagcaaaatctcgggaggctgctgtgagacacgctagagagaccgccgtggcccgtgagagatggaaaacagccaaagacatcgcaaagaagcacgccgcaggcctgcagtcgtcgctgtcccgcacgttctcacgcaagagaagtcttaggacacacgagtcgagcaaaggaggcaccggtgctggtctgccttcaacaagcggtgaccagacgacgacgaacgaagcaggagggaagaaggaggatagccatactgacatggcgcgttcgactgaagacaaccctgaaaagggcgaaggagtcagtgtgcaagtggggggaggagagaaaaagaagaccaaagggaagcatgcgcatacccagagccagattttcaagtatgcgtacgggcagattgaaaaggaaaagatgatggaacaggaggcccagaaccttacgttttcaggagtgatatcgatggccaccgatgaagatatcaagaaaaggcccacggttgagatcgctttcaaagacctcaccctgacactgaaggggagcaagaagaagcttctgaggtcagtgacgggaaaactcatggctggaagggtggctgccgtgatgggcccatcaggcgccggaaagaccacgttcctgagtgcgattgccggcaaggcaacaggatgcgaaacgacagggatgatactcataaatggcaagacggaacccatccgcgcgtacaagagaataatcggctttgtcccgcaggacgacatcgtgcatgggaacttgacagttcaggagaacctctggttcaatgcaagatgcaggctctccgctgacatgttaaaggccgataaggttcttgtcgtggagagagtgatcgagtccttggggctgcaagcagtccgtgattccttggtgggaactgtcgagcagcgaggcatctcgggcggccagcgcaaacgagtgaacgtcgggctagagatggtcatggaaccctcggtcttgatcttagacgagccgacatcaggcctggacagcgcctcgtccttgcttttacttcgtgccctacgcagggaagctctcgagggtgtcaacatctctatggtcgtccatcagcccagctacacactgtacaggatgtttgacgatctgatacttctggcgaaaggcggcatgactgtgtaccacgggcctgtgaagaaagtggaggagtactttgcaggactgagcattgtggtgccggaccgcgtgaacccaccggactactatatcgacatcttggaaggaatcgtgaagccggacgcaaaggaaccagtcaatgtgaaggatctccccatcagatggatgctgcacaatgggtatgaagtcccccgggacatgctgcagagtgcctctgactcagaatcatctctcagaggggaaagaggccatgcctcgggaagtgacgctggccaatctattgctggtgaagtgtggggtaatgtcagggacatagttgggcagaagaaggatgagtatgattacaacaaaacttctgaaaacctgtcgaatcgacgtactcctggcatccttaggcaatacaaatactacctggggaggtgtggcaagcagcggcttcgagaggctcgaatacaaggtgttgactatctcatacttggccttgccggtatatgtctgggcacactcgctaaagtgagcgatgagacatttggagcgcttggctacacgtacactgtcattgctgtgtctctgctgtgcaagattggggccttgagatcgttctcgctggagaagatacactactggagggagagagcgtccggcatgagctcgctggcatacttcctgtccaaagacacgatagatcacttcaacacgataatcaagcccatcgtctacctctccatgttttacttcttcaacaacccaaggtcatcgatctgggagaactatgtcgtccttcttgcgctcgtctactgcgtgacggggattggatacaccttcgccatcttcttccagccaagttctgcgcagctgtggtcggcgctccttccggttgttctaaccctgatagcaacccagcaaaaggacaccttcttcgcaaacctgtgctacacaaagtgggctctggaagcatttgtgattgcaaatgcgcagaagtattccggcgtctggctcataacacgctgcggctcgctgttgaatagtggctacgacatcaacgacagaatcctctgcatagtggttcttgttgccaatggtgtgatattccggtgcgtggcattcttctgcatggtcatcttccagaaagactgatggatgagcgctgatgtacttgtttgtaatgacatgttacaagtagaatgagcaccgtcgtccttgtagataggctcacaagcaagttgatcgtaagaagaaacaaaaatgatagaagtattctcggtgttatgtgtagtcagtaaaattttctattttcagaaagggagctataatggaggtacagcggatgtggcttcaaaaatacggtgctccactactcactccgaattaactttttttggttagcttgttgaatggaacgtgggctgatcaaccagcacttcatccctggcaaaacatgtctatccctatctatctatctacaactaaaacatgtctaggagaatcgtgaaaaaaaggaaaataagggaatatttggtgtggtgcctaac

SEQ ID NO: 213101 - DNA, 2175 bp, Zea Mays
gggccctcggccgctttcctcctcccccgatccaatctgtcgtccagacatcagcgaaatgacgacctgcttgccgtctgccgctctgagaactccaatttggacgcgccgtttgaccgaatactgatctccgcattccaacgctcaaacaccacccgggcggctgcgcccccaactccccccgtccgcccaacgcccatcccccaaaaggctccgatctgattccgagccccgccaggcgccagccttctcccgccgcgtcgcacgtgcgccccaccccatactcacgctcgagccgcgatcccatccgggggttccgatgcggtcgccggcgctcctggccgccgccctagccgcggtggcactcctagctgccggtgccggattcgcggtggccgcgacggaggaggcctacgtcacgctactgtacggcgacgagttcgtgctcggcgcgcgcgtccttgggaagtccctccgcgacaccggcacgcggcgcgacatggttgtgctcgtctccgacggcgtttccgagtactcgcggaagctcctacagacggttggatcgtgaatcgtataacgttactggctaatcctaatcaatttaggccaaagaggttttggggcgtctacaccaagctgaagatatttaacatgacaagctacaaaaaagttgtttaccttgacgcagatactatagttgtgaaaagtatcgaggatcttttcaagtgtggcaagttttgtggaaacttgaagcattctgaaagaatgaattctggtgtgatggttgttgaaccctctgaaactcttttcaatgatatgatcaaaaaaatggatcaattgccttcttacacaggaggggaccaaggttttctaaattcatattattctgattttgccaactcccgtgtctatgagccagactcgcctttaactcctgaaccagcgacacaacgcctttctaccttgtataatgctgatgttggtctttacatgctagcaaacaagtggatggttgatgaaaaggaattaagaatcatccattacacactgggtcccctaaaaccctgggactggttcacagcgtggcttgtaaaacctgttgaaacatggcaggatattaggcaaaaacttgaagaatctcttccaggaactggtgggggaaggaaccctcatgaccagctggttgtcaaaatattgttcattctcccattttgcttgctgctatttggttattaccaatcatgttttcagacagacaaggagttggtaagtataagatctctatgtgcttttgctagaagagctcgccataaatacaagtctgaagagtcacttccatcttattcagtgttatcaaatggacatttgaaactaccttcttattttggggcaattgcggtgttagtctgcttcgtgtctgctggtttctctcttgcatttgctttcgctatcattccacggcaggttatgccatggacaggtttgctactgatgcttgagtggacctttgtggcattcttcttattgtttgggagttatctccgttttgtctaccggtggggaagtatcagtgcaaaccatgtgggatttagcaattctgactcatcggagaatcatatgggtccaggccatcagcgaaatatgtctgactgcgacatggatgcaacattttactggatagggatggcatctatagctactattactgtactgttaccgactatcttgggcataactgcattgttcacaaagctaggattaatggtcgctggtggtattgtgctggcatcttttatgacatacgcagcggagcatcttgcaatctcagtcttcaacaagggtcaaaaatacaggaatgcgtcaagaactcgaagcttttgtttttaacgtttaagtaaaaaatccttgttgtattgtaggtagttttgtacacaaaaagaatgatgattcatttttaacacgtggcttcctgcccatggcccctttttttgtagcgctgatgtcacgccaacttgtggtaaataggtttccgacattgtttctgtagcacagttggcatgaagattacagacatgttttgggatcgtgacccgcttttactcgcttatattgatgtttatggtgagattgtagtatatcagaaaaaagttacattactgcaataatcgataagtg

SEQ ID NO: 213102 - DNA, 1850 bp, Zea Mays
ccaaaattagggtgagcagctgcgccaaaagcctaggccccggtggtgttcacttggccgccactgccggccacggcggcggcggcccatccctccctttcccctcttctcccctctctctcttccccgccccctctgtctcgacatcggtgccgtcatcttctcggcctcccgccggttggatccatcgggcgctggtcggatctgcctttcggtcgccgttgcccctccgccacgcctcgcgccagccggtcctgctgagcgccggcctgatccgcctccctctagtcggatctgcttggcgtcggcctctcgccgctactgctccgcatcctgggcttcctcaccgatgcacgatcctggcaccacgccacgccggtgtgctaccggctccttgcggcggagcggaccacatggtctgtgctcacgctgagcagggacccacgatcgctcgcgttcctcatcattaggccgactttctacttctcgacgctggagcagcttgacctctcactggtgtcgtcgtcgcctctcgccggccggtcgcgtctcgcggtgccaggcgagcggccctgttgccattggctgggtaccgttgacatggccgcccccgctggctcgcatcgccgtggctggcacacgtgacgacaggggcggccggcggtggtggctaggccctagccgctgctgcatgcggtaggcttcggcttcaatggattcggctccccttgggccctcgtcgcctcgccttcagggtcgtgcactcgtgccgccaccgtcagcccccatcgccgtctctgggcccctgagaggagcatgacccgagcctccacccttgtcgccaggagaacggggctactccgccacctcggcttccttaagggccgacctagcacccccgccccctcgtcgcctccacatcttcaaggttgtgccgccaaagctggcctccatagcctgcactggacccctgattggagcacgacctaagcctccatcctcgacactgggagtttagggctactcctgtcaccccggctatccttggctgctgttgtgttcgttgtggcattgccgctagcatgagcagggtttttggggtctcatacgaaagccatgccaggtgtagtctgcacagacaacagcaatgccctcgacgccgatgacctccttggattgttgtaaggttctcttgtgtcgttgtgcttggcactggcgttccagcctttgtcgtggtcggtgaatatccgcctctcctgccattcacccatgaggatttctcctcaagcggcgttggatggtggcattagagcccggatgcgccatcgggtgtttctgttttctcgaaaggagatcgtcgttttcggcactcataccgaattcattgttggccccaagcatgtttgaagcgaaattaatagtctccctcactgtcatttcgggatgatggaggtcattctggctgacgtacgcacagaggtgctgcgatgtagatgacattgtttccccattacacttgtatttgacatctccatggatctattgacaagaaatcagaaaattaatgatgttcgtttttctatcacaaaagtacgtactaacttcttaggaataaccactaatcaatacatgctgcttctgtgacatggttttgatttatttacactaattttgaggactggactggactagtactaccttcaaagaagaatctagttttcctgccagtgcttttaacagggtcgtctttcctgatccgggtgctccaagaagaagtgtcattctggccacacaagaaaagcacctgattgattacaggctgaccagttgatgatggtgttgggaagcgt

SEQ ID NO: 213103 - DNA, 638 bp, Zea Mays
gctggccggcagtgaggtgcgcctggagaaggtggcccccgtagagcctggttacttcggcccggcccattatgtcatcaaacagatccgagccgtccgattcaggttattcctcgcgacacatccatttatacccctgccgccgccactcccattcttctctttctcttagactatctgccgctccagcctttcgctagggtttatccaccggcggcgcgcgcgacggcggcaagatggtgcagcgtctgacctaccgcaagcggcacagctatgccacgaagtccaaccagacgcgggtcgtcaagacccctggtggcaagctcgtgtaccagtacaccaagaagagagccagcgggcccaagtgtcccgtgaccgggaagaagatccagggcattccccatctgaggccagctgagtacaaaaggtccaggttgtctaggaaccgcagaactgtgaaccgtccctatgggggagtactatctggaactgcagttagagaaaggatcatccgtgctttcctggttgaagagcagaagattgtcaagaaggtgttgaaattacagaagaccaaagacaagacttcctcaaaaaagtaactctgaaacagaaggttggtcatcgctctctggttttgg

SEQ ID NO: 213104 - DNA, 2535 bp, Zea Mays
gggcagttctctccacgggtagcatgttcaggaagatcgtaaaggatgtcgtcataaaggtgctgaaaccaagatggttaatttcggtaagaaattgatggcagaccagttggaggagtggcgagagtactatattaattataagatgatgaagaaaaaggtaaaacagtatgtacagcagacccaaactggtggaaaaaatcgtgaccaggttcttaaggagttctcaaggatgcttgatgatcagattgaaaagattgtgctatttcttctgcaacaacaaggtcatcttgctaggaggatcgagaatttaggagaacagcgtgtcgtgcttatggaacggtctgatgtatcccaaatttgtcaaatacgccaggcttacagggaagttggatatgatcttgtgaagctacttaggtttcttgattcgaacgctactggtatccggaagatacttaagaagttcgataagcgctttggctataagtttacagattattacgtctctactcgagcaaaccatccttattctcagctccagcagatcttcaagcaagtgggagtcgtggctgttgttggtgctttgtctcgcaacctttcttatctacaagatcatcaaggaagcctagcaaatatctatgattacccatcactcatcttgaaggatcccgtcatagaacaaataaatcactcagtacagaaactcacacactccacaagctttctgcaatttctagggcagcatgcacttatcgttccgggggatatgcagagcggctcagatctcggtgatgacaaggattaccatttcctgtcactgctgctgaacctagtaaacacgtttctgtacatggttaacacatacatcatcgttccaactgccgatgactattcagtaagcctcggagctgcagcgactgtttgcggtgtgattatcggatcaatggcagttgcacaaatcttctcctcggtatatttcagtgcctggtcgaacagatcgtacttcagacccctcgtatttagctgcatcatgttgtttctggggaacctattgtatgctttggcatacgatctgaattccctaactgttcttattgctggccggctactgtgcggtttgggttcggccagagccgtgaaccgccgctacatcagcgactgtgtacccctgaaaaccaggctgcaggcgtcggctgggtttgtcagcgctagcgctcttggaatggcatgtggtcccgctcttgccggtctgctgcagacaaagtttaagatttatgggcttacattcaatcagaacaccttgcctgggtgggtcatgtgccttgcttggattgcatatttgttctggctgtggatttcattcaaagagccgggccacattgccacagagaattcagtcagcacgcaatcatctgattctggccgtcgagtaagcggtaacttggagggtggcctcggagagcctttgctcatagacgcaaaggcagggcaggatgaggacgacgaggacaatgacgaccccgaagaatctcatacacctgccacatcgcttgctgcagcatacagattgctgacaccatctgtgaaggttcagctactgatctacttcatgctcaagttcgccatggaaatcctactctcggagtcgagtgtcgtgaccacgttctatttcaagtggacaactagtaccgtggcgatctttctggcagttcttggtctgacggttctcccagttaatgtcatcgttgggagctacgtcaccaacctgttccaggacaggcaaatcctggtggcctccgagatcatggtgttgatcggcatcgtcatgagcttctgcttcacccctcactactccgtcccccagtatgtcacgtcagctctcatcacgttcgtgttcgccgaggtgctcgaaggggtgaacttgtccctcctctcccgcgtgatgtcgtcgaggctctcccgcgggacctacaacggcgggctgctctcgacggaggccggcacgctggcccgcgttgccgctgacatgaccatcacggccgctggctatctggggcagggccgcctcctgaacgccaccctcctgccgtccttggtgatctgtctagcatctatcgtcgcgacgttctgcacttacaactcactctactgattaccggtcgatgaactcctctccctcttatacaagttgccgaattgcgtcttgcagtgacgctgaaaattttcgggctgctgctgctaatgtaaactgctgcggcctgcgggtggacgagcggtccatgtgtatcgacgcctgtagtgttgcgaacttgctacggctgtaacatgacacgtgcgcgttaaataaaatgccctactgaagtaccctgtcatcgctcctcatgtgtcggcccagcccaacaattgcattaccaggaaggcaggaagagctctcgtcctcggactgcaagaatcctgtcctcacccccacatcgccttcctgctattctccccttcggttgctgacatggcaagttcaaaattgccgttagggtt

SEQ ID NO: 213105 - DNA, 2533 bp, Zea Mays
caattagtcagtggcatgtggggctttgggtatttttcgccttcatgcaggtttcaggtgctgaaaccaagatggttaatttcggtaagaaattgatggcagaccagttggaggagtggcgagagtactatattaattataagatgatgaagaaaaaggtaaaacagtatgtacagcagacccaaactggtggaaaaaatcgtgaccaggttcttaaggagttctcaaggatgcttgatgatcagattgaaaagattgtgctatttcttctgcaacaacaaggtcatcttgctaggaggatcgagaatttaggagaacagcgtgtcgtgcttatggaacggtctgatgtatcccaaatttgtcaaatacgccaggcttacagggaagttggatatgatcttgtgaagctacttaggtttcttgattcgaacgctactggtatccggaagatacttaagaagttcgataagcgctttggctataagtttacagattattacgtctctactcgagcaaaccatccttattctcagctccagcagatcttcaagcaagtgggagtcgtggctgttgttggtgctttgtctcgcaacctttcttatctacaagatcatcaaggaagcctagcaaatatctatgattacccatcactcatcttgaaggatcccgtcatagaacaaataaatcactcagtacagaaactcacacactccacaagctttctgcaatttctagggcagcatgcacttatcgttccgggggatatgcagagcggctcagatctcggtgatgacaaggattaccatttcctgtcactgctgctgaacctagtaaacacgtttctgtacatggttaacacatacatcatcgttccaactgccgatgactattcagtaagcctcggagctgcagcgactgtttgcggtgtgattatcggatcaatggcagttgcacaaatcttctcctcggtatatttcagtgcctggtcgaacagatcgtacttcagacccctcgtatttagctgcatcatgttgtttctggggaacctattgtatgctttggcatacgatctgaattccctaactgttcttattgctggccggctactgtgcggtttgggttcggccagagccgtgaaccgccgctacatcagcgactgtgtacccctgaaaaccaggctgcaggcgtcggctgggtttgtcagcgctagcgctcttggaatggcatgtggtcccgctcttgccggtctgctgcagacaaagtttaagatttatgggcttacattcaatcagaacaccttgcctgggtgggtcatgtgccttgcttggattgcatatttgttctggctgtggatttcattcaaagagccgggccacattgccacagagaattcagtcagcacgcaatcatctgattctggccgtcgagtaagcggtaacttggagggtggcctcggagagcctttgctcatagacgcaaaggcagggcaggatgaggacgacgaggacaatgacgaccccgaagaatctcatacacctgccacatcgcttgctgcagcatacagattgctgacaccatctgtgaaggttcagctactgatctacttcatgctcaagttcgccatggaaatcctactctcggagtcgagtgtcgtgaccacgttctatttcaagtggacaactagtaccgtggcgatctttctggcagttcttggtctgacggttctcccagttaatgtcatcgttgggagctacgtcaccaacctgttccaggacaggcaaatcctggtggcctccgagatcatggtgttgatcggcatcgtcatgagcttctgcttcacccctcactactccgtcccccagtatgtcacgtcagctctcatcacgttcgtgttcgccgaggtgctcgaaggggtgaacttgtccctcctctcccgcgtgatgtcgtcgaggctctcccgcgggacctacaacggcgggctgctctcgacggaggccggcacgctggcccgcgttgccgctgacatgaccatcacggccgctggctatctggggcagggccgcctcctgaacgccaccctcctgccgtccttggtgatctgtctagcatctatcgtcgcgacgttctgcacttacaactcactctactgattaccggtcgatgaactcctctccctcttatacaagttgccgaattgcgtcttgcagtgacgctgaaaattttcgggctgctgctgctaatgtaaactgctgcggcctgcgggtggacgagcggtccatgtgtatcgacgcctgtagtgttgcgaacttgctacggctgtaacatgacacgtgcgcgttaaataaaatgccctactgaagtaccctgtcatcgctcctcatgtgtcggcccagcccaacaattgcattaccaggaaggcaggaagagctctcgtcctcggactgcaagaatcctgtcctcacccccacatcgccttcctgctattctccccttcggttgctgacatggcaagttcaaaattgccgttagggtt

SEQ ID NO: 213106 - DNA, 1592 bp, Zea Mays
gtcgctgctcgcttcgcatcaaccgtatccgcttcttgggaaggctccatgcctcgccccgccgcaacaaactcctccgctccacacctctcaccaagaccgccccttccctgcccgcacacggcggcgccccaatctctccaccacgtgtgacggcgacggcgccccatccctctccagcgcgcgtagaggcggcgtccctccctctcccgtgcgtggcggtggccggatgcggtggaggcggagggtatcgccatcggcggtagcggcggcggcggaggaggcggcgccatgaggggggcgcgggcgggagtgggcgctggctgcggcggcaggaggtgggacagcgagcctgtgagctctcaagataatttccaggcttcagaactttgacaggagcagtgttgcatctgttgtcacagctgcagataagaggtacgaataatctaagattgtgtcgctgatgattttgtcaagaaagaagtctagaatcagacggcaggtcattgtgcaggactcaagtttccttattcttcatccaagatgttaattgaagtcattatcaacacaagttagctgtataatcaacctactctcttcgcatacaatcaacatctatgaaaaccaggaagcaacctataattttctcacatgtgtgtattttttaaagacaaaatagaatgcggcctataaattagttaaatttagaaagtgcctgttaaaagagccttttttctgcacaggtgtttaaccaaaatttgtctaaatcggtggaaataaagctgttattggtctactcaaccttattcatgatcatgttacaagtccattacttgtaagccaccataacaaacttgctgcagggaggtgcaacccatgttgacatagcatgtgacaaggacttagtaaagcttgccatggatgttaccaaccttccgaatatttttttgtggaagtggaagggttctagcagggattctcttcccttcagccgaaaatcaacaaggatctattcagggtggaactaactgacatcgaggtttgctcgagctccctcagcacatagctgaacaaggtcccgatgaccgctgttatctgcgtacactggtccaaatcatctgcactgaccagaagaggctcagctacgacacttgaggacgatgacagtgaactgaatatattttcacaattagtctagatttatggatgtgtgccttcattaatggtgacagtagtactcatgtggctccattgctcattgagatatggtggcatgttgaattgttgaccccccctacgttgtatcacatattcacatctactagcactggtagttatgaactaggacaacaactctttttatttttcgtattagccttctttgaaatgatcatgcgaatattgatattttcacattgtttttttttgcgattttagccttaattttcatataactagctcatatcgtcattgaatataagtctttaggttgttatgtttaggctgtctctagcatcctttgtatcccacaccttatctcattccctatatcgaacttcattgtagtctacaatgcaaaacaatatttttgc

SEQ ID NO: 213107 - DNA, 2252 bp, Zea Mays
gtcgctgctcgcttcgcatcaaccgtatccgcttcttgggaaggctccatgcctcgccccgccgcaacaaactcctccgctccacacctctcaccaagaccgccccttccctgcccgcacacggcggcgccccaatctctccaccacgtgtgacggcgacggcgccccatccctctccagcgcgcgtagaggcggcgtccctccctctcccgtgcgtggcggtggccggatgcggtggaggcggagggtatcgccatcggcggtagcggcggcggcggaggaggcggcgccatgaggggggcgcgggcgggagtgggcgctggctgcggcggcaggaggtgggacagcgagcctgtgagctctcaagataatttccaggcttcagaactttgacaggagcagtgttgcatctgttgtcacagctgcagataagggaggtgcaacccatgttgacatagcatgtgacaaggacttagtaaagcttgccatggatgttaccaaccttccgatctatgtctcatttgtagatccttcagcgttccattctgcagtacaagcaggagctaaaatggccaggcactaaacttccgatgctaaccatgcaaaaatttcaaaagaaagtcatttttctataacatatgtttgcacccttaaaccatctttctttatggtctgttttatttggtaatttatctatctgatcagttttcaattttgtatcgcatttcaaaattttcagaacatagggagcatcagcatgcttggtagttggcacttcttagtcttaatttgaatgtgttcacagctatactgatatacaattctccaaattgttaatgaatatgttctcaacaagtatgatattgcatcaattggatttaggaattatgaataagtatattattgccctagcattctgaactctgtacctaaatttagctttatttctctaagcctgtttcattcagttaccttggccgcaacagttgtaaagtaaaactgaatgctactaaaaacattagttctatttttatgtattttgattgttccaagcagcataattaattacatagtgattttgaagtgttcttttcagttagtcagtactttgatgtatatcaggattaatctctggtgtttaatacagtgttttgtagcgattaatggtgttgtctcaatgaactcatacatgcgttttcttcgatcgtaccaggaatcgaatgttgctggttagattcatttatgttctgttcgtgctcatggtgtcttgtagaatagatagagtgtatgcctgtgttctctttggaaagtgtattttggtgcaacaacctctattttttgaactcaggttgatgcttctgtttttgaatgtttctccacatataatgaatatgggttgggtttagaaggtgctagacagagaccgattttttaaggttgacagcctaattatgaggcatacaattttttggctctcctgtatgacatttcatggaaacaataattttctctgtatcgatgtttgaaagaccgtaactatttgttgataagctctagatggtgttggttgacctcttactgatgctattttattttagaatatttttttgtggaagtggaagggttctagcagggattctcttcccttcagccgaaaatcaacaaggatctattcagggtggaactaactgacatcgaggtttgctcgagctccctcagcacatagctgaacaaggtcccgatgaccgctgttatctgcgtacactggtccaaatcatctgcactgaccagaagaggctcagctacgacacttgaggacgatgacagtgaactgaatatattttcacaattagtctagatttatggatgtgtgccttcattaatggtgacagtagtactcatgtggctccattgctcattgagatatggtggcatgttgaattgttgaccccccctacgttgtatcacatattcacatctactagcactggtagttatgaactaggacaacaactctttttatttttcgtattagccttctttgaaatgatcatgcgaatattgatattttcacattgtttttttttgcgattttagccttaattttcatataactagctcatatcgtcattgaatataagtctttaggttgttatgtttaggctgtctctagcatcctttgtatcccacaccttatctcattccctatatcgaacttcattgtagtctacaatgcaaaacaatatttttgc

SEQ ID NO: 213108 - DNA, 2568 bp, Zea Mays
gtcgctgctcgcttcgcatcaaccgtatccgcttcttgggaaggctccatgcctcgccccgccgcaacaaactcctccgctccacacctctcaccaagaccgccccttccctgcccgcacacggcggcgccccaatctctccaccacgtgtgacggcgacggcgccccatccctctccagcgcgcgtagaggcggcgtccctccctctcccgtgcgtggcggtggccggatgcggtggaggcggagggtatcgccatcggcggtagcggcggcggcggaggaggcggcgccatgaggggggcgcgggcgggagtgggcgctggctgcggcggcaggaggtgggacagcgagcctgtgagctctcaagataatttccaggcttcagaactttgacaggagcagtgttgcatctgttgtcacagctgcagataaggtgtggacaatacatctacctgtcaacgcttactagagttactatttcgttcttgcagacttctttgagactatatgatgtgaaaagagaggtctctattacactgtttttatctgttgttttcttctagaggtacgaataatctaagattgtgtcgctgatgattttgtcaagaaagaagtctagaatcagacggcagggaggtgcaacccatgttgacatagcatgtgacaaggacttagtaaagcttgccatggatgttaccaaccttccggtaagctatccattcatagggtgattggaacctgtggttgtaattgccgttatggtttcgcctagcatcagagttggttgtgctaagtgcatttctggggaaaactgcatattgcagatctatgtctcatttgtagatccttcagcgttccattctgcagtacaagcaggagctaaaatggccaggcactaaacttccgatgctaaccatgcaaaaatttcaaaagaaagtcatttttctataacatatgtttgcacccttaaaccatctttctttatggtctgttttatttggtaatttatctatctgatcagttttcaattttgtatcgcatttcaaaattttcagaacatagggagcatcagcatgcttggtagttggcacttcttagtcttaatttgaatgtgttcacagctatactgatatacaattctccaaattgttaatgaatatgttctcaacaagtatgatattgcatcaattggatttaggaattatgaataagtatattattgccctagcattctgaactctgtacctaaatttagctttatttctctaagcctgtttcattcagttaccttggccgcaacagttgtaaagtaaaactgaatgctactaaaaacattagttctatttttatgtattttgattgttccaagcagcataattaattacatagtgattttgaagtgttcttttcagttagtcagtactttgatgtatatcaggattaatctctggtgtttaatacagtgttttgtagcgattaatggtgttgtctcaatgaactcatacatgcgttttcttcgatcgtaccaggaatcgaatgttgctggttagattcatttatgttctgttcgtgctcatggtgtcttgtagaatagatagagtgtatgcctgtgttctctttggaaagtgtattttggtgcaacaacctctattttttgaactcaggttgatgcttctgtttttgaatgtttctccacatataatgaatatgggttgggtttagaaggtgctagacagagaccgattttttaaggttgacagcctaattatgaggcatacaattttttggctctcctgtatgacatttcatggaaacaataattttctctgtatcgatgtttgaaagaccgtaactatttgttgataagctctagatggtgttggttgacctcttactgatgctattttattttagaatatttttttgtggaagtggaagggttctagcagggattctcttcccttcagccgaaaatcaacaaggatctattcagggtggaactaactgacatcgaggtttgctcgagctccctcagcacatagctgaacaaggtcccgatgaccgctgttatctgcgtacactggtccaaatcatctgcactgaccagaagaggctcagctacgacacttgaggacgatgacagtgaactgaatatattttcacaattagtctagatttatggatgtgtgccttcattaatggtgacagtagtactcatgtggctccattgctcattgagatatggtggcatgttgaattgttgaccccccctacgttgtatcacatattcacatctactagcactggtagttatgaactaggacaacaactctttttatttttcgtattagccttctttgaaatgatcatgcgaatattgatattttcacattgtttttttttgcgattttagccttaattttcatataactagctcatatcgtcattgaatataagtctttaggttgttatgtttaggctgtctctagcatcctttgtatcccacaccttatctcattccctatatcgaacttcattgtagtctacaatgcaaaacaatatttttgc

SEQ ID NO: 213109 - DNA, 1162 bp, Zea Mays
gtcgctgctcgcttcgcatcaaccgtatccgcttcttgggaaggctccatgcctcgccccgccgcaacaaactcctccgctccacacctctcaccaagaccgccccttccctgcccgcacacggcggcgccccaatctctccaccacgtgtgacggcgacggcgccccatccctctccagcgcgcgtagaggcggcgtccctccctctcccgtgcgtggcggtggccggatgcggtggaggcggagggtatcgccatcggcggtagcggcggcggcggaggaggcggcgccatgaggggggcgcgggcgggagtgggcgctggctgcggcggcaggaggtgggacagcgagcctgtgagctctcaagataatttccaggcttcagaactttgacaggagcagtgttgcatctgttgtcacagctgcagataagggaggtgcaacccatgttgacatagcatgtgacaaggacttagtaaagcttgccatggatgttaccaaccttccgaatatttttttgtggaagtggaagggttctagcagggattctcttcccttcagccgaaaatcaacaaggatctattcagggtggaactaactgacatcgaggtttgctcgagctccctcagcacatagctgaacaaggtcccgatgaccgctgttatctgcgtacactggtccaaatcatctgcactgaccagaagaggctcagctacgacacttgaggacgatgacagtgaactgaatatattttcacaattagtctagatttatggatgtgtgccttcattaatggtgacagtagtactcatgtggctccattgctcattgagatatggtggcatgttgaattgttgaccccccctacgttgtatcacatattcacatctactagcactggtagttatgaactaggacaacaactctttttatttttcgtattagccttctttgaaatgatcatgcgaatattgatattttcacattgtttttttttgcgattttagccttaattttcatataactagctcatatcgtcattgaatataagtctttaggttgttatgtttaggctgtctctagcatcctttgtatcccacaccttatctcattccctatatcgaacttcattgtagtctacaatgcaaaacaatatttttgc

SEQ ID NO: 213110 - DNA, 1058 bp, Zea Mays
gtcgctgctcgcttcgcatcaaccgtatccgcttcttgggaaggctccatgcctcgccccgccgcaacaaactcctccgctccacacctctcaccaagaccgccccttccctgcccgcacacggcggcgccccaatctctccaccacgtgtgacggcgacggcgccccatccctctccagcgcgcgtagaggcggcgtccctccctctcccgtgcgtggcggtggccggatgcggtggaggcggagggtatcgccatcggcggtagcggcggcggcggaggaggcggcgccatgaggggggcgcgggcgggagtgggcgctggctgcggcggcaggagataatttccaggcttcagaactttgacaggagcagtgttgcatctgttgtcacagctgcagataagaatatttttttgtggaagtggaagggttctagcagggattctcttcccttcagccgaaaatcaacaaggatctattcagggtggaactaactgacatcgaggtttgctcgagctccctcagcacatagctgaacaaggtcccgatgaccgctgttatctgcgtacactggtccaaatcatctgcactgaccagaagaggctcagctacgacacttgaggacgatgacagtgaactgaatatattttcacaattagtctagatttatggatgtgtgccttcattaatggtgacagtagtactcatgtggctccattgctcattgagatatggtggcatgttgaattgttgaccccccctacgttgtatcacatattcacatctactagcactggtagttatgaactaggacaacaactctttttatttttcgtattagccttctttgaaatgatcatgcgaatattgatattttcacattgtttttttttgcgattttagccttaattttcatataactagctcatatcgtcattgaatataagtctttaggttgttatgtttaggctgtctctagcatcctttgtatcccacaccttatctcattccctatatcgaacttcattgtagtctacaatgcaaaacaatatttttgc

SEQ ID NO: 213111 - DNA, 2340 bp, Zea Mays
gtcgctgctcgcttcgcatcaaccgtatccgcttcttgggaaggctccatgcctcgccccgccgcaacaaactcctccgctccacacctctcaccaagaccgccccttccctgcccgcacacggcggcgccccaatctctccaccacgtgtgacggcgacggcgccccatccctctccagcgcgcgtagaggcggcgtccctccctctcccgtgcgtggcggtggccggatgcggtggaggcggagggtatcgccatcggcggtagcggcggcggcggaggaggcggcgccatgaggggggcgcgggcgggagtgggcgctggctgcggcggcaggagataatttccaggcttcagaactttgacaggagcagtgttgcatctgttgtcacagctgcagataagggaggtgcaacccatgttgacatagcatgtgacaaggacttagtaaagcttgccatggatgttaccaaccttccggtaagctatccattcatagggtgattggaacctgtggttgtaattgccgttatggtttcgcctagcatcagagttggttgtgctaagtgcatttctggggaaaactgcatattgcagatctatgtctcatttgtagatccttcagcgttccattctgcagtacaagcaggagctaaaatggccaggcactaaacttccgatgctaaccatgcaaaaatttcaaaagaaagtcatttttctataacatatgtttgcacccttaaaccatctttctttatggtctgttttatttggtaatttatctatctgatcagttttcaattttgtatcgcatttcaaaattttcagaacatagggagcatcagcatgcttggtagttggcacttcttagtcttaatttgaatgtgttcacagctatactgatatacaattctccaaattgttaatgaatatgttctcaacaagtatgatattgcatcaattggatttaggaattatgaataagtatattattgccctagcattctgaactctgtacctaaatttagctttatttctctaagcctgtttcattcagttaccttggccgcaacagttgtaaagtaaaactgaatgctactaaaaacattagttctatttttatgtattttgattgttccaagcagcataattaattacatagtgattttgaagtgttcttttcagttagtcagtactttgatgtatatcaggattaatctctggtgtttaatacagtgttttgtagcgattaatggtgttgtctcaatgaactcatacatgcgttttcttcgatcgtaccaggaatcgaatgttgctggttagattcatttatgttctgttcgtgctcatggtgtcttgtagaatagatagagtgtatgcctgtgttctctttggaaagtgtattttggtgcaacaacctctattttttgaactcaggttgatgcttctgtttttgaatgtttctccacatataatgaatatgggttgggtttagaaggtgctagacagagaccgattttttaaggttgacagcctaattatgaggcatacaattttttggctctcctgtatgacatttcatggaaacaataattttctctgtatcgatgtttgaaagaccgtaactatttgttgataagctctagatggtgttggttgacctcttactgatgctattttattttagaatatttttttgtggaagtggaagggttctagcagggattctcttcccttcagccgaaaatcaacaaggatctattcagggtggaactaactgacatcgaggtttgctcgagctccctcagcacatagctgaacaaggtcccgatgaccgctgttatctgcgtacactggtccaaatcatctgcactgaccagaagaggctcagctacgacacttgaggacgatgacagtgaactgaatatattttcacaattagtctagatttatggatgtgtgccttcattaatggtgacagtagtactcatgtggctccattgctcattgagatatggtggcatgttgaattgttgaccccccctacgttgtatcacatattcacatctactagcactggtagttatgaactaggacaacaactctttttatttttcgtattagccttctttgaaatgatcatgcgaatattgatattttcacattgtttttttttgcgattttagccttaattttcatataactagctcatatcgtcattgaatataagtctttaggttgttatgtttaggctgtctctagcatcctttgtatcccacaccttatctcattccctatatcgaacttcattgtagtctacaatgcaaaacaatatttttgc

SEQ ID NO: 213112 - DNA, 1563 bp, Zea Mays
gtcgctgctcgcttcgcatcaaccgtatccgcttcttgggaaggctccatgcctcgccccgccgcaacaaactcctccgctccacacctctcaccaagaccgccccttccctgcccgcacacggcggcgccccaatctctccaccacgtgtgacggcgacggcgccccatccctctccagcgcgcgtagaggcggcgtccctccctctcccgtgcgtggcggtggccggatgcggtggaggcggagggtatcgccatcggcggtagcggcggcggcggaggaggcggcgccatgaggggggcgcgggcgggagtgggcgctggctgcggcggcaggagataatttccaggcttcagaactttgacaggagcagtgttgcatctgttgtcacagctgcagataagaggtacgaataatctaagattgtgtcgctgatgattttgtcaagaaagaagtctagaatcagacggcaggtcattgtgcaggactcaagtttccttattcttcatccaagatgttaattgaagtcattatcaacacaagttagctgtataatcaacctactctcttcgcatacaatcaacatctatgaaaaccaggaagcaacctataattttctcacatgtgtgtattttttaaagacaaaatagaatgcggcctataaattagttaaatttagaaagtgcctgttaaaagagccttttttctgcacaggtgtttaaccaaaatttgtctaaatcggtggaaataaagctgttattggtctactcaaccttattcatgatcatgttacaagtccattacttgtaagccaccataacaaacttgctgcagggaggtgcaacccatgttgacatagcatgtgacaaggacttagtaaagcttgccatggatgttaccaaccttccgaatatttttttgtggaagtggaagggttctagcagggattctcttcccttcagccgaaaatcaacaaggatctattcagggtggaactaactgacatcgaggtttgctcgagctccctcagcacatagctgaacaaggtcccgatgaccgctgttatctgcgtacactggtccaaatcatctgcactgaccagaagaggctcagctacgacacttgaggacgatgacagtgaactgaatatattttcacaattagtctagatttatggatgtgtgccttcattaatggtgacagtagtactcatgtggctccattgctcattgagatatggtggcatgttgaattgttgaccccccctacgttgtatcacatattcacatctactagcactggtagttatgaactaggacaacaactctttttatttttcgtattagccttctttgaaatgatcatgcgaatattgatattttcacattgtttttttttgcgattttagccttaattttcatataactagctcatatcgtcattgaatataagtctttaggttgttatgtttaggctgtctctagcatcctttgtatcccacaccttatctcattccctatatcgaacttcattgtagtctacaatgcaaaacaatatttttgc

SEQ ID NO: 213113 - DNA, 1087 bp, Zea Mays
gtcgctgctcgcttcgcatcaaccgtatccgcttcttgggaaggctccatgcctcgccccgccgcaacaaactcctccgctccacacctctcaccaagaccgccccttccctgcccgcacacggcggcgccccaatctctccaccacgtgtgacggcgacggcgccccatccctctccagcgcgcgtagaggcggcgtccctccctctcccgtgcgtggcggtggccggatgcggtggaggcggagggtatcgccatcggcggtagcggcggcggcggaggaggcggcgccatgaggggggcgcgggcgggagtgggcgctggctgcggcggcaggaggtgggacagcgagcctgtgagctctcaagataatttccaggcttcagaactttgacaggagcagtgttgcatctgttgtcacagctgcagataagaatatttttttgtggaagtggaagggttctagcagggattctcttcccttcagccgaaaatcaacaaggatctattcagggtggaactaactgacatcgaggtttgctcgagctccctcagcacatagctgaacaaggtcccgatgaccgctgttatctgcgtacactggtccaaatcatctgcactgaccagaagaggctcagctacgacacttgaggacgatgacagtgaactgaatatattttcacaattagtctagatttatggatgtgtgccttcattaatggtgacagtagtactcatgtggctccattgctcattgagatatggtggcatgttgaattgttgaccccccctacgttgtatcacatattcacatctactagcactggtagttatgaactaggacaacaactctttttatttttcgtattagccttctttgaaatgatcatgcgaatattgatattttcacattgtttttttttgcgattttagccttaattttcatataactagctcatatcgtcattgaatataagtctttaggttgttatgtttaggctgtctctagcatcctttgtatcccacaccttatctcattccctatatcgaacttcattgtagtctacaatgcaaaacaatatttttgc

SEQ ID NO: 213114 - DNA, 639 bp, Zea Mays
tcgcccgttacaattttatgaacccacgttttccttcaatcagcgtacagttctcccctccttcctccagggttagatccagggaagacaactagatcgctcccacttcttcctcttgcctcctctgtgcttggatctatgtttccccacccccaatgctgatccttctcgcctcgatgtccaagagctccgatatgtcgtccaccgagccccggtgctcagatcacaacacatgccaaaggatttggcgggcgtagcagggtgtcgttcccacgggcatccctggatcaggattgtggaagtgagtgccatggggcaggagctagacgtgaaggtgccattgctgcatgatgagggtgtggattccatgaaagcatatgactgaattgagcttcttctaagcatttttttatgatggggcattcaaagctggtgaattggactagatattgagtttacaggagcagtcagggataatatgcatggttctgtaattagtgtggaaacctgagcaagacgtaaggcgtgtttctaaaaatgttcttaggaccagtaaatctacggacaacaaggaagattgtgcaacagaaggtgaaggaggatagaagcacgagtgaagcaactgctagcacaactcgg

SEQ ID NO: 213115 - DNA, 844 bp, Zea Mays
gcctcctctgtgcttggatctatgtttccccacccccaatgctgatccttctcgcctcgatgtccaagagctccgatatgtcgtccaccgagccccggtgctcagatcacaacacatgccaaaggatttggcgggcgtagcagggtgtcgttcccacgggcatccctggatcaggattgtggaagtgagtgccatggggcaggagctagacgtgaaggtgccattgctgcatgatgagggtgtggattccatgaaagcatatgactgaattgagcttcttctaagcatttttttatgatggggcattcaaagctggtgaattggactagatattgagtttacaggagcagtcagggataatatgcatggttctgtaattagtgtggaaacctgagcaagacgtaaggcgtgtttctaaaaatgttcttaggaccagtaaatctacggacaacaaggaagattgtgcaacagaaggtgaaggaggatagaagaagggggatggacgggcgacaacgacattggtgcggcgataaagttggtgagcacagaaggggagctaggtgtgccagtgacactggggcaacacagaagggggcaggcgacaaagtcagggtgagtacaataagggtacggcgacgacggagtcgagcgcttctaccttgtgtcgatccgatacaacgataatagaacagaagtggaattggattgttttagagagttgtggagttggattgtttggcgggatggtggatgtgtgctgtatttttgtcttcacgtatttattatttatttcaattctcatcatattcagtatatatataagaagacaaaaattgaggtgggg

SEQ ID NO: 213116 - DNA, 1098 bp, Zea Mays
aagggatccagttggagtaaaaagcaatttctagaagatacagtgctgtgcaggggagttcagatatggaagctgaaagatgttgtgtgatgcagagatggaagctgaaagctgtgtggtgctgctggtgcactggatgtttggaagttcatcttcgctacttggttgctcagatatgatgaaccaatctctcttcttggttggagaaatcgggggcaatgactacaacggacctcttctttctggagttcccatggagaaaatccgtgccatcactccgagtgttgttgcaaaaatttcttctacaatcagcgaattgattcggctaggagccaagactcttgtggttccaggaaacctcccaattggatgcatcccagactatctgatgatattcaagagcaataaggaagaggattatgaaccacagacaggttgtcttaggtggatgaacgagttctcacagtatcacaacaaggttcttgtggagcagctcaagaagcttcgcaagcttcatcctggagcaaccatcatctatgctgattactatggagctgctatggaaattttcctttcccctgaacaatatgggatcgaatatcccctagtggcttgctgtggtggagaaggaccctacggtgtgtccccatctacaggctgtggattcggagaatataagctgtgcgataatccagagaagtatggatcatgggatggcttccatccatcagaatctgcatacagggccattgctatgggcctgctactaggttcctacacaaggccgtcgatcacttccaccaccacttcatgtccacagcttatggagctcggctcttctgctgaatacaaacccctctacgacctgtagtaattttgtaattatattttattgtgtgtactccctcgcccagttctatcagtaccattttgtaagtatttgtactttgtaacttgtaactaataacttatcaaactagctactacatatttgttagagtgcacggttactcggttagattcagattcgtttgaaactgaaaatgcggaagtataaacaaatagaagaaaatacataagtgagaccaataccgaggc

SEQ ID NO: 213117 - DNA, 1368 bp, Zea Mays
ctcaggtaatcagttggacacgtagcactagcacatctattccgcttccctctcccactccactcgccatggcggaagcgctcgtgggcctccgcatcgctgcccccgccgtctcgtagccgcagcctaggtttcatggcagccagcttcttcccgttgtgcacctcgccgcgtcccggcgcaaccgactgtgcaccgcccgtgcggccgtctcagggccaccggaggtggacgaggacgattccatgagcatcgacaacttgcatcgcttcttcgacctcaacgtcgggaagtgggatggccggttctaccaattcgacgcgcacgggaaggttcttcaggagattagcacgaggctgtccgtgagctcgtacggggaggacaaactcatcagcctcctgcaatcgttgtacattaagcaaggatcctctgcaatatcgattgtggacgaagaggattctgaacctgaatgggtggagtacaaaatcaaagagacgaacatgttcactgtggacaaatatcagcagatagggttctttcctgaacaaaaggcatttgctctgaggtaccagactgctggaatgctggagactgttcttcggattggtgtgcttggagaagatgatactggtgaagaatcccccaagcaatggtagaatcagggcttttcacataatggatccaaagggagtgctcgacacacttcttgtttttcatgagaagaggcagggatctaaagtgccacagccacttacaaactattcagttggtaccaagagtgctagcagcgataggataaatgcactacttggaagatgggaggggcattctgtgactaagcggagtggggtgtatggagcaacacttgttgaggcagatacagctattgttctcaagatggacagtaatggccaattaattcaggatactttatcaactaaattcggaactggaacaacaacggtcaactggacaggatcagcaaatgacaacttgcttcagtttgatggaggatatgaaataacattgctacctggtgggatgtacatgggatatccgtcagacattagcaaatctgttgcccaattagattcttttcatttggagttctgttggatggaatcacctggaaagaggcagcggcttgtccgaacttacgattcagctggtttggctgtttcgtcgacctatttttctgaaaccaaagtatgagtcacagtttcctcttacaaaatgtattgcaacgaattttgtaagtgatccaataatctcactaactatttttgttgttccgtgcatgatacttgagtgtatattctcagattttttttctctctatccaaaaggcagaaatttattaaccaagca

SEQ ID NO: 213118 - DNA, 1417 bp, Zea Mays
gacacgtagcactagcacatctattccgcttccctctcccactccactcgccatggcggaagcgctcgtgggcctccgcatcgctgcccccgccgtctcgtagccgcagcctaggtttcatggcagccagcttcttcccgttgtgcacctcgccgcgtcccggcgcaaccgactgtgcaccgcccgtgcggccgtctcagggccaccggaggtggacgaggacgattccatgagcatcgacaacttgcatcgcttcttcgacctcaacgtcgggaagtgggatggccggttctaccaattcgacgcgcacgggaaggttcttcaggagattagcacgaggctgtccgtgagctcgtacggggaggacaaactcatcagcctcctgcaatcgttgtacattaagcaaggatcctctgcaatatcgattgtggacgaagaggattctgaacctgaatgggtggagtacaaaatcaaagagacgaacatgttcactgtggacaaatatcagcagatagggttctttcctgaacaaaaggcatttgctctgaggtaccagactgctggaatgctggagactgttcttcggattggtgtgcttggagaagatgatactggtgaagaatcccccaaaaacttgaagataccttctcgtaagccatctattgtatgtgaaaattgtctttactcccttgaaggcaatggtagaatcagggcttttcacataatggatccaaagggagtgctcgacacacttcttgtttttcatgagaagaggcagggatctaaagtgccacagccacttacaaactattcagttggtaccaagagtgctagcagcgataggataaatgcactacttggaagatgggaggggcattctgtgactaagcggagtggggtgtatggagcaacacttgttgaggcagatacagctattgttctcaagatggacagtaatggccaattaattcaggatactttatcaactaaattcggaactggaacaacaacggtcaactggacaggatcagcaaatgacaacttgcttcagtttgatggaggatatgaaataacattgctacctggtgggatgtacatgggatatccgtcagacattagcaaatctgttgcccaattagattcttttcatttggagttctgttggatggaatcacctggaaagaggcagcggcttgtccgaacttacgattcagctggtttggctgtttcgtcgacctatttttctgaaaccaaagtatgagtcacagtttcctcttacaaaatgtattgcaacgaattttgtaagtgatccaataatctcactaactatttttgttgttccgtgcatgatacttgagtgtatattctcagattttttttctctctatccaaaaggcagaaatttattaaccaagca

SEQ ID NO: 213119 - DNA, 1115 bp, Zea Mays
taactatcatcattatccatgttaattgggaacgttttcggttgtcatactatttttcaatcatctcttatgtgtatatatatgtcaggttgtacattaagcaaggatcctctgcaatatcgattgtggacgaagaggattctgaacctgaatgggtggagtacaaaatcaaagagacgaacatgttcactgtggacaaatatcagcagatagggttctttcctgaacaaaaggcatttgctctgaggtaccagactgctggaatgctggagactgttcttcggattggtgtgcttggagaagatgatactggtgaagaatcccccaaaaacttgaagataccttctcgtaagccatctattgtatgtgaaaattgtctttactcccttgaaggcaatggtagaatcagggcttttcacataatggatccaaagggagtgctcgacacacttcttgtttttcatgagaagaggcagggatctaaagtgccacagccacttacaaactattcagttggtaccaagagtgctagcagcgataggataaatgcactacttggaagatgggaggggcattctgtgactaagcggagtggggtgtatggagcaacacttgttgaggcagatacagctattgttctcaagatggacagtaatggccaattaattcaggatactttatcaactaaattcggaactggaacaacaacggtcaactggacaggatcagcaaatgacaacttgcttcagtttgatggaggatatgaaataacattgctacctggtgggatgtacatgggatatccgtcagacattagcaaatctgttgcccaattagattcttttcatttggagttctgttggatggaatcacctggaaagaggcagcggcttgtccgaacttacgattcagctggtttggctgtttcgtcgacctatttttctgaaaccaaagtatgagtcacagtttcctcttacaaaatgtattgcaacgaattttgtaagtgatccaataatctcactaactatttttgttgttccgtgcatgatacttgagtgtatattctcagattttttttctctctatccaaaaggcagaaatttattaaccaagca

SEQ ID NO: 213120 - DNA, 4037 bp, Zea Mays
cccagctctgcccctctctctcttaaaccccccaaaaccaaaaattaaaatccgccttctttcttctcccccgactccctcttccggtaagaatccggcccgccgccgccgccgctagcgtcgccgcgctcgctgcttctagggctgcgccttctcgcgcctccggtgccttccctgctccccacgatcccctgcctccacaagcttccttcacctgctcactccaaccgctgccgccatggcggagaagctcagggatctaagccagccggtagacgtgacgctcctcgatgctactgtcgctgccttctacggcaccggatctaaagaggagaggagcgccgctgatcagatactacgtgacctacaaaacaacccagacatgtggctacaagttgtacacattctgcagaattcccagaacctcaacaccaagttctttgcattgcaaatacttgaaagtgttatcaagtacaggtggaatgcattgcccgtcgatcaacgtgatggcataaagaattacatatctgatgttattgtgcagctttccagcaatgaagttacctttcggcaggagaggctttatgtcaataaactcaatattattttggtgcaggtactgaaacatgagtggcctgccagatggtcatccttcatacctgatcttgttgcagctgcaaagagtagtgaaactctatgtgaaaattgcatggctatattgaagcttctaagcgaagaaatttttgacttctcaagaggtgaaatgacacaacaaaagatcaaagaactgaagtcgtcacttaacagtgagttccggctcattcacgagctatgtttatatgtcctatctgcaacgcaaaggccagagctcatccgtgctacattggcgacactccatgctttcttatcatggatccctgttggattcatctttgagtcaccgttgctggagacattactgaagttcttccctatggctgcttatcggaatcttacacttcaatgcctaacagaggttgcagcacttcagtttggtgatttttataatgtgcagtatgtgaagacatatacatttttcattattcagttgcaggctattcttcctcctgaaaaaatcccggacgtatatgctaatggttccactgaagagcaggcgtttatacaaaatcttgcactcttcttcacatcattttttaagaatcacatgcgtatactggaaacaactcaagaaaatattgctgctttgcttatgggtctcgagtaccttattggaatttcatatgttgacgatacagaggtttttaaggtgtccttggattactggaatgtatttgtattagagctatttgaagcacacaatcaaatggaacctgcagtaactgtaagcatgatggggcttcaggcgcagatggttcctggaatggtagatgggggcacagctgttaaacagaggagacagctttactctggcccactctcgaaactacggatgctgatgatttgccgtatggcaaagcctgaggaagtacttattgttgaagacgaaaacggcaatattgtacgcgagacaatgaaagacaacgacgttcttgttcagtacaagatcatgagggaaacactgatctatttatcccatcttgatcacgaggacacagaacaacagatgttgaagaaactaagcaagcaattaaatggagaagactggagttggaataaccttaatactctctgttgggctattggatcaatatcaggttctatggtagaggagcaggtatgttgttggtcagtatccaagatttctcagggctcattggaagtttttgaaaactgtggtcaacaaattgtttgagttcatgcatgagatgcatcctggagttcaggatatggcatgtgataccttcctgaaaattgttcaaaaatgcaagcgcaagtttgtgacacaacaggtgggcgagaatgaaccatttgtttctgaacttctgtccaaccttgctacaaccatcgccgatcttgagccacatcagattcatacgttttacgaatcagttggccatatgatccaagctgaatctgacaacactaatagggatgaatacctcaagagattgatgagccttcctaaccagaagtgggcagaaataatcggacaggcaagccaaagtattgatatcctgaagaaccaagatgttatccgatcagttctcaacattctacagacaaacacaagtgttgcgagctcacttgggccacacttcttcccacagatttcactaattttcttggacatgctaacagtctacagaatgtacagcgagcttgtatcaagcacgattgctgaaggaggaccctttgcctcaaggacgtcatttgtaaaactcttgagatctgtcaagagggaaaccctaaagttgatcgagacttttgtggacaaggcggaagatttgccacatataggaaagcagtttgtaccaccaatgatggatcctgttcttggtgattatgctagaaatgtacccgatgcaagggagtctgaagttctgtccttgtttgcaacaatcattaacaagtacaaaggggaaatgcttgaggatgtgcctcgtatatttgaggctgttttccagtgcacccttgagatgattactaagaactttgaagattatcctgagcaccgcctcaaatttttttctttgcttcgtgcaattggcacccattgcttccaagcattaatccagctttcaagtcagcaattgaagcttgtgatcgattcaattaattgggcgttcagacatacagagagaaatattgcagagactggccttagcctgttgttggagatcttgaaaaaattccaggcttcaggattccaaaaccaattctacaaaacctactttttgacaattgagcaagagatttttgcagtcctcacagacacattccacaaacctggtttcaagcttcatgtttcggtgctgcaacacttgttttgtgcggttgatggtctaacggagcctctatgggacgcgtcttctgtaccttaccaatatacggataatgctatgtttgttcgagattacaccataaagctcttagggacatcatttcctaacatgacagtaaccgaggtgacaaagtttgtagatggtcttcttagttcaaaacttgatcttccaagcttcaaaaaccatattagagacttcctggtgcagtccaaggagttctcagttcaggataacaaggatctatacgcggaagaggctgctgcccaaagagagagggagcgccaacgtatgcttgccattccggggctcattgcccctagcgagttgcaagacgagatggtagattcgtagtgttccttgttgattcagctctctaatgtagcttcctgtttgttggtccggcatcggaatacctctggagccctcgacgtccaagttttcttccagggtggtgaaagaaggtgcctgctgtaattttatttttggttacctccacatgatgctgctgggggtctctcagcagctgtggttgcctggatgtgttagcagcggctcttgtgctcggtgtactttgctaacattggtgcgtgtactttgcccatcatatattatattgtggtacatcattgtatgcttctttggtttaagttaatagatggaatagcgatttatgtatccaggcaggctggtaggaaccttgttactatgtctgtagtgtactattctgtgagatatctcatacgcctttttttttctttttctttggtgcattcctcaatgtgtagatttgctgtctcatcaacaagggtaggtttggcttggctgtgtatggagaaaaaactatgttcttttgttagcactctggtgcggagattacatatataaatgtagtaatttgttctgtgctgattatgtatacgaggaatcagtttccttgttggattcagagcagctttagctactggttggcaagtgggagagagacgatggatgggaccacccctgcccgtctgtctttgacgtccacacgcgtag

SEQ ID NO: 213121 - DNA, 4157 bp, Zea Mays
gcagcaactccccgcgtcccaacccagctctgcccctctctctcttaaaccccccaaaaccaaaaattaaaatccgccttctttcttctcccccgactccctcttccggtaagaatccggcccgccgccgccgccgctagcgtcgccgcgctcgctgcttctagggctgcgccttctcgcgcctccggtgccttccctgctccccacgatcccctgcctccacaagcttccttcacctgctcactccaaccgctgccgccatggcggagaagctcagggatctaagccagccggtagacgtgacgctcctcgatgctactgtcgctgccttctacggcaccggatctaaagaggagaggagcgccgctgatcagatactacgtgacctacaaaacaacccagacatgtggctacaagttgtacacattctgcagaattcccagaacctcaacaccaagttctttgcattgcaaatacttgaaagtgttatcaagtacaggtggaatgcattgcccgtcgatcaacgtgatggcataaagaattacatatctgatgttattgtgcagctttccagcaatgaagttacctttcggcaggagaggctttatgtcaataaactcaatattattttggtgcaggtactgaaacatgagtggcctgccagatggtcatccttcatacctgatcttgttgcagctgcaaagagtagtgaaactctatgtgaaaattgcatggctatattgaagcttctaagcgaagaaatttttgacttctcaagaggtgaaatgacacaacaaaagatcaaagaactgaagtcgtcacttaacagtgagttccggctcattcacgagctatgtttatatgtcctatctgcaacgcaaaggccagagctcatccgtgctacattggcgacactccatgctttcttatcatggatccctgttggattcatctttgagtcaccgttgctggagacattactgaagttcttccctatggctgcttatcggaatcttacacttcaatgcctaacagaggttgcagcacttcagtttggtgatttttataatgtgcagtatgtgaagacatatacatttttcattattcagttgcaggctattcttcctcctgaaaaaatcccggacgtatatgctaatggttccactgaagagcaggcgtttatacaaaatcttgcactcttcttcacatcattttttaagaatcacatgcgtatactggaaacaactcaagaaaatattgctgctttgcttatgggtctcgagtaccttattggaatttcatatgttgacgatacagaggtttttaaggtgtccttggattactggaatgtatttgtattagagctatttgaagcacacaatcaaatggaacctgcagtaactgtaagcatgatggggcttcaggcgcagatggttcctggaatggtagatgggggcacagctgttaaacagaggagacagctttactctggcccactctcgaaactacggatgctgatgatttgccgtatggcaaagcctgaggaagtacttattgttgaagacgaaaacggcaatattgtacgcgagacaatgaaagacaacgacgttcttgttcagtacaagatcatgagggaaacactgatctatttatcccatcttgatcacgaggacacagaacaacagatgttgaagaaactaagcaagcaattaaatggagaagactggagttggaataaccttaatactctctgttgggctattggatcaatatcaggttctatggtagaggagcaggagaatagatttctggttatggttattcgtgatttgctaaacctctgtgaaatcacaaagggaaaggacaataaagctgtgattgcaagtaacattatgtatgttgttggtcagtatccaagatttctcagggctcattggaagtttttgaaaactgtggtcaacaaattgtttgagttcatgcatgagatgcatcctggagttcaggatatggcatgtgataccttcctgaaaattgttcaaaaatgcaagcgcaagtttgtgacacaacaggtgggcgagaatgaaccatttgtttctgaacttctgtccaaccttgctacaaccatcgccgatcttgagccacatcagattcatacgttttacgaatcagttggccatatgatccaagctgaatctgacaacactaatagggatgaatacctcaagagattgatgagccttcctaaccagaagtgggcagaaataatcggacaggcaagccaaagtattgatatcctgaagaaccaagatgttatccgatcagttctcaacattctacagacaaacacaagtgttgcgagctcacttgggccacacttcttcccacagatttcactaattttcttggacatgctaacagtctacagaatgtacagcgagcttgtatcaagcacgattgctgaaggaggaccctttgcctcaaggacgtcatttgtaaaactcttgagatctgtcaagagggaaaccctaaagttgatcgagacttttgtggacaaggcggaagatttgccacatataggaaagcagtttgtaccaccaatgatggatcctgttcttggtgattatgctagaaatgtacccgatgcaagggagtctgaagttctgtccttgtttgcaacaatcattaacaagtacaaaggggaaatgcttgaggatgtgcctcgtatatttgaggctgttttccagtgcacccttgagatgattactaagaactttgaagattatcctgagcaccgcctcaaatttttttctttgcttcgtgcaattggcacccattgcttccaagcattaatccagctttcaagtcagcaattgaagcttgtgatcgattcaattaattgggcgttcagacatacagagagaaatattgcagagactggccttagcctgttgttggagatcttgaaaaaattccaggcttcaggattccaaaaccaattctacaaaacctactttttgacaattgagcaagagatttttgcagtcctcacagacacattccacaaacctggtttcaagcttcatgtttcggtgctgcaacacttgttttgtgcggttgatggtctaacggagcctctatgggacgcgtcttctgtaccttaccaatatacggataatgctatgtttgttcgagattacaccataaagctcttagggacatcatttcctaacatgacagtaaccgaggtgacaaagtttgtagatggtcttcttagttcaaaacttgatcttccaagcttcaaaaaccatattagagacttcctggtgcagtccaaggagttctcagttcaggataacaaggatctatacgcggaagaggctgctgcccaaagagagagggagcgccaacgtatgcttgccattccggggctcattgcccctagcgagttgcaagacgagatggtagattcgtagtgttccttgttgattcagctctctaatgtagcttcctgtttgttggtccggcatcggaatacctctggagccctcgacgtccaagttttcttccagggtggtgaaagaaggtgcctgctgtaattttatttttggttacctccacatgatgctgctgggggtctctcagcagctgtggttgcctggatgtgttagcagcggctcttgtgctcggtgtactttgctaacattggtgcgtgtactttgcccatcatatattatattgtggtacatcattgtatgcttctttggtttaagttaatagatggaatagcgatttatgtatccaggcaggctggtaggaaccttgttactatgtctgtagtgtactattctgtgagatatctcatacgcctttttttttctttttctttggtgcattcctcaatgtgtagatttgctgtctcatcaacaagggtaggtttggcttggctgtgtatggagaaaaaactatgttcttttgttagcactctggtgcggagattacatatataaatgtagtaatttgttctgtgctgattatgtatacgaggaatcagtttccttgttggattcagagcagctttagctactggttggcaagtgggagagagacgatggatgggaccacccctgcccgtctgtctttgacgtccacacgcgtag

SEQ ID NO: 213122 - DNA, 506 bp, Zea Mays
ctcggcgaatacattcgcggtgaagatgcggttgccatagctacaaaagccgacaatcttgtttttctgaagggcctcatagaccgagttactttgaagatcatgttcgacacatcagctttatggctctagatcgtaagcagagttatcaaactagcagttctgttaatcacagaagctagtttaatctttcataaggattctaattcagatgctgctccaaaagaattgcctgatacagggtgatatgctcgaaggtgaccgttccagcagcttattagtgatatgctcaaaggtgactaacattactagccatatagctcttattcagtaagcccttttttcactcagatgttagatgaagatgcaataacatttcacacactggtgtataagccattgtaacctgtgtttgcattcggtcaatatatgtgctccgatttcttgataagtgaacctgggtttttgttggatgtcatgtcagcttctgcttgctcgtgtttcag

SEQ ID NO: 213123 - DNA, 1298 bp, Zea Mays
gcctccctctccacctgcgggctgcggcggtgcgagccgcggcacaggcgcacagcggtgcctgccctgcccacacggccacaccaccacagatccattttaaaaccccaggcgtctctcacgcttccgccgctttacaactccccaccccagccgatcccaacgcacactgcacccagtgcggcgactggtggcgcggcctgccgcacccggtgcagtcgtggatgcgcaactgcgtcggcggttacctcctctacttcatctctggtttcctctggtgtttcgtcatctactactggaagcgccacgcctacatccccaaagatgccatccccacaaatgaagctatgaagaagcaaatagctgtagcatccaaggctatgcctttttactgtgctcttccaactttatctgagtatatgatcgagagtggatggacccggtgttactttaatatcagcgaaatgggtttttctgcatacctttgttatatggctatgtatctcatttttgtggagtttggaatttactggatgcacagagagttgcatgacataaagccactatacaaacatctgcatgcgacccaccatatttacaacaaggagaacaccttgtctccgtttgctggactcgcgtttcacccactggatggtattctgcaagcgataccgcatgtgcttgcgctcttcctcctcccaacgcacttcaggacgcacatcgctctcgtgttcttggagggcgtgtggacgacaaacatccacgactgcattcacggcaaggtatggccagtcatgggcgctgggtatcacaccatccaccatacgacttaccgccacaactatggccactacaccgtctggatggactggatgtttggtacgctccgtgagccagatgatatcctcaagaaggcctgagttcgtcgtagctgtggttttcctacggtgctggatgtgcttggtctgttctgtccccagtgcctctaatccgctgagcctgttcagcgctctgtttctgtaggctttggtgtgctatttagtttgctaggttttatatgttgtgcttattctgtaatttagtgatgtttgtctcatgacgcaacggagttcaggacgaataaaaagaaagatttgctagacacattctggattccagctgcctgtacaatgttgcacctcagctgtcagtgtaggatgtaaaatggattggcttctaccttgtgagttcacgcgttgttcagtctatgaatgttgcttatatattgtgtaaaacagaggtggccttgcttcctttcc

SEQ ID NO: 213124 - DNA, 1065 bp, Zea Mays
ccggtgggagggagtaagcgaaaaattgccggtttcattggattgctgacggatacactacatttgaagtgctcctgtgaacacatgcttcatgccatccccacaaatgaagctatgaagaagcaaatagctgtagcatccaaggctatgcctttttactgtgctcttccaactttatctgagtatatgatcgagagtggatggacccggtgttactttaatatcagcgaaatgggtttttctgcatacctttgttatatggctatgtatctcatttttgtggagtttggaatttactggatgcacagagagttgcatgacataaagccactatacaaacatctgcatgcgacccaccatatttacaacaaggagaacaccttgtctccgtttgctggactcgcgtttcacccactggatggtattctgcaagcgataccgcatgtgcttgcgctcttcctcctcccaacgcacttcaggacgcacatcgctctcgtgttcttggagggcgtgtggacgacaaacatccacgactgcattcacggcaaggtatggccagtcatgggcgctgggtatcacaccatccaccatacgacttaccgccacaactatggccactacaccgtctggatggactggatgtttggtacgctccgtgagccagatgatatcctcaagaaggcctgagttcgtcgtagctgtggttttcctacggtgctggatgtgcttggtctgttctgtccccagtgcctctaatccgctgagcctgttcagcgctctgtttctgtaggctttggtgtgctatttagtttgctaggttttatatgttgtgcttattctgtaatttagtgatgtttgtctcatgacgcaacggagttcaggacgaataaaaagaaagatttgctagacacattctggattccagctgcctgtacaatgttgcacctcagctgtcagtgtaggatgtaaaatggattggcttctaccttgtgagttcacgcgttgttcagtctatgaatgttgcttatatattgtgtaaaacagaggtggccttgcttcctttcc

SEQ ID NO: 213125 - DNA, 664 bp, Zea Mays
cagccccacaacacaagctgagagaggccatcgctatggtagacgaggtcgggccgccggagaagcctgcaatggagccagcaccggccgcgaagcagatcatggtgccggagaagccagaggagatgctgagagctcagcatatgttgaccactctggtggacgaggtccggccaccggagaagccagaggagacgccggagaacacctccgcaggatgtccaactccatcctacccccgcccaagaatgttgatgtcgagcgctccgcctgttccgctcccgcgccgccaacgagcaccgccgagctcctccctggcgccacgtcccgacagacgtcggcgccgagcggctggctccaccgtgctgagtgtggttggaggccatggccaacagccagagagacctagcatcgtccaagggagccctccatgggcgacacaagagggggacagccacacacacatgcaagacattgaggagaagcacaaccatgttgtgtgtcacctttcctttgattgctagttggatcattcacatattatatcggttgaatcatcttctacaccaaaaaaggcatatgttcctgcagtgataagctttccttttcactcatgttatttccttaccatgtagaataatatgtttgtgtgacaaaagtattg

SEQ ID NO: 213126 - DNA, 597 bp, Zea Mays
cagccccacaacacaagctgagagaggccatcgctatggtagacgaggtcgggccgccggagaagcctgcaatggagccagcaccggccgcgaagcagatcatggtgccggagaagccagaggagatgctgagagctcagcatatgttgaccactctggtggacgaggtccggccaccggagaagccagaggagacgccggagaacacctccgcaggatgtccaactccatcctacccccgcccaagaatgttgatgtcgagcgctccgcctgttccgctcccgcgccgccaacgagcaccgccgagctcctccctggcgccacgtcccgacagacgtcggcgccgagcggctggctccaccgtgctgaggtgctcccccatgcccctaccccttaggacaagcggttgagctccgcctcgctcctagcgttcgtatctagaccgtgtggactcttctgtcctaaactactaacaatttttgtacaaataaaaacattctttgcttctctacgcgttcgggcctgtcagatagtagcatctacctatagtaatatttaatcataaaaataattaatgaactcttcagcattgtggtt

SEQ ID NO: 213127 - DNA, 782 bp, Zea Mays
  misc_feature (781)..(782): n is a, c, g, or t
cttgtctctcctttatttgacggtaacacaaatggctctctacctccacctcataacaaccttaggttacagtaacgttatctctcttccatcctttctctctctacctatctgttcccaagtatagaatataggaggagtatatttttttagagatcgttaacctctcacagtaatccctccttttgcccaaaacctaaaggaagccaaagtgggagcaccaaaatattcgcggcgggtgcatagttgtttgtttaggagaagacgaggttaagaggagatgaccgagccggcacctgcggcagcagcggaggagaagaaggccgtcgcggacacggctgcggctgtggtggcgaagggaaaagagaaggaggaggcggcgccaactctggcggccggcgccagggggaggttcgtggcctacccggcgcgggtgacggagcacacggacgtggtggcggacgccgcgcgcttcagggcggcgctcgaggggctgcacgcgcacatgaacacgaggctcaaggtgccaattattggagggaaagatttggatcttcatcagctatataaggaggtcacatcacggggtggtattgacaagttgaaggcagagaatagatggagggaagtgaccgcatcatttattttccctgccactgcaacaaatgcttcttttatgttgaagaaatactatatgtcactcttatatcattttgagcagctatacttctttagagtgcaaggctggtaccaacaagaaatagattccagaacgaattcnn

SEQ ID NO: 213128 - DNA, 2413 bp, Zea Mays
caactgtgtacgatctgtagaggttggaaccctgtcatgtggggccggcattaccagcgccgaccctgcactcaggtgcaacaaccgtcgacaccaagtggctaggcgcggtttaaggagcaggcatgcagatgcacatgcaagacaagctagaattagggggtttgtttcctttatttgcagatcggcatgcaagacaagctagaatcaagggggtttgttcctttattagcaggaaagaattacccatctctagtctccctctctttctcctcttaatctcactcctctcaccatcaggccgtcgggcaaaaaccctgacgcctctacccgctcaggctacaaattacgtcgccgaggtcctgcttaaaaaaaactcgcccggggagggaaagaccgccctcccggtattatattgagaagagaccgaaacatggtcccgaccgagaaaatcctcgaaccctagccctcaatcactagcaggccatcaccgcccactctgcaacgggccaacggcccagccggagggtggtgtgcaagatgtaacccgggagcggatggggcacaacaagggattttttttaaccaagccagaaattcgcccccaagggggatcgaaaccgggacctgaaggaactgaagtttgtgaacgtttggcctactatggaatctcaaaaagtttggtcacttacctttcaacaagactacatgaaggaaacgtttctgctgccaggaacttcacaacctggcaaggaacttgttatcttacaccacttattggagcaaccttagcagattcgtactggggaaagtacaggactattgctgttttctccactatttactttcttgggatgtcggcattgacactttcagcatcagttccttctttccagccccctcaatgtgttgggtctatttgtccacaaccgaccttatcacagtatcttttatactttgttggattatacatgattgctctgggagctggtggtataaagccgtgtgtttcatcctttggggctgaccaatttgatgatactgatccagttgagaaagcaaagaaaggagctttcttcaattggttttatttctgcataaatattggttctttgatctctggcacagttcttatttgggtacaagagaattgtggatacagcattggctttgggatccctacttttttcattgccttggctattggaagcttttttataggttcagatatatataggtttcagataccgggaggaagcccacttacaagagcatgccaggtagttgtggcagccactcacaagcgaaaaacagatttgccggttgacagttctcttctctatgagctagatggtaagacttcagctattgaggggagtcatattcatttatactgcacttttgttctgacattgcatgcttttaagcttgtgtcttggaacttcctggacacagcaaccttttttcagaactatgaaagtttccttgacaaagcggcagtcattttgtggaatgaatgtgatggtcctcgcaattcatggagactttgcacagtcacacaagttgaagagcttaaaatactactgaggatgtttccaatctgggcaacaggaattgtgttcttcaccgtatgtgctcaaaactcatcgatgttcatagaacaggggatgaccctcgataaccaaattggtccattcaagattccagcagcaactctgtcgtccctagatgttatcagtgttgtcgtttgggttccaatttatgagaggttagttgtgcccatagccaggagattcagtgggaaagagagaggtttctcagaacttcaacggatggggatcggtctatttgtgtctacagtcgcagtggcagttgcagcgctagtcgagatcaatcgtctacaggtggcagtggcagaggacctggttcatcagaaggtacctgttcctatgagcatcctttggcaagcgcctcagtatttgctggtcggtgtgggcgaggtgttcacatcaattggtcaagctgagtttttctacaatcagtcaccagatgccatgagaagcttatgctcagctttcgctctcgttaccgtgtcacttggaagttatctcagctcattcatcttaagcctggtgtcatatttcacaactcggaatgggcaattggggtggatccctgataacttgaacgaaggccatcttgaccgctttttctggctgatagccggtctcagctcactaaatttccttgtttttatatattacgctcaacaatacaagtgcaagatagcttctgttgcttaaagttccttctccactttgcaatttacttgtacagcaaagctcaatgtacaatttgtttatgctgaaatactacagtgcgtacataatctcatgtgtcgtgtactgtgtac

SEQ ID NO: 213129 - DNA, 2035 bp, Zea Mays
ctctgcttggcgaatcatattagttggaccaacatcaattgccggcaataaaaaaaacatcaattgccgaagaagcaatcactgatcactcttcaaggttcgaagctttcccttacttctggagagaaaagcctccacggaccacggcttcagaagctgctttcatggagtcgtcgctggtggaggagcggcggcaaaacctgctggtgcgcgcgacggagcctgaggatcttgccaggtacacaggtgatgggtcagttgactttagaggttttcctattttaaagcataacacagggaactggagagcatgttcattgattcttggaactgaagtttgtgaacgtttggcctactatggaatctcaaaaagtttggtcacttacctttcaacaagactacatgaaggaaacgtttctgctgccaggaacttcacaacctggcaaggaacttgttatcttacaccacttattggagcaaccttagcagattcgtactggggaaagtacaggactattgctgttttctccactatttactttcttgggatgtcggcattgacactttcagcatcagttccttctttccagccccctcaatgtgttgggtctatttgtccacaaccgaccttatcacagtatcttttatactttgttggattatacatgattgctctgggagctggtggtataaagccgtgtgtttcatcctttggggctgaccaatttgatgatactgatccagttgagaaagcaaagaaaggagctttcttcaattggttttatttctgcataaatattggttctttgatctctggcacagttcttatttgggtacaagagaattgtggatacagcattggctttgggatccctacttttttcattgccttggctattggaagcttttttataggttcagatatatataggtttcagataccgggaggaagcccacttacaagagcatgccaggtagttgtggcagccactcacaagcgaaaaacagatttgccggttgacagttctcttctctatgagctagatggtaagacttcagctattgaggggagtcgtaagctggagcacagtagtgaattcagtttccttgacaaagcggcagtcattttgtggaatgaatgtgatggtcctcgcaattcatggagactttgcacagtcacacaagttgaagagcttaaaatactactgaggatgtttccaatctgggcaacaggaattgtgttcttcaccgtatgtgctcaaaactcatcgatgttcatagaacaggggatgaccctcgataaccaaattggtccattcaagattccagcagcaactctgtcgtccctagatgttatcagtgttgtcgtttgggttccaatttatgagaggttagttgtgcccatagccaggagattcagtgggaaagagagaggtttctcagaacttcaacggatggggatcggtctatttgtgtctacagtcgcagtggcagttgcagcgctagtcgagatcaatcgtctacaggtggcagtggcagaggacctggttcatcagaaggtacctgttcctatgagcatcctttggcaagcgcctcagtatttgctggtcggtgtgggcgaggtgttcacatcaattggtcaagctgagtttttctacaatcagtcaccagatgccatgagaagcttatgctcagctttcgctctcgttaccgtgtcacttggaagttatctcagctcattcatcttaagcctggtgtcatatttcacaactcggaatgggcaattggggtggatccctgataacttgaacgaaggccatcttgaccgctttttctggctgatagccggtctcagctcactaaatttccttgtttttatatattacgctcaacaatacaagtgcaagatagcttctgttgcttaaagttccttctccactttgcaatttacttgtacagcaaagctcaatgtacaatttgtttatgctgaaatactacagtgcgtacataatctcatgtgtcgtgtactgtgtac

SEQ ID NO: 213130 - DNA, 1303 bp, Zea Mays
gttcaccgcaccccactcttcgcggcgcgttgcaggaacttcccgtattccccacgcgtccgagcgcacagcgtcacggcgctcaggccgtggcttactggcttccacccacagccttcgcacttccctccttcctcgcaaatggccgtcgccgtccccaacgctcccggccgcctcttccttctccaatccaccccgttcccgaaccctagcagctcggcatccgccgctcgagcccaatccttccgcgtaccacccctccgcctctcgctattccgacgcatggctgggcgctcgctgacggtgatcgcaggcgcctccggcggctccgaacgagatctcagcgcctccgcagtctccgtggaggccctggactccgtcgcctccgattctgacttagagacgaaggagcccagtgtgtcgacgatgctgacgagcttcgagaactcgttcgacaagtatggggctctgagcacaccgctgtaccagaccgccacctttaagcagccttcagctacagattatggaacttatgattacactagaagtggtaaccctactcgtgatgttctccagagcctcatggctaagcttgagaaagcagatcaagcattctgcttcaccagcgggatggcggcgttagctgcagtaacacacctccttcaggctggacaagaaatagttgctggtgaggacatatatggtggttctgatcgtctactctcgcaagttgtgccaagaaatggaatagttgtaaaacgagtagatacaacgaaaattagtgatgtggtgtctgcaattggaccctccactagactggtttggctcgaaagtcccacgaaccctcgtcagcaaattactgacattaagacaatctcagagatagcgcattctcatggtgctcttgttttggttgacaacagcatcatgtctccagtgctctcccgtcctatagaactgggagctgatatcgtgatgcactcggctaccaaatttatagcgggacatagtgatcttatggctggaattcttgcagtgaagggtgagagtttggctaaagaggtagggtttctgcaaaatgctgaagggtcgggtctggcaccttttgactgctggctttgcttgaggggaatcaaaaccatggctctgcgggtggagaaacaacaggctaatgcccagaagattgctgaattcctggcgtctcacccgagggtcaagcaagtaaactacgctgggcttcctgaccatcctgggcgagctttacactattcccaggaggactgtcctgatcagttatgcctgt

SEQ ID NO: 213131 - DNA, 401 bp, Zea Mays
ccatggcgattgtaccagtgcgtcgtgtgcctggagtccctgatgcccatgcacagcgccacggcttcggcgctcatgacgtcgctactcgctgccccggcttgcaagggattgggttggctatcagaagatggatgatttgtcattattggagacctgcagtgatggtatctggtctggattatgcaatacctcgtgaatttatagtacttggttggcgtctcagttaacatgttttgtgctctgggattccagtttgtatgaaatttacataattcttcctgagatttattttggcccactagctgtcaaaaagactttggtcttgacgaccaggctgatcatgtacatctggaatgaataagcttgattaaaggcttttcacatttcacatattttgc

SEQ ID NO: 213132 - DNA, 1126 bp, Zea Mays
ctcgcgcgcggcaactgatctgagtaaccgccatgcccatgcatcactagctatccaccatcaccaacgccttccaccgccgcctcaggtccggtccggttctcttcgccgcggcggcggatggccctgccgctctacggctgcaggtcctgcgctgtgcatgatgccatcatcttctgccactgctgtgacgccaggctgtgcctgcactgcgacgccgccgtgcacggggctaccgaggcgggggcgctccacccgcgcgcccggctctgcgacgcgtgcggcgccgcgccggccgcgctgcgctgcgacggcaccgtgacgctgtgcgccgtgtgcgtcggccgcggtgctcccggcgtgacccgcacccgcgtggccacgtacaccggctgtccgggccctgctgagatggtgcgcctcatttccgtagacccaccgcagctggagcaggactttgaggcctggctcgcagacaagctcccgcgtttggtcgtggaggaggatgttgggctcccgccagactgggatgtcgccgtggaaactgcaaggcttgagaagatgctggcagaatgctgtgagcctgagactgaggaagctgaccagcagcgactgcagatgcagatgctgctgcaagatgcaagcgctatggccaagaagcgagaggggagagagagggccaaacaaagatatatcgagaagaggaagaatagaaggttctgcaagcagatcatgtatgcttctcgtaaggccagagcagacacgagatggcgagtgaaaggccgctttgccaagcaggcttccgctagcttctagtgatctccctgatctgctttcacagtcatttttgtgttgtcatctcgctcgcactttgctcaatccctcttcggcttcaacaacaaatttctcttgggtaatttattttccataattacatatattttccctgcttgtcagatgtaatatttttctttccttttattcaagaactaaatgcaattcaatacgtatgtggatcggactatatatcatcgataaacatgagttagtttccatgacactctgcacagctaaactaggcaggcttaacatgttaccggccatagcacaatggctatgtctcgga

SEQ ID NO: 213133 - DNA, 1141 bp, Zea Mays
ctcgcgcgcggcaactgatctgagtaaccgccatgcccatgcatcactagctatccaccatcaccaacgccttccaccgccgcctcaggtccggtccggttctcttcgccgcggcggcggatggccctgccgctctacggctgcaggtcctgcgctgtgcatgatgccatcatcttctgccactgctgtgacgccaggctgtgcctgcactgcgacgccgccgtgcacggggctaccgaggcgggggcgctccacccgcgcgcccggctctgcgacgcgtgcggcgccgcgccggccgcgctgcgctgcgacggcaccgtgacgctgtgcgccgtgtgcgtcggccgcggtgctcccggcgtgacccgcacccgcgtggccacgtacaccggctgtccgggccctgctgagatggtgcgcctcatttccgtagacccaccgcagctggagcaggactttgaggcctggctcgcagacaagctcccgcgtttggtcgtggaggaggatgttgggctcccgccagactgggatgtcgccgtggaaactgcaaggcttgagaagatgctggcagaatgctgtgagcctgagactgagataaatttgatgcaggaagctgaccagcagcgactgcagatgcagatgctgctgcaagatgcaagcgctatggccaagaagcgagaggggagagagagggccaaacaaagatatatcgagaagaggaagaatagaaggttctgcaagcagatcatgtatgcttctcgtaaggccagagcagacacgagatggcgagtgaaaggccgctttgccaagcaggcttccgctagcttctagtgatctccctgatctgctttcacagtcatttttgtgttgtcatctcgctcgcactttgctcaatccctcttcggcttcaacaacaaatttctcttgggtaatttattttccataattacatatattttccctgcttgtcagatgtaatatttttctttccttttattcaagaactaaatgcaattcaatacgtatgtggatcggactatatatcatcgataaacatgagttagtttccatgacactctgcacagctaaactaggcaggcttaacatgttaccggccatagcacaatggctatgtctcgga

SEQ ID NO: 213134 - DNA, 4870 bp, Zea Mays
agagtctctacccgtgatttccattctaaaaattatccttcctcccgtgcctacagtcctacacctcgacgatgccaaaaccctagcgcagcagcgcgaactacacctctccccgtcctgttcctcgtggcgcggtagccatggcggagccggccatcctcgacccctcccccttcgatctccgccactatccggcgcacctcttcgacccggacatccccctcgccgccgccgacttcccactcggtgaattcgccggagacgacggctgtgatggcctagacttcgacgtgcccgtagatttctctatcgacgacttcctcctccggtctcctgaccgcgggcacgacggcgacgactccggcgagggctctgctgccggatccggccccaccgcatcttccttggcctccccggccacctccggcactaactccgccgtggccaacgtcggcaaccgcaaggtgaagcacgaggactcggacgagggaaggagcggcgccaccccgaattggagcctcaagcggaagcaggtgagtcccggagaagcaacctcggatggggccaagtgccgccgatccggcgatggggatgtttcgccatctgcatcggcgtcgcgtgcagccacggaggactccgatgagaggggcgtgggcggcgaggaagaggacaagcgccggactgcgcgcctgatgcggaaccgtgagagcgcgcagctctctcggcagaggaagaagcggtacgtggaggagctggaagagaaggtgaaatcgatgcactcggtgataaatgacctcagttgtaagatctccttcatcgctgcggagaacgccacactgaggcagcaactcggtggtgtgggggtgagtggaccaccacctggggtgtatccaccgccaccgccaggcattcatttcccttgggtttctgggtatgcaatgcggcctcatggctcccatgttccacttgttccaatcccgcgattgaagccgcagcatgcagcagctgcagtgaaggtatccaagaaaccagatgtcaagaagtctgtggagagcaagagtaagaccaagaccaagaccaagaccaagaaggtggcaagtattagccttcttggtttgctgtttgttgcatttgtctttggcgcttttgttccggggttcaatcatagtctcggactgagaggaaggagcgacaatgtgatgtttggaaattttggccagtctgatgctagggtgtttagtgtcactaaccatggtaaaggacctaaaggcagtttcaacagtagtgacatgatcagtactgatcatgacatgatgactgggcatgatgatggagcggggcagaaacaccgagctgcaaataactctagtgagatcttgcctgctttgttgtatgtgccgaggaatggaaaacatgttatgatcaatggcaatttgattattcattctgtgatggctagtgagaaagcagtggcacataagggctcaaatagtcagtcagttaaagatcacaaggagaccagtgttgctatagctcgctatctgtcaccacctggaaaggatatgaattcaaaagagatgttcccgccagatgcaccactgccacaatggttccgtgaaggaatggaaggacctgttttgaactcgggaatgtgcagtgaggtatttcagtttgatatttctccagcttcggccaaatctggtggcattatacctgcttcggccaaatctgcctcaagtgtcaatgctacccagaaaattctgaaaccttctcctgcttataggggcaagctgaaaaacaggaggatcatgtataacgaggcaattccacttactggaaaaacagcgaacaacacaaagcctcaggcttttaacagtactgctgaaagcagcaaggtacctgatactgatagcaagcctgcatcatcagttatcgtctctgtgctagctgatcccagggaggctggcaatggggatggtgatccaagagtatcaccaaaacccctctccaggatatttgtcgtcgttctgctcgatggtgtcagatacgtgacttactcgtgcacacttcctttcaagagtgccagcccacaccttgtgaactaaccttggggccggtgcagctttctggtccatgagcggctaaatagttggggttttctgatgcattggaggtagatgaatgaatacagtaatgtggtgttgcttgctaacaatgaaaacagacttcaagactcgcactcggcctgaggtaatttgagtttgtcgaaggtttgtagtgtggactggcgaaatgttgtgcaagttcaaccttaacccatgagggccgcgcaagcgctctggcttcttccagtccagtccaccatccgcgccatggcgatggcgttcgcggctgcctccgcctggagcctcagtcttacagccttctccctcccgctgccccagtctctgcgcccgaaacctagccaactcctccatggcgcgaccagctcgttcccgcggccacgccgatgcgggtggggcgccgtggtgcgctgcgcgaagcgcacggggaagcagcggtacccgtcggagaagaagcggttgaacaggcgaaaacaggagttgctacgccaggccgccccggaggaggggagcaaggggcgggagtccgggtactggcggctctcgaagctcgctgttcccgcccgcgacgacccaggcaaggacttcaccggcatctccctgccgctactccaggccatcgccaaagccatcaagttcccggttccttctatgctccctgacgaggctttcactgtcatccgcaagtcatttgacgcacgaaaggttttgaaagaacctcaattcacttatattgttgatatggatgttaagaagattcttaatattgagccaagggcatgggattttattgctcggttggagcccaaacttggagttgtggaatacatgaccgaagagaagttagcagttgatctggtcagcatgctaaatgttagtagcaaaggttccaataatgtactaggaattagagacactcatagtggcatgatttatcgtcaacaaaagaagcccagagtggcagttataggaagtggaccatctggcttgtttgcttcccttgtgctaggtgaacttggtgcagaagttaccttattggagcgtggtcagcctgttgaacagagaggtcgtgacattggtgcactagcagttagacgaattctacaaccagagagcaacttttgctttggcgagggtggtgcaggtacgtggagtgatgggaagctgatgaccaggataggaaaaaacactgatggtgttcaggctgttatgaaaacatttgttcactttggagcccctccaaacattttagttgatgggaaaccacacttgggtactgataaacttgttccactgctgcgaaaattcaggcatcacttaagagagttgggtgttaccataagatttaatgctagagtagatgaccttatagtagaagatgggcaggtaaaaggaattgtggtctctgatgtggaactacagccaggtcctgccagccagaaactagcatttgacgcagttgtaatggcagttggtcattcagctcgtgacacatacagtatgctttggcagcataatgtagacatgagcccaaaaagttttgctgttggcttaagaattgagcatccccaagaattgataaacagtatccaactgaagtacaaagaggacgtggacggattcctgtggcagattacaaaatagtgaagtctgttggtgaaagagacgcagagaatgaacttgacatagctgagccaactcgcagttgctactcgttttgtatgtgccctggtggacaggttgttctaaccagcacaaacccatcagaattgtgcatcaatggcatgtcgttctcacggcgtgcatcaaagtgggcaaactcagctcttgtagtcactgtatcatcccatgatttcaagccatttcaatcccatggtcctcttgctggcgttgaattccagagacaatttgaaagaagagcagctatgatgggtggagggaatttcgttgttcctgcacagtgtgtcaccgattttatcagcaacagactgtcagttacaacactgccaccatcaagctatagattaggagttcgtccatctaatcttcatgagctattccctccttacataactgaagctttacaagagtcactaataatgattgatagagagatgccaggctttgtttctagcaaggccctacttcatggtgtggagaccaggacaagttctcccttacaaatttcacgacatggagaaacatacgaaagtacatcactgcgaggattatatccaactggggaaggtgctggctatgctgggggcatcttaagtgctgctgtggatggtatgtattgtggttttgctttagctaaacaactttctttattccatggcgatatagagccatttctaggcaaaacacaaaaacaaacaggttttataaagtattgaatggactagtgcttggtattttgttgttccaattttttgggggaaaagatcgatgtcattatagctttaaccataggatatttttgtcatgtttagagcagctgtgattgccttactaaattcatcagctaatttgtgcacggttgatgtagaagggtagagcaaggcattgatgttgtaggagaggttctggtataggtatagctatgtaacaaataatttataacttcctatgtgatgccaccttaattttgtcaagataattcaccaagcataataccatatattctcttgtgtgatggattgatgaacattaatgtgaagaagattacaagctcaagtattaactga

SEQ ID NO: 213135 - DNA, 2080 bp, Zea Mays
cttcaaccccctgtccgccctctgcttccactcccacgtcgttatccggaagagcaacggtactcttctttcccgtcccctccacgtctcgtctcctccctcgctgcggtgcgggatacgggctagattcagtcagcgctcatgatccggaggatcgagggcaacaaccagcgcggagcggcacaagcctcacgtgtccgggatctcttctccgcccagtaggcttccttgccttcgggcggtttccaggttggtagcatgtgagagtgatggcggccgccgaagcgagggctgcctggcagcgcgccgccaaccgctgcatggtccaggaggacgccaagcgagctccccatctggtctgctgctcgccgcccctacaaccgcacgacacgagcgatggaaatcctctgagcccgcaagatctccatgtccctacatttgtgcccatcaactggaacctgatgaactccagcctgcccatggagacccagtggtggctccagttgcagcccaactttgggtgccaggcagccttagctagggagcgcctcaactatgtaggtgcggaagccgctgagaagaaaacggagggtctagcgccagtacctaaacttgaggatgtccaagcaaacaaggccgcagatccttttgagcctccatggaccatttccgcggctgtcatgaagcaaacatctggaacgggtttggaagagttgaagaatctcgcttgctataccccagtgagcctcgactgcaaaggtagtgccaacagatgtgtttccgaggataacaagtttacagatttcaaagctttcgatcctctcttccctaagccacaaaaggaatactgcgaaatgcatgccccctggaaagaaaccagaaaatctcagccatggtggcaactagctgatgccgatggtttggcttcccttgtcgctgaaagagcaatggaaaacattgtcgacaatgatctgccaaggcccactcagacagtccgggttcatgggggtgaagtgaaggtccctgaaaacaaggatgattatgggctgtctgctctttgtgcggacaaagagctggatcctgcacatgacactatggagtgcagctacagtgtttcaagcaccaccaacaacgacacgaactcttctgatggggggcattggcaacaacatcaaagaaataaagagcccggggaggcacatgattcttatagttccaccgccaatacaccgggcggcaagccagcatatcagaatgcttccgagagggccaagctgttagatgctctccgccactcacaaacacgtgctagggaagctgagatagctgccaagaaagcctacgacgagaaagaccatgtcatcaagctattgttccgtcaggcctcgcacctttttgcatgcaagcagtggttgaaaatgttgcagctggaaaacatatgccttcagctcaggttcagagagcaccagatagcgaccatgttcccagagcttccatggatggtgacgaaagaaaaggtagcaccttctcaagagcacagtgacaggaagaaaggcagaaggctgaacaggaaaggtggcctacgcgatgccgttgcatttgctgttggtgttggtattgttggtgctggattgcttcttggctggactcttgggtggctactgccctaactggaagtttcattgtcgtagatgacaggacagatgccacctgtgcacgctgaattgaatggcaataggaaggatctggtgtacatacttccagaaactggatataccttatgttggatgcgatccttagctgtgtgctgtacatatgggccagtgagggtctggtggaagatgaaatcagccgacttcaacaacgtatgcgctagtactgtaaatctatagattttatttgctttaatgtagcaggaattgtgataatccgtttgctgtaatgtgtgctagacttactagtttaaaataagttagattatataatctagacagattataattccaaacaaacagacccttatatgcatatgcatagcttgttttagacagattataatcccaaacaaacagatccttat

SEQ ID NO: 213136 - DNA, 1813 bp, Zea Mays
cttcaaccccctgtccgccctctgcttccactcccacgtcgttatccggaagagcaacggtactcttctttcccgtcccctccacgtctcgtctcctccctcgctgcggtgcgggatacgggctagattcagtcagcgcagccttagctagggagcgcctcaactatgtaggtgcggaagccgctgagaagaaaacggagggtctagcgccagtacctaaacttgaggatgtccaagcaaacaaggccgcagatccttttgagcctccatggaccatttccgcggctgtcatgaagcaaacatctggaacgggtttggaagagttgaagaatctcgcttgctataccccagtgagcctcgactgcaaaggtagtgccaacagatgtgtttccgaggataacaagtttacagatttcaaagctttcgatcctctcttccctaagccacaaaaggaatactgcgaaatgcatgccccctggaaagaaaccagaaaatctcagccatggtggcaactagctgatgccgatggtttggcttcccttgtcgctgaaagagcaatggaaaacattgtcgacaatgatctgccaaggcccactcagacagtccgggttcatgggggtgaagtgaaggtccctgaaaacaaggatgattatgggctgtctgctctttgtgcggacaaagagctggatcctgcacatgacactatggagtgcagctacagtgtttcaagcaccaccaacaacgacacgaactcttctgatggggggcattggcaacaacatcaaagaaataaagagcccggggaggcacatgattcttatagttccaccgccaatacaccgggcggcaagccagcatatcagaatgcttccgagagggccaagctgttagatgctctccgccactcacaaacacgtgctagggaagctgagatagctgccaagaaagcctacgacgagaaagaccatgtcatcaagctattgttccgtcaggcctcgcacctttttgcatgcaagcagtggttgaaaatgttgcagctggaaaacatatgccttcagctcaggttcagagagcaccagatagcgaccatgttcccagagcttccatggatggtgacgaaagaaaaggtagcaccttctcaagagcacagtgacaggaagaaaggcagaaggctgaacaggaaaggtggcctacgcgatgccgttgcatttgctgttggtgttggtattgttggtgctggattgcttcttggctggactcttgggtggctactgccctaactggaagtttcattgtcgtagatgacaggacagatgccacctgtgcacgctgaattgaatggcaataggtaagctccaagtgcgtgctttcgtgaagagtgaaaaaggggcagatttttagagttcttccatggtagtctgttgatatggtgatgatagcttgatctcttatgttggttccgtatacataggaaggatctggtgtacatacttccagaaactggatataccttatgttggatgcgatccttagctgtgtgctgtacatatgggccagtgagggtctggtggaagatgaaatcagccgacttcaacaacgtatgcgctagtactgtaaatctatagattttatttgctttaatgtagcaggaattgtgataatccgtttgctgtaatgtgtgctagacttactagtttaaaataagttagattatataatctagacagattataattccaaacaaacagacccttatatgcatatgcatagcttgttttagacagattataatcccaaacaaacagatccttat

SEQ ID NO: 213137 - DNA, 2080 bp, Zea Mays; identical to SEQ ID NO: 213135

SEQ ID NO: 213138 - DNA, 1984 bp, Zea Mays
cgactgtagtgttgggtatctaacctcctggttggtagcatgtgagagtgatggcggccgccgaagcgagggctgcctggcagcgcgccgccaaccgctgcatggtccaggaggacgccaagcgagctccccatctggtctgctgctcgccgcccctacaaccgcacgacacgagcgatggaaatcctctgagcccgcaagatctccatgtccctacatttgtgcccatcaactggaacctgatgaactccagcctgcccatggagacccagtggtggctccagttgcagcccaactttgggtgccaggcagccttagctagggagcgcctcaactatgtaggtgcggaagccgctgagaagaaaacggagggtctagcgccagtacctaaacttgaggatgtccaagcaaacaaggccgcagatccttttgagcctccatggaccatttccgcggctgtcatgaagcaaacatctggaacgggtttggaagagttgaagaatctcgcttgctataccccagtgagcctcgactgcaaaggtagtgccaacagatgtgtttccgaggataacaagtttacagatttcaaagctttcgatcctctcttccctaagccacaaaaggaatactgcgaaatgcatgccccctggaaagaaaccagaaaatctcagccatggtggcaactagctgatgccgatggtttggcttcccttgtcgctgaaagagcaatggaaaacattgtcgacaatgatctgccaaggcccactcagacagtccgggttcatgggggtgaagtgaaggtccctgaaaacaaggatgattatgggctgtctgctctttgtgcggacaaagagctggatcctgcacatgacactatggagtgcagctacagtgtttcaagcaccaccaacaacgacacgaactcttctgatggggggcattggcaacaacatcaaagaaataaagagcccggggaggcacatgattcttatagttccaccgccaatacaccgggcggcaagccagcatatcagaatgcttccgagagggccaagctgttagatgctctccgccactcacaaacacgtgctagggaagctgagatagctgccaagaaagcctacgacgagaaagaccatgtcatcaagctattgttccgtcaggcctcgcacctttttgcatgcaagcagtggttgaaaatgttgcagctggaaaacatatgccttcagctcaggttcagagagcaccagatagcgaccatgttcccagagcttccatggatggtgacgaaagaaaaggtagcaccttctcaagagcacagtgacaggaagaaaggcagaaggctgaacaggaaaggtggcctacgcgatgccgttgcatttgctgttggtgttggtattgttggtgctggattgcttcttggctggactcttgggtggctactgccctaactggaagtttcattgtcgtagatgacaggacagatgccacctgtgcacgctgaattgaatggcaataggtaagctccaagtgcgtgctttcgtgaagagtgaaaaaggggcagatttttagagttcttccatggtagtctgttgatatggtgatgatagcttgatctcttatgttggttccgtatacataggaaggatctggtgtacatacttccagaaactggatataccttatgttggatgcgatccttagctgtgtgctgtacatatgggccagtgagggtctggtggaagatgaaatcagccgacttcaacaacgtatgcgctagtactgtaaatctatagattttatttgctttaatgtagcaggaattgtgataatccgtttgctgtaatgtgtgctagacttactagtttaaaataagttagattatataatctagacagattataattccaaacaaacagacccttatatgcatatgcatagcttgttttagacagattataatcccaaacaaacagatccttat

SEQ ID NO: 213139 - DNA, 2017 bp, Zea Mays
accatctatactccttcaatgctaagcaatcattgactgatatagtgatagctccagccaacagttggtagcatgtgagagtgatggcggccgccgaagcgagggctgcctggcagcgcgccgccaaccgctgcatggtccaggaggacgccaagcgagctccccatctggtctgctgctcgccgcccctacaaccgcacgacacgagcgatggaaatcctctgagcccgcaagatctccatgtccctacatttgtgcccatcaactggaacctgatgaactccagcctgcccatggagacccagtggtggctccagttgcagcccaactttgggtgccaggcagccttagctagggagcgcctcaactatgtaggtgcggaagccgctgagaagaaaacggagggtctagcgccagtacctaaacttgaggatgtccaagcaaacaaggccgcagatccttttgagcctccatggaccatttccgcggctgtcatgaagcaaacatctggaacgggtttggaagagttgaagaatctcgcttgctataccccagtgagcctcgactgcaaaggtagtgccaacagatgtgtttccgaggataacaagtttacagatttcaaagctttcgatcctctcttccctaagccacaaaaggaatactgcgaaatgcatgccccctggaaagaaaccagaaaatctcagccatggtggcaactagctgatgccgatggtttggcttcccttgtcgctgaaagagcaatggaaaacattgtcgacaatgatctgccaaggcccactcagacagtccgggttcatgggggtgaagtgaaggtccctgaaaacaaggatgattatgggctgtctgctctttgtgcggacaaagagctggatcctgcacatgacactatggagtgcagctacagtgtttcaagcaccaccaacaacgacacgaactcttctgatggggggcattggcaacaacatcaaagaaataaagagcccggggaggcacatgattcttatagttccaccgccaatacaccgggcggcaagccagcatatcagaatgcttccgagagggccaagctgttagatgctctccgccactcacaaacacgtgctagggaagctgagatagctgccaagaaagcctacgacgagaaagaccatgtcatcaagctattgttccgtcaggcctcgcacctttttgcatgcaagcagtggttgaaaatgttgcagctggaaaacatatgccttcagctcaggttcagagagcaccagatagcgaccatgttcccagagcttccatggatggtgacgaaagaaaaggtagcaccttctcaagagcacagtgacaggaagaaaggcagaaggctgaacaggaaaggtggcctacgcgatgccgttgcatttgctgttggtgttggtattgttggtgctggattgcttcttggctggactcttgggtggctactgccctaactggaagtttcattgtcgtagatgacaggacagatgccacctgtgcacgctgaattgaatggcaataggtaagctccaagtgcgtgctttcgtgaagagtgaaaaaggggcagatttttagagttcttccatggtagtctgttgatatggtgatgatagcttgatctcttatgttggttccgtatacataggaaggatctggtgtacatacttccagaaactggatataccttatgttggatgcgatccttagctgtgtgctgtacatatgggccagtgagggtctggtggaagatgaaatcagccgacttcaacaacgtatgcgctagtactgtaaatctatagattttatttgctttaatgtagcaggaattgtgataatccgtttgctgtaatgtgtgctagacttactagtttaaaataagttagattatataatctagacagattataattccaaacaaacagacccttatatgcatatgcatagcttgttttagacagattataatcccaaacaaacagatccttat

SEQ ID NO: 213140 - DNA, 4448 bp, Zea Mays
cgtccatagaagtgctagaacgccagaacccgccgccggcgaacccgaagactgcgcccagctatggacgcgccgggagagctgcagtgcgtgggcaggctcgaggtcgccgcgccgccgccggcgcgctaccttcgcgttggctccctccccgtccccaccgactcctctgcctctctcccagtcctcctgccttctccgtccccgattggtgctccaaggtatcaaatgctgccattagagactgatctgaacacactccctatgattccaaacatcccagagaaggttttttcaagtgatgctaagagtactgaaggattacggtatgacagtggtcatatcaaccagaacttatcaaggaagtgtgaagcattagctgtgtcaggtttggcagaatatggtgatgaaatagatgtgattgccccagctgatatcatgaagcagattttcaaaattccatactccaaggcacaagtatctattgctgtaaaccgtataggagatacactcattctaaacacagggcctgatgttgatgaaggtgaaaagatattcagaagacaaggtaaccagcctaaaggatctgatccatcaatatttctgaacttcgcaatgcactctgtgcgagcagaagcttgtgattgtcccccaagtcatcaaccttcacagaagaagcaaacagcatctgcagtattgcgtggatcttttggctgtgacgagggttcttttgattcatccccatcatctagttttagcacatcaccttatctggatcagaatgacagtaaaagtagaaaagcttctcatagtactcatgaaagcctgtacctgggagcaatggaaaacaatcgaaaagtcaaagggtctgatcctattaaaaaaacgactcgtgttggtgaaaaaaacagctgtgaggtgcaagaatctgagaagagcaagagagtgggaaataatggatttcggaaggtttgcttttggcaattccacaatttccatgtgcttttgggtagtgacttgcttatatttagcaacgagaaatatattgcagtcagtttgcacctatgggatgtttctagacaggttactccattgaactggctcgaagcttggcttgacaatgtaatggcaagtgttccagaattggccatatgttaccatcagaatggtgttgttcaaggttatgagcttttaaagaatgatgatatatttctccttaagggtgtctcggatgatggcacacctgcatttcatccacaggttgtccagcaaaatggccttgctgtcctgaggttcattcaggataactgtaagcaagaccctggtgcatattggctgtacaaaggcgctgaagaagatgtcatacagttatatgatctgtctatcttacctgaaaaacatacagctggtgatcatagatctccatgcggtcctatgtcatcttttatagacaagggaagaaaggagtcattgttctctttgggtacactcctttatcgtgttgctcacaggatgtccttgtcaaaggtgcctagtaatagagcaaaatgtgcaaaattcttcagaaaatgttttgattttcttagtgagcaggatcacctggttgtccgggcatgtgctcatgaacaatttgcaagactcatccttaaatgttatgaggatctggaactgacttctgaatcatttatgattgaatctgaagtcacccttactgatttggatgacgattctccagaattgagacttgagaatttaccagcaaaacaaaatgtactgccagaacttggcaagaatgagccagcagtgttagatgaagtgttggaatgcacaacatcagtgtcttctggtatgacaagcagcttagtggaaccaagccaagttgatggtggttcttcatcttcagttacaaaagaagatgtttctctggacagcttggtgatgtgtcaggctggtatatcaaaaacaattgctgatgcaatctcctctaagttggctgccatacaccacgtatctcaagctatcaaatcccttagatggaatcgacagctgcagaataatactcagcatggttgcggggacagtgcagataccatttgggagaggtcagtcgacttctctttatgccgatgtggtgatgttgattgtattgaggtctgtgatatcagggagtggctgccaaaatcaaaaatggaccataagctgtggaagcttgttcttttgctaggagaatcttatttggcacttggagaggcatacaagaatgatgggcagcttcagcgcacccttaaagttgttgaattagcttgtttggtatatgggtctatgcctggacatattgatggcgacgagttcatctcatccatgtccaacagttcattgagtcgagaagatcttgccctaaaaactaaacttgtactggacgaggcagactattgcaataacaaaagatgcttcagttatgaagtttcttcccaccaattgccaccaaattatttgttctgggcaaaggcatggatgcttgttggtgatgtctatgcagaatatcacagattgaatagtcatcaagcaaagttggcaccagaacagaagtctcatggcgaagttagaatgtcaaatgaagttgcattggaggtcaaacgccttaagagaaaactgggaaaggataagcagaattgtgacacatgctctttgataaactgtagctgccaaagtgacagggcaagtagtggcagcagtgctagcagcagtagttctgaggcctctaaactttacagccgaaagaaaaacaaaaaatcacttggtaagaaccttcaacttcaatcacaatatagagaagccagcaagaaccccaatgcacaagaagctacacaaggttctgaaagtaaacagcatgatgtgaatgatacttgtattgagaacaactcagtattaaatgatgatattggtcactacagtcaggccagggaaaatcagtcaagaaatgttgatggtgttcctgataaatctcaagcaagtgttcctactgtgagggatggtggtatcttcaagttccttggtggtccaaaaccaggagatgttgagtacaacttgtcttctgctattcactgctatggtgcagccaagggagcattgttcgcatttcctgtgcattcagtagaaacttccatggttcttaagaaaagaggctggggatttaatgaactgggccgttgtagacttgagaatagaaatctggttagcgccgagattgcttttgcggatgctattaaagcatttgaagaggtgtttgaccacacaaatgttatactgatcaactgtaacttaggtcatggtaggagagctttagcagaggaatgtgtatccaggattgatgaatttcagaaacataatcttcctgaaggcacatatatgcaatcctttaagtcggccaagtcagaatattttcaagcaataaactactattccgcagctaagaggcaactgaagtatgtcaatactgaggccgataaagtactataccatgaggtttacacacagtatgcccatacctacctgaggcttggaatgcttttggcaagggaaagcttcttaactgacagttatgaaggtggacttgtcaatgagtcatctaacagaacagctgtagagattttagcgagtgatgcttttcgggaggctttgtctacgtatgaatcccttggtgaacatcgcaaacaggaagctgcttttggtcattttcagcttgcttgttatcagagggatctgtgcttaaggtttctggatttagttgacaaggaggttaaacagaaaaacgaggataaatatcgtcagaaaaatgcttgacaccgctctgactcacttgttggaaggccggcatgtggttgaagcaaatgaagacaactccaacgatatggatctggacataaaaccgaagttctggtgccagctgcagagcctgctgaagaggatgctggcgggatccctgcctagcagcacgggcagagcagcctctgtcagccaagccagcactagcagcagaacagaaacttctaagctgaaagagatgtatcgtttgtcgctcaaatcttctaccctgggccagctgcatgcgttgtacaagctttgggtatcttaacacctttattttacaaatggttgctgctcatgttttatatcgtcggcatctatctcttgaattacagagtttttatttggtgttcacggcacgttttttttgttttgatttccagccaacttttaaaactaaatattaagtgtaaccatggaatgtcatggacgggacacactagctactacagtctacaactgttttgtagacttatataaacagcaaataatggcatcctatgtgaagacagtgtattatatgtattgtatcatagagagccaatgccaaaatatctgaatgtatgtgccctgcttcaccg

SEQ ID NO: 213141 - DNA, 4563 bp, Zea Mays
cgtccatagaagtgctagaacgccagaacccgccgccggcgaacccgaagactgcgcccagctatggacgcgccgggagagctgcagtgcgtgggcaggctcgaggtcgccgcgccgccgccggcgcgctaccttcgcgttggctccctccccgtccccaccgactcctctgcctctctcccagtcctcctgccttctccgtccccgattggtgctccaaggtatcaaatgctgccattagagactgatctgaacacactccctatgattccaaacatcccagagaaggttttttcaagtgatgctaagagtactgaaggattacggtatgacagtggtcatatcaaccagaacttatcaaggaagtgtgaagcattagctgtgtcaggtttggcagaatatggtgatgaaatagatgtgattgccccagctgatatcatgaagcagattttcaaaattccatactccaaggcacaagtatctattgctgtaaaccgtataggagatacactcattctaaacacagggcctgatgttgatgaaggtgaaaagatattcagaagacaaggtaaccagcctaaaggatctgatccatcaatatttctgaacttcgcaatgcactctgtgcgagcagaagcttgtgattgtcccccaagtcatcaaccttcacagaagaagcaaacagcatctgcagtattgcgtggatcttttggctgtgacgagggttcttttgattcatccccatcatctagttttagcacatcaccttatctggatcagaatgacagtaaaagtagaaaagcttctcatagtactcatgaaagcctgtacctgggagcaatggaaaacaatcgaaaagtcaaagggtctgatcctattaaaaaaacgactcgtgttggtgaaaaaaacagctgtgaggtgcaagaatctgagaagagcaagagagtgggaaataatggatttcggaaggtttgcttttggcaattccacaatttccatgtgcttttgggtagtgacttgcttatatttagcaacgagaaatatattgcagtcagtttgcacctatgggatgtttctagacaggttactccattgaactggctcgaagcttggcttgacaatgtaatggcaagtgttccagaattggccatatgttaccatcagaatggtgttgttcaaggttatgagcttttaaagaatgatgatatatttctccttaagggtgtctcggatgatggcacacctgcatttcatccacaggttgtccagcaaaatggccttgctgtcctgaggttcattcaggataactgtaagcaagaccctggtgcatattggctgtacaaaggcgctgaagaagatgtcatacagttatatgatctgtctatcttacctgaaaaacatacagctggtgatcatagatctccatgcggtcctatgtcatcttttatagacaagggaagaaaggagtcattgttctctttgggtacactcctttatcgtgttgctcacaggatgtccttgtcaaaggtgcctagtaatagagcaaaatgtgcaaaattcttcagaaaatgttttgattttcttagtgagcaggatcacctggttgtccgggcatgtgctcatgaacaatttgcaagactcatccttaaatgttatgaggatctggaactgacttctgaatcatttatgattgaatctgaagtcacccttactgatttggatgacgattctccagaattgagacttgagaatttaccagcaaaacaaaatgtactgccagaacttggcaagaatgagccagcagtgttagatgaagtgttggaatgcacaacatcagtgtcttctggtatgacaagcagcttagtggaaccaagccaagttgatggtggttcttcatcttcagttacaaaagaagatgtttctctggacagcttggtgatgtgtcaggctggtatatcaaaaacaattgctgatgcaatctcctctaagttggctgccatacaccacgtatctcaagctatcaaatcccttagatggaatcgacagctgcagaataatactcagcatggttgcggggacagtgcagataccatttgggagaggtcagtcgacttctctttatgccgatgtggtgatgttgattgtattgaggtctgtgatatcagggagtggctgccaaaatcaaaaatggaccataagctgtggaagcttgttcttttgctaggagaatcttatttggcacttggagaggcatacaagaatgatgggcagcttcagcgcacccttaaagttgttgaattagcttgtttggtatatgggtctatgcctggacatattgatggcgacgagttcatctcatccatgtccaacagttcattgagtcgagaagatcttgccctaaaaactaaacttgtactggacgaggcagactattgcaataacaaaagatgcttcagttatgaagtttcttcccaccaattgccaccaaattatttgttctgggcaaaggcatggatgcttgttggtgatgtctatgcagaatatcacagattgaatagtcatcaagcaaagttggcaccagaacagaagtctcatggcgaagttagaatgtcaaatgaagttgcattggaggtcaaacgccttaagagaaaactgggaaaggataagcagaattgtgacacatgctctttgataaactgtagctgccaaagtgacagggcaagtagtggcagcagtgctagcagcagtagttctgaggcctctaaactttacagccgaaagaaaaacaaaaaatcacttggtaagaaccttcaacttcaatcacaatatagagaagccagcaagaaccccaatgcacaagaagctacacaaggttctgaaagtaaacagcatgatgtgaatgatacttgtattgagaacaactcagtattaaatgatgatattggtcactacagtcaggccagggaaaatcagtcaagaaatgttgatggtgttcctgataaatctcaagcaagtgttcctactgtgagggatggtggtatcttcaagttccttggtggtccaaaaccaggagatgttgagtacaacttgtcttctgctattcactgctatggtgcagccaagggagcattgttcgcatttcctgtgcattcagtagaaacttccatggttcttaagaaaagaggctggggatttaatgaactgggccgttgtagacttgagaatagaaatctggttagcgccgagattgcttttgcggatgctattaaagcatttgaagaggtgtttgaccacacaaatgttatactgatcaactgtaacttaggtcatggtaggagagctttagcagaggaatgtgtatccaggattgatgaatttcagaaacataatcttcctgaaggcacatatatgcaatcctttaagtcggccaagtcagaatattttcaagcaataaactactattccgcagctaagaggcaactgaagtatgtcaatactgaggccgataaagtactataccatgaggtttacacacagtatgcccatacctacctgaggcttggaatgcttttggcaagggaaagcttcttaactgacagttatgaaggtggacttgtcaatgagtcatctaacagaacagctgtagagattttagcgagtgatgcttttcgggaggctttgtctacgtatgaatcccttggtgaacatcgcaaacaggaagctgcttttggtcattttcagcttgcttgttatcagagggatctgtgcttaaggtttctggatttagttgacaaggaggttaaacagaaaaacgaggataaatatcgtcagaaaagtaagtggtatggttcactagctgagaagaactggcagaaggctttagaattttatgggccgaagacacatcctactatgtttcttaacatccttatggcgcagtctgccctttctattaatatttctaattccttccactcaaccgcggccggcatgtggttgaagcaaatgaagacaactccaacgatatggatctggacataaaaccgaagttctggtgccagctgcagagcctgctgaagaggatgctggcgggatccctgcctagcagcacgggcagagcagcctctgtcagccaagccagcactagcagcagaacagaaacttctaagctgaaagagatgtatcgtttgtcgctcaaatcttctaccctgggccagctgcatgcgttgtacaagctttgggtatcttaacacctttattttacaaatggttgctgctcatgttttatatcgtcggcatctatctcttgaattacagagtttttatttggtgttcacggcacgttttttttgttttgatttccagccaacttttaaaactaaatattaagtgtaaccatggaatgtcatggacgggacacactagctactacagtctacaactgttttgtagacttatataaacagcaaataatggcatcctatgtgaagacagtgtattatatgtattgtatcatagagagccaatgccaaaatatctgaatgtatgtgccctgcttcaccg

SEQ ID NO: 213142 - DNA, 2392 bp, Zea Mays
ctcggtcatggccaccacccaagcacccgcgctatagaattctcaggtcgcttccttcgtctcgtcctacggctccacatcccccatcgccctcatcctctccggggggacggacgccgctgcccctccgccgccccgtcgccatgggcaactgctgcccgggctccggggatgcggagcccgccccggctgcctccgccgacccttcctcccgcctccactccggcggcacgtccctcaaggccggcgcctcggtcagctcggcccccacgcccaccaagccgcccgcgcccatcggcccggtcctgggacggcccatggaggacgtgcgcagcatctacaccgtgggcaaggagctcggacgtggccagttcggcgtcaccagcctgtgcacgcacaaggccaccggggagcgcttcgcgtgcaagaccatcgccaagcggaagctgtccaccaaggaagacgtagaggacgtgcggcgcgaggtgcagatcatgtaccacctggccgggcagcccaacatcgtggagctcaagggcgcctacgaggacaagcagtcggtgcacctcgtcatggagctctgcgccggcggggagctcttcgaccgcatcatcgccaagggcaagtacacggagcgcgccgccgcgtccctgctccgcaccatcgtggagatcgtgcacacctgccactccatgggcgtcatccaccgcgacctcaagcccgagaacttcctcctcctcagcaaggacgataacgcgccgctcaaggccaccgacttcggcctgtccgtcttcttcaagcagggggaggtgttcaaggacatcgtcggcagcgcctactacatcgctccggaggtgctgaagaggaactacggccccgaggcggacatctggagcatcggcgtcatcgtctacatcctcctctgcggagttccgcccttctgggccgaatccgagcacggcatcttcaactccatcctcaggggacaggtggacttcacaagcgacccgtggccgcgcatttctccgagcgcgaaggacctcgtcaggaagatgctcacctctgaccccaagaagaggatctctgcctacgacgtcctcaaccatccttggatcaaggaagatggcgaagcgcctgacacgccactggacaacgctgtcatgaacaggctgaagcagttcaaggcgatgaaccagttcaagaaagccgcgctgagggtcatcgccgggtgcctgtcggaggaggagatcaggggtctgaaggagatgttcaagagcatggacgccgacaacagcggcaccatcaccgtggacgagctgcggcgagggctggccaagcagggcaccaagctcagcgaggcggaagtggagcagctgatggcggccgcggacgcggacgggaacggcacgatcgactacgaggagttcatcaccgcgacgatgcacatgaacaggatggacagggaggagcacctgtacaccgcgttccagtacttcgacaaggacggcagcgggtgcatttccaaggaggagctggagcaggcgctcaaggagaaggggctcctggacggcagggacatcaaggacatcatctcggaggtggacgccgacaacgacgggaggatcgactacagcgagttcgtggcgatgatgaggaaagggacggccgagcagaaccccaagaagcggcgcgacgtcgtgttgtagcctgtacgtaggaacagagcagtgagagagctagctgctgaccgacccatgagcatgagtggccaaacaggcggtggttcgtgtatatatctaatggtaatggatcggcgtcgagcggctgatgccattgccacggccgagagagcaaggcactggcagccagaccccaagcatgcacggtgagctgggtggagcctggactggaggagccagggaccctttgacaatgtaaagtaaactatgggatgatgaaaggatgcacgcgctcgcaccgtacgttattgacaacgacctctcgacgtgcaatggccatggactgtgtatatacatgcataccttcagatgtgtaacttgagggaatagcagaaatctagatctaatatgtgttcagtaaaggggcacgtttgatacacacagagagaagtaactcactagacatctgcacattagcacatatatatacatggaaaaggattagattcagccaacacaatcaagctgttctctacaaacatgtagcttctctagctatgcaagccgagagagagagagaaatcgtgtcaaagtgacaaggtgaaagaacatctctgtcaaggtgttgttttagcataaaaactagtaagttggtcggtgtaaataatacgaatgtctagtttctttattctctcaaaggtacttttttccaa

SEQ ID NO: 213143 - DNA, 1960 bp, Zea Mays
cgctacgcaatgcttccagacccctccggacttcggccgctagcgccctcttcgttgcgcgatggagctccgaggctccaccccccaccaatgatgcgtccagacgcctagatgagcaccatccccttcccctccacccatcctcagaagatgtcatgctgacggcttcgacgtggtctccagtagatccgagcggagcgccttcccgtctacccctcaaacattgtcgcagtgcctgggccgtcgcgaggagcccccaaacacaatctcctccttagacgtcgccggtctcctcgctccctcctcaaacgtcgtcgtgctaccgacactgtctgtggcggctccaaccggagcaccatcccacctcctccgtcaaacgacgctgcggtgtttgggccaccgtcgggagtctgaatctgccccctcagacatcgccacctcgaaacgcacaggttggcgcggtagggggcactggtggttcggcgcggtcacctggcgaacgacgacgaagaggaggaggtggccgagtctatcatgaagagacgctgtgaagagcagtcgccatggccgatggatcagttgccggttgcattcatcgaagatttggccctctccaccaccatgtcgctaccccatacccgtcttccctgcatatctgaatgatgcaccttcaatccaccgctgcccaaagagcgaatggggaaggaccgacctgagcattctgtccggtagctgggtagcaagaagcaccagcccttccccctcccaaggacacaactgctgagattgctaaaaaaccagagcaaggaaaaagcttctttgggaccctctagctattcagcccagcaccctcttcgtgagcatttcctcagcacactcgaatgacaaagaaattagtaatcaatatgcagtattacttcagaaccatagtccatgtttgctttcatactgagctttcatagtgagcgcggtccagcacttaattaaatctatcaaatcttacgattttactactgatacggacatcatattgctaccatacttcatcccgagctcactatgaaagcttcctgtcaggtggttgtttgcaagattgaagagtcgtagcagccaccggtgctagcaaaatatgcagtattactaaaatcagaccaatcgtcaggtggttgtcatattatactttttattatattaaaatcggaacagggcttcatttaatcccagatttaacactgctaccatttattactaatgttccgtgcgcgcgcaagacgcgcctaagttactagtatatattatagtcaagcaaatataccttctcttaaaaaataagcaaataacaacaataataagctatgaagtattagaattatacatgtgaatatgtgatgtatatgtggtgcacagtctgttatttggtcactttacttttaattcatggatccaaacagactttaattttaaaaaaatacacttcacgatatgctagtcgtcagtcgaccccctagtttcggacctagaaaacgaggaagcaactgatgtacgaaattaacaaaagaagaaatatagagcacaatcgatttttatatcatatatatagaacaatgctatatagaagtgggttatatatcagccacctgtttatgaaatttagaactgttccaaaaccaacattttgctctagcactaaataaagcacctgacaaaaactacagtgatttaacaccaaagcctcaacaatttcctcgtgtttgatcgattcttgcttacttggtggatgtctgcatctagtttggattctacagaccgtatctatccagaaataactgaatctataccatatggagattgtttatttgagagatatgcacaagatcccgaccaaatgattatgggggttataagggttataatcataaacttttcttggatccttcccggaaaaaacaggaaaaatatg

SEQ ID NO: 213144 - DNA, 1734 bp, Zea Mays
caatatctagccctatcaggcacacatggttaggatcaggattcttggtaggattttttttttgcttaacagtaagatttgtaatctactacaactataaagcacgaaaatcgatgcgcaaagactcgaacttgcgccctccagaagggtaggtttgttctctaccactgcaacacacatctatttgttaatctgaaaataaaaaataaaaaatataatcatgtttgaataaatgtctcattatatcaaggtttatctatatgatatatagaaaccatagcaatttacgagcaactacctagtatgttgtaaagattgaatcctatgatatttattttgattaatttaattgtttttttaaataaatggacctattgttattattttcattcacctaatattttgtcacaaccaagccatttaaaatcattacttcagttattatgtaggattgtagtatcattggttgtggactcctttgtgggacaccagcaccgttgtcaacctaagcaacagcccagctcaagctgtggctatgcgacgtcagcagcatgcaaaacagaatggtggtaacgggagggaaattaggaaggattgttaggattaaagaatccttttaccttgatgagccatgttaccccggtgatggcaatagtaacagcaattatttccattgtgatggatccatggcacgacttcagagcaagtcacttttttgatagttctgctcacataataagaagcagcttgttgctgcttttaggtggcgctttggcctttttcatggttttgacagaatatgtccttgtttctgtgactagtgctgtaacagtgactgtagcaggaattgtgaaggaagctgtcactattctggttgctgtgctattcttcaacgatccatttacatggttgaaggcgcttgggctagcaataataatatttggtgtcagtctattcaatatttacaagtataaaaggttcaaaaaagggcattacaatgaaaatgctgggacaaatacccaatcttccaattggacttcaaaatacgtcatccttgatgaagatactgaagctcaagatgatacaggctgatctgaatgtgatagactatatatggcgcttccagagaagcaagatcatctgtgcctgcatagtcttactttcacaggctaactgacttcatattctttgagttcatcaattactctggtcagccatgcacgaacatgacgcttgcagccgtgtggcaagttgggaagattacacatacatggaacatacaagatacaacctggtatcagtacatatgttttgtcctttcattcaaaacaaagaacagtgcatatatctgaacgaggcattctgcattatgtccactaagaaaatgctccatcaaatacaattagaactacagctgacacacttaactttctggaagaggataggactcaattttatagtccattctgattgttgaagagagattcggcatcggaacgtagctttcttttctttatttatttttagatgaaaataaacactcgtatatgtaatgttgtatgtatgggactgtatactgttttacacacgagcaccacaagttgaagttcttcccaccgtattggtattactcgtcttgagagcacagtgccaagtcggcccggtccatctcaactttgtttcccgtattttgagcagcttcaaaattgaactattagacgataaatattcgag

SEQ ID NO: 213145 - DNA, 1416 bp, Zea Mays
cgtaaaagaaaaattcagagatggtcctcgactcctggtgggtggtggcgatctcccagctgaactgaaagagcaagcgtgcgtgtgagacaaccaggtccgatccgcccccgccgagccgaggacagcagcgggggctctcggtctcctcctaggctcctacagatctcgtaccccgtcacagatctcgcgccctctccatcccatgcccaccccccctcgtcggatctgaccactccgcccctcctcccgtctccgccgccggagctgatatccgcggtcatggcgggcgccgcgggcgggttcgtcacgcgggccttcgaggccatgctcaaggagtgcgctgccaaccgcggcaagttcgccgcgctgcagcaatccatccagtcatacctcgatagtatcaagggggctacagcagagggcgcggtcatcaccgaggcgctcgggtcagctgggcgcgtgctcgacgggccgcaggccgagctggtgctgcagccgctccgcctcgccgtcgagaccaagcacgtcaagctcgtcgagcccgcgctcgactgcctccacaaacttattgcttatgaccatttagaaggcgatcctggtttagaaggtggtaaaaattccccaatatttacagacatcctgaacatggtatgtggttgcgtcgataacacctcctctgacagtactgttctccaagtcttgaaagtgcttcttaatgctgttgcttcaaataagtttagagttcatggagagccattgcttggggtcattagagtatgctataacattgctcttaataggctacctcaaaggctatgttaacccagatgatcagcattgtattcaggagaatggaatctgagcaggtttctgtatcgcccggaagctctgtggttaaagatatgccttcatctatcacaaatgattctgaaaatggagaaatatctactgatggccaagatgaggaaaaggttactctgggagatgcattgtccatgaatcggccttctgaagctcctccaacgtctgttgaagagcttcagaatcttgcaggtggagcagatattaaggggctggaagctgttctagataaggctgttgaacttgaagacgggaaaaaagtgtcacgtggaattgacctggacactgtgaatataatacagcgtgatgcactattgctctttcgaactctctgcaagatgagcatgaaagaagaaagtgatgaggttgctaccaagacaaggctgctatcacttgaactgctccagtcaaagcatatctttcgtatgctcttctgcgagcatctgtctcttcatctccagttgtttttcagggggaaattggtgtcttctttcctttgatagttttaaggtctctggatagctctgatagccccctcagccagaaggctag

SEQ ID NO: 213146 - DNA, 1931 bp, Zea Mays
gctacctcattgcttcgaagttcgaaaaacgattgctagaaacatggttttttcaatgatagacgcagatcgagcgctatttaatttgggacctaacaacgtacggcagagctactatagctccctgtgaaacacatgggaatttagaagcacacgattaagatctctcggagaactctagctagctagctaccattctaatctctactgctaattaagtacctattgtaggcgttcacagccaaccgtggtgcacgttctgccacatccaaaccgtccaacccgcatccaacgccgctgccgcatcccgcgtcgctcccccactcgtccctgccgcagcccccgcgatccccttcccacgcatggcgttcctgccgcagcccccgcggtcctttcggtgttctcgcttctagcgacgacggcggcggcccagggaaggtaccgcgcggtgttcagtttcggggactcgctggtggacgccggcaacctggtcacggagggcatcccggactacctcgccaccgcgcgcccgccctacggccagacctacttcggctaccccaccggcaggtgctccgacggccgcctcgtcgtcgatttcatcggagttgggcctcccgctgccgccgccgtccaaggccaagaacgccagcttcgcacagggcgccaacttcgccatcaccggcgccaccgcgctcgacaccgacttcttccggaagcgagggctcggcagcaccgtgtggaactccggctccctccgcacgcaaatccagtggctgcgagacctcaagccatcgctctgcagctccgcgcaaggcacacgatgcaaggagttcttcgctgagtgcctgttcgtcgtaggcgaattcggtgggaacgactacaacgccccgctgttcgccggcaaggacctcagggaggcatacaagctgacgccccacgtgatccgagccatctccgatggagtcgaacaactgattgccgagggggcaaaggatttgatcgtgcccggagtgatgccatcagggtgctttccggtctacctgaccatgtacgttgaccccaaggaagggcatggctcgcgcaccagctgcctcaagcggttcaacacttgaattgaagtgcatcgaggttcctcaggcatggctcgcgcacagctcacatgaaacgtttggtcggggagcacgacagctacttacgtggcacgacagggggcgcctgcgtgccaatcgccctcagcggctcgaggttcctcgcacttcaattcacaggtttgggcggattggcaggttggtcttgcgaattgcaaccagcagagatgatattgaagtcgtggctgtgaatgaccctttcattgatgctaagtacatggtgaagacaattacctatcctctgcaatccaactatatgtagagatcgtcatcaaaagaaacctcaggctttgtattcaacaggacctttacaaacgactaacttagatcggcgagagtagagaataaggcaaggatctttgagcagaatgccactgatagtgagtgcaaggtcgatcctaaagtgctctccaagctatatgatccgtgagtgatgccacagaccaaggatgtcgaagttgagtacctcctgcgctgccttgactaatcaccgattagctatagctgtaaattttatgtatgcatggtttcagttgcgctcgaaccaattgtcttgaccttgaatggacattttgatgtttatttcatctgatgtgtcatgtttcatgacgtagactttcgtttcttgtgattgatttatagtgaacctgtaagatgtaaaataacctttatgacagaaccagctgcaagaatagagtattttgaggaacctttgttgaagtaaatgtaatcgagtttcctagcaatcttattcttgctggtatcatatttttttgagct

SEQ ID NO: 213147 - DNA, 1451 bp, Zea Mays
gctacctcattgcttcgaagttcgaaaaacgattgctagaaacatggttttttcaatgatagacgcagatcgagcgctatttaatttgggacctaacaacgtacggcagagctactatagctccctgtgaaacacatgggaatttagaagcacacgattaagatctctcggagaactctagctagctagctaccattctaatctctactgctaattaagtacctattgtaggcgttcacagccaaccgtggtgcacgttctgccacatccaaaccgtccaacccgcatccaacgccgctgccgcatcccgcgtcgctcccccactcgtccctgccgcagcccccgcgatccccttcccacgcatggcgttcctgccgcagcccccgcggtcctttcggtgttctcgcttctagcgacgacggcggcggcccagggaaggtaccgcgcggtgttcagtttcggggactcgctggtggacgccggcaacctggtcacggagggcatcccggactacctcgccaccgcgcgcccgccctacggccagacctacttcggctaccccaccggcaggtgctccgacggccgcctcgtcgtcgatttcatcgcgcaggagttgggcctcccgctgccgccgccgtccaaggccaagaacgccagcttcgcacagggcgccaacttcgccatcaccggcgccaccgcgctcgacaccgacttcttccggaagcgagggctcggcagcaccgtgtggaactccggctccctccgcacgcaaatccagtggctgcgagacctcaagccatcgctctgcagctccgcgcaaggcacacgcgaattcggtgggaacgactacaacgccccgctgttcgccggcaaggacctcagggaggcatacaagctgacgccccacgtgatccgagccatctccgatggagtcgaacaactgattgccgagggggcaaaggatttgatcgtgcccggagtgatgccatcagggtgctttccggtctacctgaccatgtacgttgaccccaaggaagggcatggctcgcgcaccagctgcctcaagcggttcaacacttgaattgaagtgcatcgaggttcctcaggcatggctcgcgcacagctcacatgaaacgtttggtcggggagcacgacagctacttacgtggcacgacagggggcgcctgcgtgccaatcgccctcagcggctcgaggttcctcgcacttcaattcacaggtttgggcggattggcaggttggtcttgcgaattgcaaccagcagagatgatattgaagtcgtggctgtgaatgaccctttcattgatgctaagtacatggcctatatgttcaagtatgattccactcatggcccgtttaaaggttctattcgtgtcgtggatgattcaaccctcgagatcaatggatgattcaaccctaaaccctcgagacta

SEQ ID NO: 213148 - DNA, 1376 bp, Zea Mays
cttaggctcgcccttttcttggcactacatggaagcatctttggcacgctgagtaaggtgattggccggaggaggttggatttgtccggcatgcttgcttgcctgcagaggaccccacacatgagctgagatagaagcgagctctcatcacaagaggcctgtccagtccaggttggagaatctccttcctcctcttcctcccctgcctcgctagatataacaaaccatgccggcctacttgccagctcgcagtcccagcagagaccagagcctccggaaaccgcagcctcttggcctttgcttcctcgcttatctggcgtacaggctaagctagagagggagggagggagagctcgccgtttccgacccatcggcagcgccggagatcctgaaaagagtgccagctgagtacctcctgctgctcgaattttctcgtgggacagacaattttcagataaggacgtcagggagcatcatggacgacagggagcagatgaggatgaccgtcctgaaccaagaacaggtcttcagacatcaggtacacgagctgcaccggctgtaccacgtccagaagcagctgatgatgcagcaggcacacacgcctgctccggcgacccgtgctccagcagtgctcgacgacgccaaggccaagccaagaagaccgcacctagacatctggtgcagcgagacggcgagaaacccccctcagcaacggatcatcagcttcaacacggccacagcaccggcaccggcaccggcaccggcgcctgcaagggccgaggactgcaaccttgagctgacactggcaacgggacgaccgagcagcagcagcggtagcagcagctgtgacgccggaaggcggcgggggaagcggctcaaggtgtcaaccaactcggactccggcgccaccgcggtgtcgtccacgtcgacggactcggagctggcgcagttcggggacatcgacgcggcgaatctgccggtggtcaggtttcagggcgaggttactaggaggatgggcgaggtggggcagggcccgtggatgtaccggtgcctgagcttgaagaccgcgtgacgagtttgtgctgtatgtagttgtaggtaggaaatggggagttgcggttgtagagttcagacttgagaggattgagaaggagacacatcacatgtcttgtgttttacatgcacggattgggatcctcggcagtcgactgctctcacgcatcaacaccggtagactccaactgtcagcctcctggcagtcaactgcgcgactgccgagtatccggatcctacatgcatatgcaccacagaggtgtttcagaagatcaaaaagagagaaaggaacaaaggtttcaaaggtgctgctcatgggactc

SEQ ID NO: 213149 - DNA, 3068 bp, Zea Mays
ggaggacccgtccccacgcgccacgagtggctagtggctacggtgccatctcgccttcgcgccacacatcccccactcgcctctcaccgacccagcagaaactatcgctcgtcgccgtcgaccaaagccatgccaccgacatgtgggacagtgctgcaggtcccactcggcagggacgccggcggttcttggagacagcgagagcgaccgaccgcgcgcgcctcctcctcctccttcctcgccaggcacggcacgactcccagtggccaagtacactcacccgctcgcgcgcgtgagcgatgaaagctctcgcctcgcccgccgcctccttcctcccgggtatcccgagccctagccatctcgcgcgcgcgcttccccgatccgcggcggccgcgctctcgcggcccccttccgggcgctccatcgccgccgcggccgcggccgccacaggggaccactggggcgccgaccaccagcactaccacggaggacgcgcgggcgcgtcggaggccgggcctaccgcgtcggcgcgcggcgtcaagtgcgacgtggacgtggtgtcgtggcgggagcggcgggtgctcgcgtccgtgcctgtggccgccgacgtcgacacgctgtggcaggtcatcaccgactacgagcgcctcgctgacttcatccccaacctcgtccagagtgtgacgattccgtgtccgcatgaagggcggatatggctggagcagagaggcctgcagcgcgcgttgtactggcacattgaggcgcgcgtcgtgttggatctccaggaaatccctgactccgataagtgggatgggaggtcctctagtgcagttttgctgtatgaagttaatgtgataccaagatttaacttcccggctatatttcttgaaaggattataaggtcagatcttcctgtaaatcttcgtgccttggcttgtagagctgaaaagatttatctggaaaatcaaggatgtggttcaagaaaattttttgttgaggacttgaagccatcatatacttctcagcttaataacttccatagtacgacagttgagacttctaagtttaaacaagcacctcccaggtctggtgttagcagtgtgcttccttcaccttcttctgaattgattagcaaatggggtgtatatggaaacatatgcagaattgataagccttgtgtggtagatgagatccatcttcgaagatttgatggcatgttggaacatgagggggctcataggtgtgtttttgctagtatcactgtgaaagcaccggttcgagaggtatggaatgttctcacagcatatgagaatttgcctgaattcgtaccaaacctggctatcagtaggattgttcttcgtgataataacaaggttcggataatgcaggagggttgcaaaggcctgctttatatggtccttcacgcccgtgttgttatggatcttcgcgaaaaacatgagcaagagatcagctttgaacaagtcgagggtgatttttacacatttaaagggaaatggcgcttagaacaacttggggatcagcacaccctgttgaagtacatggttgaaactaagatgcatagggacacctttctctctgaatctatccttgaagaggtcatatatgaagatcttccatcaaacttgtgtgcaatccgtgattatattgaaaaggctggagccaagagtagcaattccacaggtcattctaatgtgcccacagatccagatccagatgttgatcatgatgaaagcaggcaatctgagcaaacgtgtgtgtcttgctcatccagtaccatgaagcagagaccaaaagtcccaggattgcaaaaggacatcgaggtcctaaaatcagagcttgataatttcattgcagagtatggtcagtatggtttcatgcctaagagaaagcatctccggtctcatggaagagtggatattgagaaggctataacaagaatgggtgggttccggaagattgccagcataatgaacctttctctttcttacaaaaatcgaaaaccaagaggctattgggataatctggagaacttgcaagaagagatcagccggttccagaaaatttgggggttggatccttcttatatgcccagtagaaaatcttttgagagggcaggtcgttatgacattgctcgggcattggaaaaatggggtggggtgcaggaggtttcacgccttctttctcttgaactaagatatcctagaagacaagcagacccggacgatgagagacagtctgaatccccgtctgggatgatgaagaagcacggagtgaaacctgatgaaggcaatgtttccccaaatgcgcagaaatggctcctgaagctgaaggacttggatgtcaattgggtggaatactaggtttagctttggaaaaagatatggtctctcatcatgaactcagctctttcctttcttcggaggtgttctggatgcattccgacaaagacgccgcagattgtgtacagaacagcgcggtgcacgggccaaccccattctgaaggcgagctaccagcaggcaacatgttttcttgccagtaatcacgactcttggctactactgcgtatctagaactgctgacaatactactcagcttcttttgcggtcaaaccgatccatggttttgacaaagtcaggccataaaatgcagaaaagggtgtcgatttcgtgcgcctgttcaaagctgttttgagtcagccacgcctttgaaaaatctgaggtgttcacaggttggtcgcctactttgttattactggtgatataagttgacctggtccttttgaaagagaaggtttacccgtctagtaatagtttcagtcggcacgtttgcattacattggtctcgatcaggaggcacagctacatactttacgtctttacctattgctgcttcaattcttcatgggatgaatgaaaccgacctgacctatgtgttacctatggcacgaatatggatggctattgttagcttagagggatggataagaaacaagacgattagaataaaataacaagaatatggatttttattgaagtcaaaaaaaaaa

SEQ ID NO: 213150 - DNA, 3029 bp, Zea Mays
  misc_feature (727)..(733): n is a, c, g, or t
tatcgctcgtcgccgtcgaccaaagccatgccaccgacatgtgggacagtgctgcaggtcccactcggcagggacgccggcggttcttggagacagcgagagcgaccgaccgcgcgcgcctcctcctcctccttcctcgccaggcacggcacgactcccagtggccaagtacactcacccgctcgcgcgcgtgagcgatgaaagctctcgcctcgcccgccgcctccttcctcccgggtatcccgagccctagccatctcgcgcgcgcgcttccccgatccgcggcggccgcgctctcgcggcccccttccgggcgctccatcgccgccgcggccgcggccgccacaggggaccactggggcgccgaccaccagcactaccacggaggacgcgcgggcgcgtcggaggccgggcctaccgcgtcggcgcgcggcgtcaagtgcgacgtggacgtggtgtcgtggcgggagcggcgggtgctcgcgtccgtgcctgtggccgccgacgtcgacacgctgtggcaggtcatcaccgactacgagcgcctcgctgacttcatccccaacctcgtccagagtgtgacgattccgtgtccgcatgaagggcggatatggctggagcagagaggcctgcagcgcgcgttgtactggcacattgaggcgcgcgtcgtgttggatctccaggaaatccctgactccgtatgtgctgtcgcagattgaacttccannnnnnncgtcgtgacttcaagaagagtgaaggacaaatggtccataagatctgctcctaggtcctctagtgcagttttgctgtatgaagttaatgtgataccaagatttaacttcccggctatatttcttgaaaggattataaggtcagatcttcctgtaaatcttcgtgccttggcttgtagagctgaaaagatttatctggaaaatcaaggatgtggttcaagaaaattttttgttgaggacttgaagccatcatatacttctcagcttaataacttccatagtacgacagttgagacttctaagtttaaacaagcacctcccaggtctggtgttagcagtgtgcttccttcaccttcttctgaattgattagcaaatggggtgtatatggaaacatatgcagaattgataagccttgtgtggtagatgagatccatcttcgaagatttgatggcatgttggaacatgagggggctcataggtgtgtttttgctagtatcactgtgaaagcaccggttcgagagttatgatctaacaaaaaaacatttggtagattcgtaccaaacctggctatcagtaggattgttcttcgtgataataacaaggttcggataatgcaggagggttgcaaaggcctgctttatatggtccttcacgcccgtgttgttatggatcttcgcgaaaaacatgagcaagagatcagctttgaacaagtcgagggtgatttttacacatttaaagggaaatggcgcttagaacaacttggggatcagcacaccctgttgaagtacatggttgaaactaagatgcatagggacacctttctctctgaatctatccttgaagaggtcatatatgaagatcttccatcaaacttgtgtgcaatccgtgattatattgaaaaggctggagccaagagtagcaattccacaggtcattctaatgtgcccacagatccagatccagatgttgatcatgatgaaagcaggcaatctgagcaaacgtgtgtgtcttgctcatccagtaccatgaagcagagaccaaaagtcccaggattgcaaaaggacatcgaggtcctaaaatcagagcttgataatttcattgcagagtatggtcagtatggtttcatgcctaagagaaagcatctccggtctcatggaagagtggatattgagaaggctataacaagaatgggtgggttccggaagattgccagcataatgaacctttctctttcttacaaaaatcgaaaaccaagaggctattgggataatctggagaacttgcaagaagagatcagccggttccagaaaatttgggggttggatccttcttatatgcccagtagaaaatcttttgagagggcaggtcgttatgacattgctcgggcattggaaaaatggggtggggtgcaggaggtttcacgccttctttctcttgaactaagatatcctagaagacaagcagacccggacgatgagagacagtctgaatccccgtctgggatgatgaagaagcacggagtgaaacctgatgaaggcaatgtttccccaaatgcgcagaaatggctcctgaagctgaaggacttggatgtcaattgggtggaatactaggtttagctttggaaaaagatatggtctctcatcatgaactcagctctttcctttcttcggaggtgttctggatgcattccgacaaagacgccgcagattgtgtacagaacagcgcggtgcacgggccaaccccattctgaaggcgagctaccagcaggcaacatgttttcttgccagtaatcacgactcttggctactactgcgtatctagaactgctgacaatactactcagcttcttttgcggtcaaaccgatccatggttttgacaaagtcaggccataaaatgcagaaaagggtgtcgatttcgtgcgcctgttcaaagctgttttgagtcagccacgcctttgaaaaatctgaggtgttcacaggttggtcgcctactttgttattactggtgatataagttgacctggtccttttgaaagagaaggtttacccgtctagtaatagtttcagtcggcacgtttgcattacattggtctcgatcaggaggcacagctacatactttacgtctttacctattgctgcttcaattcttcatgggatgaatgaaaccgacctgacctatgtgttacctatggcacgaatatggatggctattgttagcttagagggatggataagaaacaagacgattagaataaaataacaagaatatggatttttattgaagtcaaaaaaaaaa

SEQ ID NO: 213151 - DNA, 2782 bp, Zea Mays
gctcgcgcgcgtgagcgatgaaagctctcgcctcgcccgccgcctccttcctcccgggtatcccgagccctagccatctcgcgcgcgcgcttccccgatccgcggcggccgcgctctcgcggcccccttccgggcgctccatcgccgccgcggccgcggccgccacaggggaccactggggcgccgaccaccagcactaccacggaggacgcgcgggcgcgtcggaggccgggcctaccgcgtcggcgcgcggcgtcaagtgcgacgtggacgtggtgtcgtggcgggagcggcgggtgctcgcgtccgtgcctgtggccgccgacgtcgacacgctgtggcaggtcatcaccgactacgagcgcctcgctgacttcatccccaacctcgtccagagtgtgacgattccgtgtccgcatgaagggcggatatggctggagcagagaggcctgcagcgcgcgttgtactggcacattgaggcgcgcgtcgtgttggatctccaggaaatccctgactccgataagtgggatgggaggtcctctagtgcagttttgctgtatgaagttaatgtgataccaagatttaacttcccggctatatttcttgaaaggattataaggtcagatcttcctgtaaatcttcgtgccttggcttgtagagctgaaaagatttatctggaaaatcaaggatgtggttcaagaaaattttttgttgaggacttgaagccatcatatacttctcagcttaataacttccatagtacgacagttgagacttctaagtttaaacaagcacctcccaggtctggtgttagcagtgtgcttccttcaccttcttctgaattgattagcaaatggggtgtatatggaaacatatgcagaattgataagccttgtgtggtagatgagatccatcttcgaagatttgatggcatgaacatgagggggctcataggtgtgtttttgctagtatcactgtgaaagcaccggttcgagaggtatggaatgttctcacagcatatgagaatttgcctgaattcgtaccaaacctggctatcagtaggattgttcttcgtgataataacaaggttcggataatgcaggagggttgcaaaggcctgctttatatggtccttcacgcccgtgttgttatggatcttcgcgaaaaacatgagcaagagatcagctttgaacaagtcgagggtgatttttacacatttaaagggaaatggcgcttagaacaacttggggatcagcacaccctgttgaagtacatggttgaaactaagatgcatagggacacctttctctctgaatctatccttgaagaggtcatatatgaagatcttccatcaaacttgtgtgcaatccgtgattatattgaaaaggctggagccaagagtagcaattccacaggtcattctaatgtgcccacagatccagatccagatgttgatcatgatgaaagcaggcaatctgagcaaacgtgtgtgtcttgctcatccagtaccatgaagcagagaccaaaagtcccaggattgcaaaaggacatcgaggtcctaaaatcagagcttgataatttcattgcagagtatggtcagtatggtttcatgcctaagagaaagcatctccggtctcatggaagagtggatattgagaaggctataacaagaatgggtgggttccggaagattgccagcataatgaacctttctctttcttacaaaaatcgaaaaccaagaggctattgggataatctggagaacttgcaagaagagatcagccggttccagaaaatttgggggttggatccttcttatatgcccagtagaaaatcttttgagagggcaggtcgttatgacattgctcgggcattggaaaaatggggtggggtgcaggaggtttcacgccttctttctcttgaactaagatatcctagaagacaagcagacccggacgatgagagacagtctgaatccccgtctgggatgatgaagaagcacggagtgaaacctgatgaaggcaatgtttccccaaatgcgcagaaatggctcctgaagctgaaggacttggatgtcaattgggtggaatactaggtttagctttggaaaaagatatggtctctcatcatgaactcagctctttcctttcttcggaggtgttctggatgcattccgacaaagacgccgcagattgtgtacagaacagcgcggtgcacgggccaaccccattctgaaggcgagctaccagcaggcaacatgttttcttgccagtaatcacgactcttggctactactgcgtatctagaactgctgacaatactactcagcttcttttgcggtcaaaccgatccatggttttgacaaagtcaggccataaaatgcagaaaagggtgtcgatttcgtgcgcctgttcaaagctgttttgagtcagccacgcctttgaaaaatctgaggtgttcacaggttggtcgcctactttgttattactggtgatataagttgacctggtccttttgaaagagaaggtttacccgtctagtaatagtttcagtcggcacgtttgcattacattggtctcgatcaggaggcacagctacatactttacgtctttacctattgctgcttcaattcttcatgggatgaatgaaaccgacctgacctatgtgttacctatggcacgaatatggatggctattgttagcttagagggatggataagaaacaagacgattagaataaaataacaagaatatggatttttattgaagtcaaaaaaaaaa

SEQ ID NO: 213152 - DNA, 2658 bp, Zea Mays
  misc_feature (530)..(536): n is a, c, g, or t
atgaaagctctcgcctcgcccgccgcctccttcctcccgggtatcccgagccctagccatctcgcgcgcgcgcttccccgatccgcggcggccgcgctctcgcggcccccttccgggcgctccatcgccgccgcggccgcggccgccacaggggaccactggggcgccgaccaccagcactaccacggaggacgcgcgggcgcgtcggaggccgggcctaccgcgtcggcgcgcggcgtcaagtgcgacgtggacgtggtgtcgtggcgggagcggcgggtgctcgcgtccgtgcctgtggccgccgacgtcgacacgctgtggcaggtcatcaccgactacgagcgcctcgctgacttcatccccaacctcgtccagagtgtgacgattccgtgtccgcatgaagggcggatatggctggagcagagaggcctgcagcgcgcgttgtactggcacattgaggcgcgcgtcgtgttggatctccaggaaatccctgactccgtatgtgctgtcgcagattgaacttccannnnnnncgtcgtgacttcaagaagagtgaaggacaaatggtccataagatctgctcctaggtcctctagtgcagttttgctgtatgaagttaatgtgataccaagatttaacttcccggctatatttcttgaaaggattataaggtctggtgttagcagtgtgcttccttcaccttcttctgaattgattagcaaatggggtgtatatggaaacatatgcagaattgataagccttgtgtggtagatgagatccatcttcgaagatttgatggcatgttggaacatgagggggctcataggtgtgtttttgctagtatcactgtgaaagcaccggttcgagaggtatggaatgttctcacagcatatgagaatttgcctgaattcgtaccaaacctggctatcagtaggattgttcttcgtgataataacaaggttcggataatgcaggagggttgcaaaggcctgctttatatggtccttcacgcccgtgttgttatggatcttcgcgaaaaacatgagcaagagatcagctttgaacaagtcgagggtgatttttacacatttaaagggaaatggcgcttagaacaacttggggatcagcacaccctgttgaagtacatggttgaaactaagatgcatagggacacctttctctctgaatctatccttgaagaggtcatatatgaagatcttccatcaaacttgtgtgcaatccgtgattatattgaaaaggctggagccaagagtagcaattccacaggtcattctaatgtgcccacagatccagatccagatgttgatcatgatgaaagcaggcaatctgagcaaacgtgtgtgtcttgctcatccagtaccatgaagcagagaccaaaagtcccaggattgcaaaaggacatcgaggtcctaaaatcagagcttgataatttcattgcagagtatggtcagtatggtttcatgcctaagagaaagcatctccggtctcatggaagagtggatattgagaaggctataacaagaatgggtgggttccggaagattgccagcataatgaacctttctctttcttacaaaaatcgaaaaccaagaggctattgggataatctggagaacttgcaagaagagatcagccggttccagaaaatttgggggttggatccttcttatatgcccagtagaaaatcttttgagagggcaggtcgttatgacattgctcgggcattggaaaaatggggtggggtgcaggaggtttcacgccttctttctcttgaactaagatatcctagaagacaagcagacccggacgatgagagacagtctgaatccccgtctgggatgatgaagaagcacggagtgaaacctgatgaaggcaatgtttccccaaatgcgcagaaatggctcctgaagctgaaggacttggatgtcaattgggtggaatactaggtttagctttggaaaaagatatggtctctcatcatgaactcagctctttcctttcttcggaggtgttctggatgcattccgacaaagacgccgcagattgtgtacagaacagcgcggtgcacgggccaaccccattctgaaggcgagctaccagcaggcaacatgttttcttgccagtaatcacgactcttggctactactgcgtatctagaactgctgacaatactactcagcttcttttgcggtcaaaccgatccatggttttgacaaagtcaggccataaaatgcagaaaagggtgtcgatttcgtgcgcctgttcaaagctgttttgagtcagccacgcctttgaaaaatctgaggtgttcacaggttggtcgcctactttgttattactggtgatataagttgacctggtccttttgaaagagaaggtttacccgtctagtaatagtttcagtcggcacgtttgcattacattggtctcgatcaggaggcacagctacatactttacgtctttacctattgctgcttcaattcttcatgggatgaatgaaaccgacctgacctatgtgttacctatggcacgaatatggatggctattgttagcttagagggatggataagaaacaagacgattagaataaaataacaagaatatggatttttattgaagtcaaaaaaaaaa

SEQ ID NO: 213153 - DNA, 2434 bp, Zea Mays
ccttccggtcccccaccacgcgccggacatgaaatatcccactcaaaccaacctaccgcccacagacccaaatcggcaccccggaagcctcaaatccgctctattcctctctccccctctctcccccatcgcaccagcaggcgagcgcgaggcggaggagtagagatggagtcggaccagggcaagcttttcatcggcggcatctcctgggaaacgacggaggagaagctgagcgagcacttctccgcctacggcgaggtaacgcaggccgccgtcatgcgcgacaagatcaccggccgcccccgcggcttcgggttcgtcgtcttcgcggatcccgccgccgtcgacagagcgctgcaggacccccacaccctcgacggccgcacggtcgatgtgaagcgggcactctcgcgggaggagcagcaggcctccaaggccgcgaaccctagcggtggaaggaactccggtggcggaggaggcggcggtggcggcagcgatgcaagtggtgctcggacgaagaagatctttgtgggcgggctgccctctactctgactgaggatgggttccggcagtacttcgagacctttggcatagttactgacgtagttgtcatgtatgaccagaacacacagcgcccacgtggtttcgggttcatcacctttgattcggaggacgcggttgaccgcgtgctgcagaagaccttccatgatcttggtgggaagctggttgaggtgaagcgcgcattgccccgtgaggcgaatcctggcggctctggtggtggtcgttctgggggaggtgggggttatcagagcaacaatggccataacaccagctctggtagctatgatggtagaagtgatggtggcaggtacgggcagacacaacagggtagtggtggtggtggctatcctggctacggtgcaggaggctatggtgctggggcagctggatatggatatggtgctaaccctgcagttggatatggaaattatggggctggagggtatgggggtgttcctgctgcttatggtggacattatggaaacccaggtgcagctggttctggttaccaaggtggacatccaggctcaaatagaggaccttggggcagtcaagctccatctgcatatggaactggagggtatggtggcagtgctgggtatagtgcttggaacaactcttctggtggcggcaatgctctgaatagtcaagcccctggtggacctgcaggctatggaagccagggctatgggtatggtggatatggaggggatccatcatacgctagtcacggaggatatggggcttatggagcacgtattgatagtgctggcaatcctgctactggtggatcatctggatacaatgcaggctatggaagtggtggtgccaactctggctattcaagtgcttggagtgatccttcgcaaggtggtggatttggcggttcggtcaatggaggtgctgaaggacagtcaacttatggcactggctatggcagtgtgcagcccagggttgctcagtaaagagaggcattttgagtgtgcgaaatgaaccagtgcatctgggcagtctatgtattgatttgtcattccagtctctctggttgctctcagcattttgaagattgcccatttgctgcttaaatcagttgaatgggatggcattctttttttagatatgcccaagcaaggtctatgaaatcaggcatttgaaaaaggcattttgcacagtgatttacatgaactggcgagaagttccaatatcggggttctgacagaatgcaagataccagcttaagtgcttcattttctgaagggtcttgtgctgtgctacaagatagtggacgaagtgcaacatgttggctggatccactttggctgggtctgagggagcatgggccaagatcttgggggctcggctgtgtggtgcaacgggcagcttgcttgcatactggtgatcgtggatgcttgtgatatagcattgccccccaatgtataagtgaacttttagtgctagaggcttccttttgttggcatgatgtctatggtttataggtgcagtagttgcataacacatagtatactcagtatactttgtgtggaagctattgatgcttttctttttgtttagcatgaatgccatataattgtacattgaattgacatattaagttattgctaaaacacacttcagtgaattttataaggccctgtttggatccattgaattgaattctattctaataatttaggcacagttcaattaaactaatatagttttatgtgagatatgtttgtatactattgttggttataaggaggagatatttatgtggtatatttttattatagaggagcaagttgaagaggagtgtagaaacagtttattgatacataaatcaatttctatctctcaaccactaaatttgag

SEQ ID NO: 213154 - DNA, 1882 bp, Zea Mays
cccacacgcgacacacccggccgaaagaccgccctgtctcttcctgcatgcgtaagtctgcatccccggtcagtcagacacggcgcgcccgccagaaacctcacaccgccatcgccatcgcataaactaggcgagaagagagaggggaaagttgcttctctctctgacccgcccactccctccttccctgctccggtcgcactccgtagttcctccgcgcacttacgtacagcagacagacacgagatcgagtggtacagggcccgccagaaacctcacgagctagctgggttcctgccgcgccgccgatccacgcatggcgccgccggggtggaggctaggctgggtgtgggcgaagaaggaggtgatctgggcgatgaccggcggccaggccaccgagcagggcgactgctccaggttcaaggccagcgtcctcccccactgctgcaggagggacccggaggtggtggacctgctgcccgggactccctacaacacgcagaccgccaactgctgcaggggaggagtgctcgcctcgtgggcgcaggaccctagcgacgccgtcgcctcgttccaggtcagcgttgggcaggctgggtccaccaacaggaccgtcaaggtgcccaggaacttcaccctgctggcgcctggtcccgggtacacctgcggagccgccaagcttgtcaagcctaccaagttcatgtctcaggatggcaggagatcaactcaagcgcacatgacctggaacgtgacgtgcacgtactcccagttccttgcccagagatctccaacctgctgtgtctcgctctcgtcgttctacaacgacaccattgttagctgcccagcatgctcctgcggctgccagaacaacaacagcagtagcaccgccgcgccaggaagctgcgtagagggtagtagaaggtcgccctatctggcttccgtcgtcaacgatcctagcaagaacagcttggcgccgctagtccagtgcacctcacacatgtgcccggtaagggtgcactggcacgtcaaggtcagctacaaggagtactggagggtgaagatcacggtcaccaacttcaactaccggatgaactactcgcagtggaacctggtcgcgcagcaccccaacttcgacaacctcaccaccattttcagcttcaactacagacctctcaacccctacggagtgatcaacgacacggcgatgctatggggcatcaagtactacaacgatctgctcatgacggccgggccagacgggaacgtgcagtccgagcttctgttccggaaggagccgtccacgttcaccttccacaaaggatgggccttccccaggcgagtctacttcaacggagacaactgcgtgatgccgccgccggacgcctacccgtggctgcccaacgccgcctcgccgcggctgtcgccttcgcttctcctcccgctcgttgcggctgcttggacagcattcgcagtcctttcgtgatgggcccatatgcgtagggaaggcaaggcaaggcacacaatgtcccatgacaagttctgacctgattcagcgttgttgcttgctgctgatcattagtcgatctgttgcgaagttttatttggtgtcttgaatcttgattcaggaacaggttcagatgtgcattcacgtactaccaagcatgtacattcccaatacttgtaaatttctgcaaagactgactggcaagtgacagtagaaataatctgtttctctctccgcatcatggaaagtttcgtgctcaaataccatcggcagtttcacaaacaagaaggttgtggatgcatatcaacagtttgagtacgcataccaacagtttccggccttaatggcatttcagtgattcataaccgccctcgtcac

SEQ ID NO: 213155 - DNA, 2423 bp, Zea Mays
cgccgtctcactccgccccgccacgcgttcatccaggtcgggggtccgtacgatgcaaaaaaatcgcgatgagtccaccacgactccaagcagctgcggacgcgccgctctaaccggagatccgttaagagtccgccgcccccatctcagcgcctgagtcagccgttctctccccgtgctcgcagccactggtttccgcgggtctagggttcgtggaggcagcgtggagcttagggtttcggcgggatgagctaccggaaggggttgaaggtttgggtggagaagggggaagggtgggtagaggcggtggtgacggaagcgaaggaccacgccgtcgccgtgctcacgagccagcgggaaaaggcacggcagaggacgatggcaactgtccagcgcacacttcaggcaatggatgaggacaacatcagagatgagtctagaactggaaggctcgtcgtcttggcggcgctggccgccggcgccatcagcatcggcaagcgcatgcccctgctggcgccatctcccccgtcatcttggcggcgctggccgccggtgccatcagcgtcggcaagactgtcatagatgagattttcatgttctgaagactgaattcaagatgatgggatgcttgtgatatcgacagttcctggttctccaccaaagctgtgcatcaaggctgttgcattagaaaacttctgtccaagagcattttcattgctgtcgatcgccggactatctgggttttgctaggccatgcagtgtcctagaaggcctattaattcaatttgcagcagactgaaagctaaagaagtccgtattagagtctgggctcatcaattagctgctcattctccagtacttcattcccttggtcccctacaactccgacctgactggctaattgctgctggagaaaggaacaaaggagaatggagcatgtagtggatgcgccaatgcaggtttcagttcctcaagtatatgttcctatcggacccctttgttcctcaagtgagtgatggcgctggggttgtcttactaagcgagacatttgcactgaacaattgcagttccgctgaactcatagagttcatgtcaatctctctattgaactttaatttttgaaagtttggtacagagattttcataaaaaaaacagatattgcctgattctgttggcacctgatttcctgaatttcatttcgaaaaaagagaagaaacagatatggtctcattctattttatttcaatattatcatgtggtatataagtcttatcacacttgtgtgctgcccatgggagcggtagttcagaagcagttgaacctggagttggtgttccagatcattttctctgaattacatcatattatctgtaccaggtccagatgcaaccagggcagccatcgatgtctgcgaacagggtttattatcaaagatctttggttagggagattgaagcccggttaaaagccaagtgtgacacattagctgatctatttgctatggatgaaagattgttttgagcacatttttagtaaggtctcgttaagcgccgcgtttgagcaccatgtccttccctggatgcacagaagctactgacttcgtggttacaatcgccctttgctttacctcctcccatgatggaaaggttgaggtgagaatggaactattgatggccaaggcattgtgtggtgggatatgtggaagaaaggtacactgccctatacaagacctcaccaattgatctatttatgtggtgggatatgtggaagaaaggtttgtgatggaggtgataaaaactttgtggtgcgaaagggcctctagcgtaatggttaaggcttccaagtagcaactccaggtcccagattattgctcttcgagctatcacgtggtggtggagctatcaattcagttgatgacttgactgaaaattgtctaggctcatctgatcttgtctatgagtatgttctcgtagaagaaaagtacacatttgtggggaatgtgaaaaatccttgctcttgtactatactgattaaaggattcaaggatgatgttctgttaagaacacagttgaggatgaagcagttgtgttgttatcatccgtaaatttctttgtccaggaattaggaagaataaatttgtgttgatactgtgaaggtaccaggccgacacaaatttatttgataaaatacgtgttcccaaatgtgtgtatgtacgatcaggatcgaataatttatgtcctgtcccaatgtacagaggcactaaggaaacctgtcgcggttcacagcgaacgggtcttgaactcttggctcgctcattttaatattattatgtaaatttcctatcaagaaacgttcctgtgacattacatcgagaagacgagaatcatgactgcagaaatacatctttattcactactgtatc

SEQ ID NO: 213156 - DNA, 895 bp, Zea Mays
caaagcttaaaatgtttgacttaagacatcctcaaaatgacttgctttagggaactggagggagtatgtctcaaaacataattcaaatgggacgatgtgaaggttgacaagcatcgggagaattaccttggtcatagtgttaaggctccggttggtagatggcagaaaggaaaggatctttactggtatactcgggataagaaatccgacacggaagatgctcttaaggaagaaatcaggagagtgaaggaagaggaggaacaggctatgcgtgaggctcttggcttagctcctaagcgcagcaatcgaactcagggtaatcgcttggataagcatgaatatgctgagctgattaagagaggatcaactgcggaggacttgggagcagggcacgctgaagcagcacaagtgcagggtctaggattgtacaaggcccctcgcgatgagggtggatcaagttctttgagccttgaccctcaaatggagcctgagcaggctgaacccctactagcacccaagcaggaggatgatttggaagataataggaaggggaaaaggccacgtgaacgtgacgagaagagaggggagaaggagcggaaacgagacaggcatggtgatggaaaggagaggaggcgggacaagcacgagaggaggcacgacttggaggacagatcaaagcggcaccgcaaagacaagcagaagaggaggcacgattccgattctgattgataacggccctgcgcctgctcctgtatgactactgtatactgcgaaatttcaaacccatggagccgcttttgtttgatgtatgcctacgctttaaattatgtttgccctaatgatgtttaaggataaaatggcccgtatgctcctctccactcaacgttatatacct

SEQ ID NO: 213157 - DNA, 746 bp, Zea Mays
gaaccaggatgcctgttcaggaaaggatctttactggtatactcgggataagaaatccgacacggaagatgctcttaaggaagaaatcaggagagtgaaggaagaggaggaacaggctatgcgtgaggctcttggcttagctcctaagcgcagcaatcgaactcagggtaatcgcttggataagcatgaatatgctgagctgattaagagaggatcaactgcggaggacttgggagcagggcacgctgaagcagcacaagtgcagggtctaggattgtacaaggcccctcgcgatgagggtggatcaagttctttgagccttgaccctcaaatggagcctgagcaggctgaacccctactagcacccaagcaggaggatgatttggaagataataggaaggggaaaaggccacgtgaacgtgacgagaagagaggggagaaggagcggaaacgagacaggcatggtgatggaaaggagaggaggcgggacaagcacgagaggaggcacgacttggaggacagatcaaagcggcaccgcaaagacaagcagaagaggaggcacgattccgattctgattgataacggccctgcgcctgctcctgtatgactactgtatactgcgaaatttcaaacccatggagccgcttttgtttgatgtatgcctacgctttaaattatgtttgccctaatgatgtttaaggataaaatggcccgtatgctcctctccactcaacgttatatacct

SEQ ID NO: 213158 - DNA, 754 bp, Zea Mays
aaccaatagattcctggtacaatcagaggaaaggatctttactggtatactcgggataagaaatccgacacggaagatgctcttaaggaagaaatcaggagagtgaaggaagaggaggaacaggctatgcgtgaggctcttggcttagctcctaagcgcagcaatcgaactcagggtaatcgcttggataagcatgaatatgctgagctgattaagagaggatcaactgcggaggacttgggagcagggcacgctgaagcagcacaagtgcagggtctaggattgtacaaggcccctcgcgatgagggtggatcaagttctttgagccttgaccctcaaatggagcctgagcaggctgaacccctactagcacccaagcaggaggatgatttggaagataataggaaggggaaaaggccacgtgaacgtgacgagaagagaggggagaaggagcggaaacgagacaggcatggtgatggaaaggagaggaggcgggacaagcacgagaggaggcacgacttggaggacagatcaaagcggcaccgcaaagacaagcagaagaggaggcacgattccgattctgattgataacggccctgcgcctgctcctgtatgactactgtatactgcgaaatttcaaacccatggagccgcttttgtttgatgtatgcctacgctttaaattatgtttgccctaatgatgtttaaggataaaatggcccgtatgctcctctccactcaacgttatatacct

SEQ ID NO: 213159 - DNA, 762 bp, Zea Mays
gtcacttctgtgcttacagtggcttggaatggcagagaaaggatctttactggtatactcgggataagaaatccgacacggaagatgctcttaaggaagaaatcaggagagtgaaggaagaggaggaacaggctatgcgtgaggctcttggcttagctcctaagcgcagcaatcgaactcagggtaatcgcttggataagcatgaatatgctgagctgattaagagaggatcaactgcggaggacttgggagcagggcacgctgaagcagcacaagtgcagggtctaggattgtacaaggcccctcgcgatgagggtggatcaagttctttgagccttgaccctcaaatggagcctgagcaggctgaacccctactagcacccaagcaggaggatgatttggaagataataggaaggggaaaaggccacgtgaacgtgacgagaagagaggggagaaggagcggaaacgagacaggcatggtgatggaaaggagaggaggcgggacaagcacgagaggaggcacgacttggaggacagatcaaagcggcaccgcaaagacaagcagaagaggaggcacgattccgattctgattgataacggccctgcgcctgctcctgtatgactactgtatactgcgaaatttcaaacccatggagccgcttttgtttgatgtatgcctacgctttaaattatgtttgccctaatgatgtttaaggataaaatggcccgtatgctcctctccactcaacgttatatacct

SEQ ID NO: 213160 - DNA, 1090 bp, Zea Mays
aaattattgaagttgcaaatcttagccataaaagatggtttctgcagttccttggaaacatattgtgcactggagaaaccatttgaagtttcctgaggatgcaaagttgtcaaatgaagcaagagatctcatttgccggttattatgtgatgttgaccacaggattggcagtgcaggggcagatcaaataaaggcacatccttggttccaaggagttgcatgggataaactttatgaaatggaagcagcatttaagcctcaagtaaatgatgagctggatacacagaatttcatgaaatttgaggaactggaaaatcctccagccaaaacaggctctgggccttcaagaaagatgatgctgaactccaaagatctgagctttgtggggtatacatacaaaaactttgatgcagtgaaagcaataaaaatttcagatctgcaaaggaattcatctctaacaaggccttccattggttcgatattcggtccatcaggcatggattctcccatggaaccaaacggaagggacacacacatgcacacagtttcatctgggtgatgtggctccagctggacaacatgcttatttttagccaggtctctgctctctttatcgtgggcaagcggtttgtagaaatccaccaaagtttctagttgtaaaatagtatgccacagacttcaacaaaggtcccatgcattattggctcatcagacatgggggcagtttttttttggagaaattgcaccttgcggctggctgcccaggttggcagagcaaattgcggccttctcttgtggcagttcccggtctgcaggaaagggaaatacgacggtgttgttgcagcaggaattctcatggttagtgtcgttgttggtgtttgatatgtatcaggaattttcacatttgaagtagggtttctgttagcagagttgtagctattgacaagcaacatccttttacggagttgctttttttcgttgatgtatggaaaacgagacattgtagaaatcgaagttcgatctagccttgtatgctgcttatctgattcaacgtgtttctcagtatttttgtctaaaaattgcttaaatc

SEQ ID NO: 213161 - DNA, 926 bp, Zea Mays
gtctaactgccatcccaaatttccaaccccgacggagacgaaggtcaacagtcatttgcacttctcaaggcacgaacatgtagcaggtcgggccattcgagaccatgcctcgcgcagccaccgaggccgtcgtccacggcgagggaggcacgatcaaagtaggcacaacgggcaccatcggctccctcatgacaagagaactggacgccgtcaaggtcgcgccgccgccaccggcagccgcgggcaacccgcgcctgaggcgccaccaaggctgtcctgtctcggtgccgtgcggagccgctactcctcggaagaccgtgctgaggaaaagctcctcggacatctccggcggcagcagggccgaccgcgtgagcgccgaagatgcctgctgcaagcccaggagggtctcccggaggaacacgttcgactcgccgatgctgcgctcggacggcgcgctcgtggacgtccggaccccgagtggaggcagggcgaagaagaaggggggcgtgtacggcgtcgagttggtggacgtcaagtgcggtaaccccatgaccagcaggctcaggaagctcggcttctgcaagctgtcggagacgtttgcgtaggtggagcctggcaaggaccatggccagcatctgaataccgtgtgcctgatttagtgcagcaattatctacgagttattcctatgtctcatagattagaagggattagaaaaaaattataaaataattttaattgctatggattgaaactcactcaatcaccttcaattcatatgtattttgatgaaacaggtcctaacactgttcggccttaggctgcgatccagtttgcatatctagttcttgtcactttttctagctggtcctttttttctccctatgtcgaaattgttgttcgctctgcgttgacaagttaatctatg

SEQ ID NO: 213162 - DNA, 2357 bp, Zea Mays
ttatttgccatctaactcctccattgctcttgaattttcactacttctgtttactcatataatcatttagagtcatattcttacttcatttaaggacaaatttgcgatatgtgggaaggatattatgctgacgctcattgctagacgctccaggcattatgctggcaccaggtatctaaagaggggtgtgaatgaggagggcagagtagcaaatgatgttgagactgagcaaattgtttatgaaaacatgcttggaccatggcaaataagctctgttgtgcagaacaggggttcaattccactattctggtcccaggagacatcaaagctgaatcttaagcctgatatcatatgtaagcatttaagttcttgttcaatgcgtaaaatattattcaaacatttgtttttccttgcagtgcatgaaaaggacaaaaattatgaggctaccaggcttcattttgaaaatcttaggaagagatatggaaatcctatcatcatcttaaacttgattaagacacttgagaagagaccacgtgaaatcatactccgttgggaatttgacagagcaataaagattattaatagtggtctaccaggtgaagatcatttaagatttttacattgggatcttcataagaactctcaaagcaaaagtacaaatgcccttcaagtgcttttgaaagtggcatttgaagctttgaacatgacagaattcttttattgtcaagtttccccagatcaaagggcaaagggctcccctaatttaagccctacattgaaaattggttttggtcatcatgcgtgtgatgacaaaaattgtggcaatgcagattatgttgatgatcttgatgacatttcccaagaagatacctgtggtagttctgatcctggcaatggaattgcggaagataaatttgaggtcaatggatctgctcaaataaagcgtccaaaatttcaaaagggtgtcttacgtacaaactgtatagattgtttggatcgcacaaatgttgctcaatatgcctatggcctagctgctttaggacaccagttacatgcacttggttctgtagaatctccagaagttcatctagactctcctttgtctcgacatttgatgcatttttatgaacgcatgggtgacacacttgctttacagtatggtggttcggctgctcacaataagatattctctgcgaaaagagggcacttgaagtttgccattcaatctcaagagttctttaggacactgcaacggtactacagtaatgcatatatggatgcttacaaacaagctgcgataaacttatttttaggatacttccagccacaggtgggaaaacctgcactttgggagccagaatctggtgatgagcatgtacttgatgacgagacatgtaaattgatgaagagggcaagatcagatggcagcattcttaataaaagcaaactatcaatatccagtaatggcccaaatggaattttaaagttagcatttactggttcaaaaaatgaagggcagcgtccaaaccggagttctgatacagcctgtgacaatggcatgtcaaagtcaaggtcaaaagccataagcactcctgatgtgaatatttcaactgatagtggtgttcgtgatgtaatatctgggacaacggacgatcaagcttctgggatccacgcccaggggttttcaaaggatttcgtgcagtggctcaatcaaggagaggcgttttggtactgacatcgcaaggtgggcttaccatgtaaaaccaagccacacgatggttgcacttgcaacccaaacctggttccaaaagcatcataactctcaaagaccattgcaagcaaggagggcaccatcgacgtgcacgagatttgcttgtcaaccatcagcattctcctcgcggccaaatatgatgacggggcttagagtcgcacacactgttagcagacttgtctagggaagtgtaccattctgttcattgattggagcttgctcaccaggcgggtagatagcgcatcgctgttgttcttctttaaaaaaaaaggaaagaaagaaggtggtaggtagtagtatattcttttgaagatgtaccattgtccagacatcatcgtctccatctccattgtgtaaatatatatgtatgtcccaggtgctcccacctttcgcttcgccgttgtgagagttgaggtgggcaaaaaagcatcattttcccccctcggttgggggtctttcccttctggaatcgtgtacatgtgtcttctgtggcaggcaacaggaggcgagattgttgtgtacttcccatcgtactaaacccctctgttaccgatactgcccccttggaccgttcgtcacattgcag

SEQ ID NO: 213163 - DNA, 2400 bp, Zea Mays
ctaactcctccattgctcttgaattttcactacttctgtttactcatataatcatttagagtcatattcttacttcatttaaggacaaatttgcgatatgtgggaaggatattatgctgacgctcattgctagacgctccaggcattatgctggcaccaggtatctaaagaggggtgtgaatgaggagggcagagtagcaaatgatgttgagactgagcaaattgtttatgaaaacatgcttggaccatggcaaataagctctgttgtgcagaacaggggttcaattccactattctggtcccaggagacatcaaagctgaatcttaagcctgatatcatattgcatgaaaaggacaaaaattatgaggctaccaggcttcattttgaaaatcttaggaagagatatggaaatcctatcatcatcttaaacttgattaagacacttgagaagagaccacgtgaaatcatactccgttgggaatttgacagagcaataaagattattaatagtggtctaccaggtgaagatcatttaagatttttacattgggatcttcataagaactctcaaagcaaaagtacaaatgcccttcaagtgcttttgaaagtggcatttgaagctttgaacatgacagaattcttttattgtcaagtttccccagatcaaagggcaaagggctcccctaatttaagccctacattgaaaattggttttggtcatcatgcgtgtgatgacaaaaattgtggcaatgcagattatgttgatgatcttgatgacatttcccaagaagatacctgtggtagttctgatcctggcaatggaattgcggaagataaatttgaggtcaatggatctgctcaaataaagcgtccaaaatttcaaaagggtgtcttacgtacaaactgtatagattgtttggatcgcacaaatgttgctcaatatgcctatggcctagctgctttaggacaccagttacatgcacttggttctgtagaatctccagaagttcatctagactctcctttgtctcgacatttgatgcatttttatgaacgcatgggtgacacacttgctttacagtatggtggttcggctgctcacaataagatattctctgcgaaaagagggcacttgaagtttgccattcaatctcaagagttctttaggacactgcaacggtactacagtaatgcatatatggatgcttacaaacaagctgcgataaacttatttttaggatacttccagccacaggtgggaaaacctgcactttgggagccagaatctggtgatgagcatgtacttgatgacgagacatgtaaattgatgaagagggcaagatcagatggcagcattcttaataaaagcaaactatcaatatccagtaatggcccaaatggaattttaaagttagcatttactggttcaaaaaatgaagggcagcgtccaaaccggagttctgatacagcctgtgacaatggcatgtcaaagtcaaggtatactccgacactgtctcacattaagcatataagctgtgaactagactattacaatggttctggtgattcaaatttcttggatcttgactggcttacagcttcagacaatgaaaggtcaaaagccataagcactcctgatgtgaatatttcaactgatagtggtgttcgtgatgtaatatctgggacaacggacgatcaagcttctgggatccacgcccaggggttttcaaaggatttcgtgcagtggctcaatcaaggagaggcgttttggtactgacatcgcaaggtgggcttaccatgtaaaaccaagccacacgatggttgcacttgcaacccaaacctggttccaaaagcatcataactctcaaagaccattgcaagcaaggagggcaccatcgacgtgcacgagatttgcttgtcaaccatcagcattctcctcgcggccaaatatgatgacggggcttagagtcgcacacactgttagcagacttgtctagggaagtgtaccattctgttcattgattggagcttgctcaccaggcgggtagatagcgcatcgctgttgttcttctttaaaaaaaaaggaaagaaagaaggtggtaggtagtagtatattcttttgaagatgtaccattgtccagacatcatcgtctccatctccattgtgtaaatatatatgtatgtcccaggtgctcccacctttcgcttcgccgttgtgagagttgaggtgggcaaaaaagcatcattttcccccctcggttgggggtctttcccttctggaatcgtgtacatgtgtcttctgtggcaggcaacaggaggcgagattgttgtgtacttcccatcgtactaaacccctctgttaccgatactgcccccttggaccgttcgtcacattgcag

SEQ ID NO: 213164 - DNA, 3252 bp, Zea Mays
atcatttagagtcatattcttacttcatttaaggacaaatttgcgatatgtgggaaggatattatgctgacgctcattgctagacgctccaggcattatgctggcaccaggtatctaaagaggggtgtgaatgaggagggcagagtagcaaatgatgttgagactgagcaaattgtttatgaaaacatgcttggaccatggcaaataagctctgttgtgcagaacaggggttcaattccactattctggtcccaggagacatcaaagctgaatcttaagcctgatatcatatgtaagcatttaagttcttgttcaatgcgtaaaatattattcaaacatttgtttttccttgcagtgcatgaaaaggacaaaaattatgaggctaccaggcttcattttgaaaatcttaggaagagatatggaaatcctatcatcatcttaaacttgattaagacacttgagaagagaccacgtgaaatcatactccgttgggaatttgacagagcaataaagattattaatagtggtctaccaggtgaagatcatttaagatttttacattgggatcttcataagaactctcaaagcaaaagtacaaatgcccttcaagtgcttttgaaagtggcatttgaagctttgaacatgacagaattcttttattgtcaagtttccccagatcaaagggcaaagggctcccctaatttaagccctacattgaaaattggttttggtcatcatgcgtgtgatgacaaaaattgtggcaatgcagattatgttgatgatcttgatgacatttcccaagaagatacctgtggtagttctgatcctggcaatggaattgcggaagataaatttgaggtcaatggatctgctcaaataaagcgtccaaaatttcaaaagggtgtcttacgtacaaactgtatagattgtttggatcgcacaaatgttgctcaatatgcctatggcctagctgctttaggacaccagttacatgcacttggttctgtagaatctccagaagttcatctagactctcctttgtctcgacatttgatgcatttttatgaacgcatgggtgacacacttgctttacagtatggtggttcggctgctcacaataagatattctctgcgaaaagagggcacttgaagtttgccattcaatctcaagagttctttaggacactgcaacggtactacagtaatgcatatatggatgcttacaaacaagctgcgataaacttatttttaggatacttccagccacaggtgggaaaacctgcactttgggagccagaatctggtgatgagcatgtacttgatgacgagacatgtaaattgatgaagagggcaagatcagatggcagcattcttaataaaagcaaactatcaatatccagtaatggcccaaatggaattttaaagttagcatttactggttcaaaaaatgaagggcagcgtccaaaccggagttctgatacagcctgtgacaatggcatgtcaaagtcaaggtatactccgacactgtctcacattaagcatataagctgtgaactagactattacaatggttctggtgattcaaatttcttggatcttgactggcttacagcttcagacaatgaaaggttgttcatattgtgctttcccttttttggtctatcaggtgtcgtgtctttttgtgcatggtatggtatacacagaaataacagtcagaatcatttttttattaactccttgacatcttttctcagatgtctaagcagattatcaggagacctgagcatcattgcattaactaggaaatagtccaagtagaacatacactccaaaacacatagaaacacaaacacccatgaaagcacacacatggattacaaatcgtgcaacagaaacacaaacacgcacgaagcacacacatggattacaaatcgtgccacagaaatgccgctgtgtatgggtgttagtggtttaggggttttctcgacctgtttgagaaggtttcttcttaatataatgcctgaggcttgtcttaccccctggtcgagttttttttaaaaaaaaacattgtgccacagaactacagaagagggttgagatcagcagagaactccacacactaggacatgttcacagcaagctttgtaagaccattaatctccatatcacactgcagttgagcctcttccctatcgattgcttggtattgcaccattgaccacacaagcgtagccatatttccatatcagtgaagcaagctccaaggatctcgctagagatcggaacctctcaactgtttgcttgaaaatgaaacctgacatttctgttgccaatgccatgtattttctaacactccatcctagtgtacatggaactgctggcggacatcacacatttataatcgatatgtagacgaatgtttataacctcattattatttttcgtgctgtgcattatgcttaaacaggtcaaaagccataagcactcctgatgtgaatatttcaactgatagtggtgttcgtgatgtaatatctgggacaacggacgatcaagcttctgggatccacgcccaggggttttcaaaggatttcgtgcagtggctcaatcaaggagaggcgttttggtactgacatcgcaaggtgggcttaccatgtaaaaccaagccacacgatggttgcacttgcaacccaaacctggttccaaaagcatcataactctcaaagaccattgcaagcaaggagggcaccatcgacgtgcacgagatttgcttgtcaaccatcagcattctcctcgcggccaaatatgatgacggggcttagagtcgcacacactgttagcagacttgtctagggaagtgtaccattctgttcattgattggagcttgctcaccaggcgggtagatagcgcatcgctgttgttcttctttaaaaaaaaaggaaagaaagaaggtggtaggtagtagtatattcttttgaagatgtaccattgtccagacatcatcgtctccatctccattgtgtaaatatatatgtatgtcccaggtgctcccacctttcgcttcgccgttgtgagagttgaggtgggcaaaaaagcatcattttcccccctcggttgggggtctttcccttctggaatcgtgtacatgtgtcttctgtggcaggcaacaggaggcgagattgttgtgtacttcccatcgtactaaacccctctgttaccgatactgcccccttggaccgttcgtcacattgcag

SEQ ID NO: 213165 - DNA, 2119 bp, Zea Mays
cttatctcctctccttcctgtacctttctccctcccacgccaccgcttcccctcgcggcttgcggtcgtcgctggcattccctgctccaagccttccaggctccacgatgggccatcgtgatgttcaagaacctattgaggcacattcgacaacctgtagagcaagctgttcctagctgacttcacgcttgcaggagatttggcattcaagagtaattcagttctggaagcatatgaagtctgagatacagaaggattcctttcgaaacatttatggatatgagtgctaaccttgacagatttgcagcatctttgaagaaaaaggatggttgggttatgaatatattcccttttacagaataaggaagctaaatattatatatgatcatggtttaatggggactgcccatgattggtaagattctcctggcaatcacaaaactaggctaacctcgacacatggtaagcaccaattgcaaaactgcatttttacaaagttgttttgtagcactaaattttctgtaccttttcatctcagagctactattaatttcataacaatcccattgtgctctcatgttgcagaactattctcctggcaatttgtataacgaactatgttttttttcatcattctatgtctcaagctccactttgtaatgtgtaggtttgtgaaatgggatgatgacataagtttaggttttgatacaaattctttaagaggtctattttctgatttaaaatgacaatggacgtagtttacataattcaaaatatagttgtgatacagaagagcaaacgaacattgtatttttgtgaaataagtttccaaatgtgttggccatattttttacattatagaatagttctgtaaaaaatactcgcttgttttcacctaatgcctttttgtggttctactttttttttcttttgcacactgatcagtttatttatgtagtttaattcacagaattcctatatatcttcccaagtgaatcttgggcttggagttcaaggatcaagtattacctcatctacaacaccataattttgagtccccagttctgcagaaatataaatgatggcttatttaattactttcagatggcaaaagaaattgcattgcttgaggtattttatcacatatagttgtttttcgtgcattgagaatttacacctatatgtgcagatgatatatgggcatataaatgtgaagaacaacaaattttggctgaagatgttggtgtcgaatcttttatgacaacaggagaaaataaacaagcaagtgaagatgacccaaagattctatattcgttggtattgtccttctgggctactctttttgctactgaggtgcaaagtgaatccaagtggaagcaattaggggagttagctatgtcaaatggaaaggtacagctatcgggtctatcatttatcttgcatgcacaatgccacagtctgcattgtcatatgttgatgtccagttattttttataaaagatgtttgttttcaatgaactaacaaatatagtttcaatgttccattattattttcgaataaagagatattttgttttcgttagttattacatgacactgtagacgtcatgtttattgtatcaacccgcttttacattttgtgggtcattgtgtcgaggagcagaattttttgggggagggaaaaagctaccctagcagggtctggccggtttccttttcagttgggggggtcttcaggctcggagataaatagcagtttacatatttggtttgctgcttagtcatttgaaggttaggaaactggaggcgtacatcatcagttattggtacaagaaagggcacagaccaatagagcatcctttgctcccagatgcaagaagaatagtgaagtttgacctatatgatgactcagtttcaaccagaatataatgtaatgatgtatcttgcacctgctcatcagagagtgagatctgttgtttgtagcttagtagaagattacaagggagaaacatatgatgtgtagagatttgctgtctctctctttcactctcgtagaatgcaatttttcagggaaacttaaatttatatccttttctagcccgtggatatcccatctgtg

SEQ ID NO: 213166 - DNA, 1669 bp, Zea Mays
ggcattccctgctccaagccttccaggctccacgatgggccatcgtgatgttcaagctccgtcacctccgccaagctggctcatgtcctctcctttgccactttctggggcgccgccctctagccaaccttcattagcgccatcataatgttcaggaacctattgaggcacattcgacaacctgtagagcaagctgttcctagctgacttcacgcttgcaggagatttggcattcaagagtaattcagttctggaagcatatgaagtctgagatacagaaggattcctttcgaaacatttatggatatgagtgctaaccttgacagatttgcagcatctttgaagaaaaaggatggttgggttatgaatatattcccttttacagaataaggaagctaaatattatatatgatcatggtttaatggggactgcccatgattggtaagattctcctggcaatcacaaaactaggctaacctcgacacatggtaagcaccaattgcaaaactgcatttttacaaagttgttttgtagcactaaattttctgtaccttttcatctcagagctactattaatttcataacaatcccattgtgctctcatgttgcagaactattctcctggcaatttgtataacgaactatgttttttttcatcattctatgtctcaagctccactttgtaatgtgtaggtttgtgaaatgggatgatgacataagtttaggttttgatacaaattctttaagaggtctattttctgatttaaaatgacaatggacgtagtttacataattcaaaatatagttgtgatacagaagagcaaacgaacattgtatttttgtgaaataagtttccaaatgtgttggccatattttttacattatagaatagttctgtaaaaaatactcgcttgttttcacctaatgcctttttgtggttctactttttttttcttttgcacactgatcagtttatttatgtagtttaattcacagaattcctatatatcttcccaagtgaatcttgggcttggagttcaaggatcaagtattacctcatctacaacaccataattttgagtccccagttctgcagaaatataaatgatggcttatttaattactttcagatggcaaaagaaattgcattgcttgaggtattttatcacatatagttgtttttcgtgcattgagaatttacacctatatgtgcagatgatatatgggcatataaatgtgaagaacaacaaattttggctgaagatgttggtgtcgaatcttttatgacaacaggagaaaataaacaagcaagtgaagatgacccaaagattctatattcggttaggaaactggaggcgtacatcatcagttattggtacaagaaagggcacagaccaatagagcatcctttgctcccagatgcaagaagaatagtgaagtttgacctatatgatgactcagtttcaaccagaatataatgtaatgatgtatcttgcacctgctcatcagagagtgagatctgttgtttgtagcttagtagaagattacaagggagaaacatatgatgtgtagagatttgctgtctctctctttcactctcgtagaatgcaatttttcagggaaacttaaatttatatccttttctagcccgtggatatcccatctgtg

SEQ ID NO: 213167 - DNA, 3513 bp, Zea Mays
ccgcgatgcaaccgccccgcgacgcctgcccacaccctacaccaccgaccaccgtctgcgcttcgcccccaccccacggccgaccatcgccatccgcatccaccactatgtcgcgtgcctcctctcatccaccaccgttgccccctcctcgtcgtcacggctgcccgttgcgtcctagctccacaccgatgatgacgatgaatactgcgcattctgcaagctcagccgctcggccccatagatggaaggtccgccacctcctcccgcgccgtcaatggaaggaaagcctaatctcctcgcccgcagtcctaggaaggtccaccacctcaccacctgccgcgccgcaacgtcaatggaaggcgtggttggtgcaaggagattcttctctgcgacggcaacgccaccagctccttggaggtgttgcggcttctctgcaactacacatattttggttagccttactcaacctttgcatcctgtcttacttgctttctctaactgtagggatttctcgagttaggattgtgtttgcttctgacggtgggcttaactgggtgctatgtgttactgatgtgctattgtagaattagagaactgttgggtgctatgtgttactaatacattgggaattagggaactgttgggtgcttgtgttactgatgtgcttttgtagacggtgccattttttaagtattctcaactatcgagggaggccagattgacatcatcctaactgaggttgatcgatggtgtggtgttcaccgtgaagagcctacaaggagctcaagatcttgtaaaaggtctgttttcctaggattatagttgttctttccattagcgctgctgctacgaacaggatagggtacctgctgctgaaaagcaatcctcttcccaaaaagtctcgagaagctggagcaggttctaatgcttgtcctagaaaagtgacttccaatggtccttaaagctaatgctcgctttttgaaatcacaagaagaattgagaaggtcagatgatgggtcaactacaattggtgatgcaaaggaagaggttgttgcagcaatcattgttgtcaagtcgtctactctatttcagtctatcatacgtggtaatttgcaatatgcttctctaagtgcactaagaaggctttcacttgatcctggtaatcaaacattcctccaccgagatgtgcaaggcaggctatgaagtgctataccatggagaggttggtagatatttacaagatgtactgccagaggggtttggatagctcaacaaattctgatgatttgagtggttatctagaaaaaatattaagatgtctgtatgaaaaatattttaggattttgatcttctcaacatgttaaagaaggaagaagaaatgcttctagctgtaaaggaaaagaacgtcgaaggagctcgttgaatatggcgagcaattgcttgggatattccgtgaggagcttgcaggctatgaagtgctataccatgcagaggttggcagaaactttgagtcaccacaaataatgactgaaatagtagtgaataaaaaggaagcaaatagctgattgatcaagttgtccattacttggaggaaagattgagagaattcgatgaagagaaaagaagaactaaataagtgccaacagctagaaaaacagagaagatcacttgagtatactattttggaccatgagcgcccctgcgtagctccataagttccaccgccaccaccaggccctcaagataattgcagcaattgatccaaagctacttcaacattggtacgaatcctaagcaattgtggatgttcttgcccatgacccaatggggcttcttattcttttatatcctgtttgaccataggttgtctagttcagccctcttcagatgtacattaagcataaatgatcttaatctatctgaatcatcaaatgctaaagtagatgttgtaggatgtatttgtgcttttctttatgtcacattcaatacattctctctagagcaaattatgattgtactggcctaccgaactgaaactgttcctgcactatggaacttcataaagtggtgccttgcaaaccgaagatggcaacttttttaaagtttgcatcttcattacctgctgatgctcctggttggctccttcccatgtatgtattctgtcccatatagaagtaaggcagtcccccttccttactgtgaaaattctgtcagccaaaaatgttttttgtaacgacttattttatcaatttattgtgtaaaagtgcaacagcttccctcagatgctttgtctttgctccccataccaggcacatgttgaagatcattgataatggggagttctatgaacaagagaaaccccttacttttatatgatttgaagtccttggttctcattttaaagcaggtggaaattctaggaaaatctaaaaggtttttgatgagatctaggaggagaggacagccatggcgctcacgtggcggcctccctcttctcgtagaagggcaagacaaggtccaatcaggaagtcgtcatactctatcaggtctgcgattttgttttcatgtaatcgttctgcactaatattttatctaataatttatgtgtcgatgaaatcgcaacgcacgaacatttaactatctcacttcaatcagggcaactaacaagagaccatgaagttgaacaatgttttggcaagtgttaatttgaaattcatatgattgttcacgtcatatggtatatggatgatactgttttgggcaaaaaccaacagagtccttgtttgcacatgtactattcagtggttattatttatttatttattcacatcacatataaccaattagtgtcattatcttgcgaggaggacatcaaactatcttagagagtagatgttactgtttaatatcaatgcctactggatagaacactgtattttcagttataacatggtttatggaatatgtgagctaacatgcaatatatggcatctgtatcatttcaaaattttcatctgcttctcctgttccttggagcacaatggatatatgtgttgctttacccattgcttgtttgtgagggagagatgctctaaacaggcgttggagctgctaggcgacatgtgtgggagtggtgttcagcctaacatagttgtctacaactgcttcatgggtattgcaattcgtgagatattaagatcaatgataatatgtgttatttcgtttttatgtaatcattgtgcataaatttgttatcaaataatttgtatgccatcacaacacacggacataaacatgtattgcttcaccatcatataatttcctttgtatttaacaacacaccctgttgtcttccatgtattcctttggtacttgtacacatttcaaatccatatccaatagtgattgtttgtgtcatggattttcaaatatagtatgctctatgctgaatcacaatgagtacatgtttgaaccaatatattttgattatgttagtttttcaccatatcttgc

SEQ ID NO: 213168 - DNA, 1474 bp, Zea Mays
ggagtacctaatattggattttatctgtatcctaccacaactttcttggaaaaaggtttgttgttgttattgtagatgcattaaaccatttaaatttgttgtagatggaaggtccgccacctcctcccgcgccgtcaatggaaggaaagcctaatctcctcgcccgcagtcctaggaaggtccaccacctcaccacctgccgcgccgcaacgtcaatggaaggcgtggttggtgcaaggagattcttctctgcgacggcaacgccaccagctccttggaggtgttgcggcttctctgcaactacacatattttgacggtgccattttttaagtattctcaactatcgagggaggccagattgacatcatcctaactgaggttgatcgatggtgtggtgttcaccgtgaagagcctacaaggagctcaagatcttgtaaaaggtctgttttcctaggattatagttgttctttccattagcgctgctgctacgaacaggatagggtacctgctgctgaaaagcaatcctcttcccaaaaagtctcgagaagctggagcaggttctaatgcttgtcctagaaaagtgacttccaatggtccttaaagctaatgctcgctttttgaaatcacaagaagaattgagaaggtcagatgatgggtcaactacaattggtgatgcaaaggaagaggttgttgcagcaatcattgttgtcaagtcgtctactctatttcagtctatcatacgtggtaatttgcaatatgcttctctaagtgcactaagaaggctttcacttgatcctggtaatcaaacattcctccaccgagatgtgcaaggcaggctatgaagtgctataccatggagaggttggtagatatttacaagatgtactgccagaggggtttggatagctcaacaaattctgatgatttgagtggttatctagaaaaaatattaagatgtctgtatgaaaaatattttaggattttgatcttctcaacatgttaaagaaggaagaagaaatgcttctagctgtaaaggaaaagaacgtcgaaggagctcgttgaatatggcgagcaattgcttgggatattccgtgaggagcttgcaggctatgaagtgctataccatgcagaggttggcagaaactttgagtcaccacaaataatgactgaaatagtagtgaataaaaaggaagcaaatagctgattgatcaagttgtccattacttggaggaaagattgagagaattcgatgaagagaaaagaagaactaaataagtgccaacagctagaaaaacagagaagatcacttgagtatactattttggaccatgagcgcccctgcgtagctccataagttccaccgccaccaccaggccctcaagaaaactgcaattatccatttgttttggctaaatgaggggcatatgatgatgatgagacacccatggatattgatattaaaattaatcttg

SEQ ID NO: 213169 - DNA, 1113 bp, Zea Mays
cgaacccttcccgtctccaaccgtcgccatctccatccgcaatttaaccactcggccgccgctgagtcagagtcagtagcgagaagcagagcggctctgctcctctcggtcatgcggcgcccacacaacgccgtccaaccatcagcaatgcctcctgcagttggactccttcccctcctcctcctcctcctcctcttccatctccccgtctccctctgctcccaccaccaccatcacagcaccccacccgcttctccgtccccgtccccgtccccagcaccctcctccgcgccgctagcggtgctcctggcctgcaacgccacccggttccagccggcctgcgtctccacgctctccggcgccgcgcccgatgcctccaccgccgacctcctcgccgcgacgctctcggcgctccgcgcccgcctcccgcccgccgtctccacggccaagtccgtgctggcgtcctcctccaacgtgaacctctccaacgccgccaccaactgcctcacgttcctcgcgctctcctcccgccgcctctcgccgtccccctcggcgccgccgctgctctccgcctccacggcgctgctccacctctacgactgctggtccgcgtacaagtacgtcaacttctcccgcaccatctccgacgccatggcctacctcgacgacaccatcaccgtgaacagcaactacatctccatgctcgccgcgcggcagcggtacggcgacgagacgtccctctggcggcccccgcagacggagcgcgacgggtactggcccccgcccgccgcgagctcgggtgccgacgtggacgcgctcggcgtgcccaagggcctgccggcgaacgcgacggtgtgcggcgccgggtgcgactacaggacggtgcgggaggcggtggcggccgcgccggactacggcgacggcgcgttcgtggtgcacgtgaaggagggggcgtacagggagacggtgagcgtgccgtgggagaagaccaacgtggtcctcgttggcgacggcatggggaagacggtcatcactggcgatctcaacgctgacacgtccggcgtgtccaccttcaacaccgccaccgtagcgcccgggacgctactacagaag

SEQ ID NO: 213170 - DNA, 4802 bp, Zea Mays
ccggccggaatcgccgtccagtccaaaccatttggagctgcacccgaggaccgcctttttatcaacgccaccgtcaccgcctctctgtctctggccgtctgggataccatacacacgcatggttctgctgcccgcgcctgcatggtatggacgacttctccttctcccgctccggcacgcaccagccgccgccgcgccggcagcaacgtcgcagcagcgccttctccaccccggacaactccacgtccttcgccgccacgcctcggcggacgccggggcgccggggcggcgccctcgatgacgcgtcgtggcagagctccgtgtcgtggcagccggccgacacgtcgtgggcgcagccgcacgggctgggcgcggcggtcggcccgtgggcgccggccgggtcggacgccgcgtcgcgccgcgggccggcgctgttccgccgcaccgccagggactactacctctccaaacgctccagcaggatgatgatgcaccaccaccgctcgtccgcggcgcagcagtcgcggtccgtggcggcggcggcggcttctgctgccggcggcggcgggaagcggctggagctgcagagcgtggtcacggacgccagccgcgccctcgtcgtcgcgcccaacacctccttcgccagcaacgacgacgtcatcatcagcaccgccacggccggccccgccgccaaggccgtggtcaagtacagcgacgacacgcactacgtgtcccgtgaggtctccttctcgcgcgacaaccgcgacaagctctacgtcccgcctaggcggggccggaacgacgcgccgccgagcttcggctacgacgacgacgccagcgccacgtcctacagccggagccagcactacggcgggggtgtcgacgaggacgactacgacttggatttagatttggacttggacgacgacgacggcgagatcgaggtgagggtcgggaagcccgtcagcctcgccgggctgttcaagtactccgcaccactcgacgtcgttctgctcgtcctcggctgcgtcggcgccatggtcaacggcggctccctgccctggtactcgtacctcttcgggaatttcatcaacaaggtcgtcaacaccgataagtcgcagatgatgaaggacgtcaagcagatcagcttctacatgctgttcctggctgccgccgttgtcgtcggcgcgtatcttgagatcatgtgctggaggatgatcggcgagaggtcggcgctgcgtatgcggcgtgagtacctcaaggcggtgctgaggcaagaggtcggcttcttcgacacggaggtgagcaccggcgaggtgatgcagagcatctccagcgatgtcgcccaaatccaggacgtcatgggagacaagatggcaggattcgtgcaccatgtcttcaccttcatcttcggctacgcggtgggcttcagcaagtcgtggaagatcgctctcgccgtcttcgccgcgacgcccgtgatgatgtcgtgcggcctcgcctacaaggccatctacggcggcctcaccgccaaggacgaggcgtcgtacaagcgcgccggcagcgtggcgcagcaggcgatcagctcggtccggacggtcctctccttcgtcatggaggaccggctggccgacaggtacgccgagcggctggacagggcggcgcccatcggcatcaagatggggttcgccaagggcgccggcatgggggtcatctacctggtcacctactcccagtgggcgctggcgctgtggctcggctcgcgcctggtcgcccggggcgacatcaagggcggcgacgccatcgcctgcttcttcggcgtcatggtcgggggcagaggcctggcgctgtcgctgtcctactatgcgcagttcgcgcagggccgggcggcggcggggcgggtgttcgagatcgtcgaccgggtgccggacatcgacgcctatggcggcggcggccggtcgctgtcgtcggtgaggggccggatcgagttcaaggacgtggagttcgcgtacccgtcacggccggaggccatggtcctgtacaacctcaacctgaccatcccggcgggcaagatgctggcgctggtgggcgtcagcggcgggggcaagtccaccatgttcgcgctgctggagaggttctacgacccgacgcggggcaccatcacgctcgacggccaggacctgtcgtcgctcaacctgaggtggctgcgctcgcagatggggctggtcgggcaggagcccgtcctgttcgccacctccatcatcgagaacgtgatgatggggaaggaggacgcgacgcggcaggaggccatcgccgcctgcgccaaggccaacgcgcacaccttcgtcctcggcctgcccgacggctacgacacgcaggtcggcgaccgcggcacgcagctgtcggggggccagaagcagcgcatcgccctcgcgcgcgccatcatccgggacccgcgcgtgctgctgctcgacgagcccaccagcgccctggacgctgagtccgaggccgtcgtgcagcagtccatcgagcgcctctccgccggccgcaccgtcgtcgtcatcgcgcaccgcctcgccaccgtccgtaacgccgacaccatcgccgtgctcgaccgcggggccgtcgtcgagtccggccgccacgacgacctccttgcccggggcgggccgtacgctgccctcgtcaagctcgcgtccgacagcggcaggtcgtcgggcgacgccggcagaaaatcacctgcagctcccgccggcgccgccacggcgtacaacagcttcaccgacgactctgccgtctacgacgacatgtcttcgttgtccatgtccaagccaaggtacggaggcggcgctcgtcggacgtacccccgtggggaggcggaggaggacggtgtcggaaagaccaaggacgacgcgagcaatagcaaggtcagtgtatcagagatatggaagctgcagcggcgggaaggcccgctgctggtcctgggcttcctgatgggcataaacgccggcgcggtgttctcggtgttcccgctgctgctggggcaagccgtggaagtgtacttcgactccgacacgtccaagatgaagcggcaggtgggtgctctggcgacggccgtggtgggtctcggcgtggcgtgcatcctggccatgacggggcagcaggggctgtgcgggtgggcgggcgcccggctcacgatgcgcgtccgtgaccgcctgttccgcgccatcctgcggcaggagcccgcgtggttcgacgaggaggacaacgcgatgggcgtgctggtgacacggctggcgcgggacgccgtggcgttccggtccatgttcggggacagggcggacgacggcgcgtacgcgcgggccagcagcatcgccgccggcgccgtgtcgaacgtgcgcacggtggccgcgctctgcgcccagggcaacatcgtcggcgccttcaaccgggcgctggacgggccggcgtccaaggcccggcggaggtcgcaggtcatgggcgtcatcctcgggctctcccagggcgccatgtacggcgcctacacggcgacgctctgggccggcgcgctcttcatcaagagggacctgtccaagttcggcgacgtgtcgaagatcttcctcatcctcgtgctgagctccttctccgtgggccagctggccggcctcgcccccgacacgtccggcgcgccggtggccatcgccggcatactgtccatactgaagcggcgaccggcgatcagcgatgaagacggcagcggcagcggcaagcggcgaaggatgatcaaggacgggaggcccatcgaagtggagctgaagagagtggtgttcgcgtacccgtcgcggccggacgtgacggtgctgaacgagttctcggtgcgcgtgaaggcggggagcacggtggcggtggtcggagccagcgggagcggcaagtcgaccgtggtgtggctggtgcagcgcttctacgacccggcgggtgggaaggtgatggtgggcggcatcgacgtgcgggagctggacctcaagtggctccgtggggagtgtgccttggtatcccaggagccagctctgttcagtggatccatcagggagaacatcggcttcgggaacccgaaggcttcgtgggccgaaattgaagaggctgccaaagaggccaacatccacaagtttattgctgggctgccacaaggctacgacactcaggtgggagagagtggggtccagttgtcaggagggcagaagcagaggatcgccatcgcacgggcaatcgtgaagcagtcgaggattctgctgctagacgaggcgagcagcgcgctggacctggagtccgagaagcacgtgcaggaggccctgaggaaagtgtcacggcgtgcgaccaccatcgtagtggctcaccgtctgtccacggtccgcgaagccgaccgcatcgccgtcgtcgccggcgggagggtcgtcgagttcggcggtcaccaggagctcctggccacccatcgcgacggcttgtatgccgccatggtcaaggcggaggtggaggcgcaggcgttcgcgtagaagatacataatctgatttctcaattcttttttttccaggacacagtattttggaatgcggatgctgctaaggattgaataaagtttgtagatgctgttttagtcttcaaattttgtgtggaacttacacgagcgggccgctagctacccgtacagacgagagcgtgttacgcgccgtaattaagctaataggcgaaaggttattattgggattggaatactgtttgacgagataattggacttttgccattcac

SEQ ID NO: 213171 - DNA, 2191 bp, Zea Mays
atcatatattctcgtgcatgttaagtttgttgaagtaatggctcctgacggaaactcggagcaaaatttgtagtgtgccactgttccgcgtcttttctattatataaaagctgaccagtgaccagcatcgggaggagcccggccgcctagggaagcgagaagcacacacagagaagtttcttcctagagagagagggagagagacaagcgcgcgcatggccgccatggagtacagcagcctcttgcctctggcgctgctggcagggtggtgcgccctcgcggcggcgctagtcctggccatttctgcgtggctgcagcggccgcgccgcgtcgcagaggccttccgtcggcagggcgtggacggcccgccgccgtcgtcgttcctgtcgggtaacctctcggagatgcaggcgagggcggccgccgcggcggtggcggaggccgccggcggccgggacttccagaaggaaggcttcgacgactactgcatgaagatcttcccctacttcgagaagtggaggaaagcctacggcgagacgtacctgtactggctacgccgccggccggcgctgtacgtgtcggacccggagctgatccgcgagatcgggcgttgcgtgtcgctggacatgggcaagcccacctacctgcagaagggccaggagcccctctttggccgcggcgtcctcaaggccaacggcgccgactggcatcgccagcgcaagctcatcgcccccgagttctacatggcaaaggtcaagggcatggtggagctgatggtggacgcggcgcagccgctgctgacgtcgtgggaggacaaggtcgccgccgcgccgggcggcgtcgcggagctcgacgtggacgaggacatccggagcttctccttcgacgtcatctccagggcctgcttcgggggcgactactccagggggcgggagatcttcctccggctcagggcgctgtcgggcctcatgtccgagaccagcgtcatcttcaccatcccgtcgctcaggcacctgcccacgaggaagaaccggaggatctggaagctcacgcacgagatccggtcgctgatcctgcagctggcgagcgagcgcaaggcggcagcggcggcgctggcgcccggccgcgacttcctgggctccatcatcgacagcagccgggaccagccgcgcgcggacgacttcgtcgtggacaactgcaagaacatctacttcgcgggccacgagacgagcgcggtcaccgcgacgtggtgcctcatgctcctcgccgcgcacccggagtggcaggaccgcgcgcgcgccgaggcgctcggcgtctgcggcgccgcggcggcgccggacttcgacgcggtcgccaggatgaagacgctgcacgcggtggtcctggagacgctgcgcctcttcccgccgtcgtcgttcgtggtgcgtgaggtgttccgcgacatgcagctcggcaggctccgcgcgcccaagggcacctacctcttcgtccccgtctccaccatgcaccacgacgccgccgtctggggccccaccgctcgacgcttcgaccccggcaggttccgcgacggcgtggcggccgcgtgcaagcacccgcaggcgttcatgcccttcggcctcggcgcgcgcacctgcctcggccagaacctcgcgctcgtcgaggtcaaggtgctcgtggcgctcgtcctcgcgcgcttctcgcttgcgctgtcgccggactacaggcacgcccccgcattccggttcatcatcgagccggagttcgggctgcgcctcctcctgcgccgccgcctcggccactgatgctgatacgggagtgcgagtagagatgttcagatgtttggagttgcgttttgtaaaaaggcgtacactagctaacgtgaaaaaaaaagtaagtgcgtgcaccgttgaacacacaagcaacaaacaacaacaagaaggttatacgtacatgaaggacggtaataaaatcccacaggttgctaggttaaaatcacgaaagcgcatagtggaggctgcgacgaattcaacatttagcccatcaagtgtgcaaatgaactcatacctataaccagtttgggactcgggagggctcctgcctcctgctactgtcaaacggcacctaaaaacagctcctaatgaagtaaagagcactagtgttggggacttgttctcaaatgctatgaattaat

SEQ ID NO: 213172 - DNA, 1959 bp, Zea Mays
cctgcaatcactgctagtccgcaggcaaccgagagcccgagaccgcccaggtgcccaccactccaccagccaaccctagagcctctccagtctccactgctcggccgccgcctgccgcagcccgccgtccactggtcccgcctcccggcgtccgctccacgcctccactgctcccggcgtccgctccattgctaccatcgtccggcgttctgctcctgcgccctccctttgattcgttgccagttgtagtgtccgggcagatttgagctgtggcagcaagcaaggattgacgaagcgtgcgttcccatcgcaccaccatgggctacacagagatcgacatccacccctctgggagcggcaagaacacacctctccatctttcggtgcttggtggatcaccgtctaaacgatccaccaccagaaccgcccaaccccaagatagtctcctccatccaacctttcctacgtaggcagctccatctcagtcgttgtacccgttcaatggcgagctggtggcagcgatgtaggagatgatccatgccgaggtgcacaagtacatgttagtggacggcacctgccaaagatacaccgtttctactggtacacattttattttttatgtttttcagttggagaaaacatttaagacaacattttcatcgtttgttctccatatggggcttgtttcacgccacttgaaggaagaagggaatggtggtgttaagttcggacaatacatctacacatcttggagcatcggcatcaatgttctcaatcttctcaaatttcaaattatactggtcattactttgaccattagaataaaatccctataaaacgtggccatgcaatcactggttgtaaactgatgggcagaatgttgtaggatggattggctcaagaactaatatagcttacttatgacaatgtagtaattcatgaagttattgttccttatgttcatggagtttgttctgctaggtttttatgcttttaatttctatttccttaacgaaacctcaggcaccttaaagacagcttggatgattggtttcatgaacagctagagaacttggatgatgattatcttgtgtttgattgccctaatatattctcaaatcatcttttcatgctttagttgtttcttaatagttgcacagtttcatctcactcatattcttgccacttacatgtatgtgacaaaacagacaatccgtcttttttattgcttatggcgttgtgcattatacatgtccaccaattatatacaaataccatttgtgggttacctctggtgtgtttaggtattcctcagattcctgacattttttctgtctttaaatgtcatatcactattaaaaaaattgatttttgttgtctaaaataccacaactacttttctaggtgcgagctgcaatcaaagttaaggcattagtcatcatttgcttcacctcttctggacaggctgcaagggtgttctggacaaagaaagcttgtaccttaaaacaagaggatacaagaagctggagtggttgtctaaaggcttttgaactgcttgaagcattagtgtagctttggtgattttgtgactgatcagctctggagcagctagagtgatgtagttgtgggcttttgaacaatagctggagtgatatgaaacattagtgatgtggttgtgggcttttgaactgcttcaagctggagtgatgtcgctgtgttgcttttgtgactgatcatctctggagcttttgtgaatgatctaactagctatatgtaaatgatctagttgtgaatggtattataattgtgatgattttgtgaatatataattgtggtgcttttgtgtttatgtgatggatctatgactggtatactgattaactgtgtatgtctttatggtttgtgtataaaaatctgcgatttgtggtgcttaattaaatatatattattattactaac

SEQ ID NO: 213173 - DNA, 1781 bp, Zea Mays
caaccgagagcccgagaccgcccaggtgcccaccactccaccagccaaccctagagcctctccagtctccactgctcggccgccgcctgccgcagcccgccgtccactggtcccgcctcccggcgtccgctccacgcctccactgctcccggcgtccgctccattgctaccatcgtccggcgttctgctcctgcgccctccctttgattcgttgccagttgtagtgtccgggcagatttgagctgtggcagcaagcaaggattgacgaagcgtgcgttcccatcgcaccaccatgggctacacagagatcgacatccacccctctgggagcggcaagaacacacctctccatctttcggtgcttggtggatcaccgtctaaacgatccaccaccagaaccgcccaaccccaagatagctccatctcagtcgttgtacccgttcaatggcgagctggtggcagcgatgtaggagatgatccatgccgaggtgcacaagtacatgttagtggacggcacctgccaaagatacaccgtttctactgtttttcagttggagaaaacatttaagacaacattttcatcgtttgttctccatatggggcttgtttcacgccacttgaaggaagaagggaatggtggtgttaagttcggacaatacatctacacatcttggagcatcggcatcaatgttctcaatcttctcaaatttcaaattatactggtcattactttgaccattagaataaaatccctataaaacgtggccatgcaatcactggttgtaaactgatgggcagaatgttgtaggatggattggctcaagaactaatatagcttacttatgacaatgtagtaattcatgaagttattgttccttatgttcatggagtttgttctgctaggtttttatgcttttaatttctatttccttaacgaaacctcaggcaccttaaagacagcttggatgattggtttcatgaacagctagagaacttggatgatgattatcttgtgtttgattgccctaatatattctcaaatcatcttttcatgctttagttgtttcttaatagttgcacagtttcatctcactcatattcttgccacttacatgtatgtgacaaaacagacaatccgtcttttttattgcttatggcgttgtgcattatacatgtccaccaattatatacaaataccatttgtgggttacctctggtgtgtttaggtgcgagctgcaatcaaagttaaggcattagtcatcatttgcttcacctcttctggacaggctgcaagggtgttctggacaaagaaagcttgtaccttaaaacaagaggatacaagaagctggagtggttgtctaaaggcttttgaactgcttgaagcattagtgtagctttggtgattttgtgactgatcagctctggagcagctagagtgatgtagttgtgggcttttgaacaatagctggagtgatatgaaacattagtgatgtggttgtgggcttttgaactgcttcaagctggagtgatgtcgctgtgttgcttttgtgactgatcatctctggagcttttgtgaatgatctaactagctatatgtaaatgatctagttgtgaatggtattataattgtgatgattttgtgaatatataattgtggtgcttttgtgtttatgtgatggatctatgactggtatactgattaactgtgtatgtctttatggtttgtgtataaaaatctgcgatttgtggtgcttaattaaatatatattattattactaac

SEQ ID NO: 213174 - DNA, 1952 bp, Zea Mays
accgagagcccgagaccgcccaggtgcccaccactccaccagccaaccctagagcctctccagtctccactgctcggccgccgcctgccgcagcccgccgtccactggtcccgcctcccggcgtccgctccacgcctccactgctcccggcgtccgctccattgctaccatcgtccggcgttctgctcctgcgccctccctttgattcgttgccagttgtagtgtccgggcagatttgagctgtggcagcaagcaaggattgacgaagcgtgcgttcccatcgcaccaccatgggctacacagagatcgacatccacccctctgggagcggcaagatgtgatagatattagtatgaaagataaaaactagaatgctatgcctgtcagaggagctttcttcagtttcagaacacacctctccatctttcggtgcttggtggatcaccgtctaaacgatccaccaccagaaccgcccaaccccaagataggcagctccatctcagtcgttgtacccgttcaatggcgagctggtggcagcgatgtaggagatgatccatgccgaggtgcacaagtacatgttagtggacggcacctgccaaagatacaccgtttctactgtttttcagttggagaaaacatttaagacaacattttcatcgtttgttctccatatggggcttgtttcacgccacttgaaggaagaagggaatggtggtgttaagttcggacaatacatctacacatcttggagcatcggcatcaatgttctcaatcttctcaaatttcaaattatactggtcattactttgaccattagaataaaatccctataaaacgtggccatgcaatcactggttgtaaactgatgggcagaatgttgtaggatggattggctcaagaactaatatagcttacttatgacaatgtagtaattcatgaagttattgttccttatgttcatggagtttgttctgctaggtttttatgcttttaatttctatttccttaacgaaacctcaggcaccttaaagacagcttggatgattggtttcatgaacagctagagaacttggatgatgattatcttgtgtttgattgccctaatatattctcaaatcatcttttcatgctttagttgtttcttaatagttgcacagtttcatctcactcatattcttgccacttacatgtatgtgacaaaacagacaatccgtcttttttattgcttatggcgttgtgcattatacatgtccaccaattatatacaaataccatttgtgggttacctctggtgtgtttaggtgcgagctgcaatcaaagttaaggcattagtcatcatttgcttcacctcttctggacaggctgcaaggtaattctgacataatgaggaagtccctcttcgtggtcggagaaattgggggcaatgactacaacctacctcttcactagagtgccatttgaaaagggtgttctggacaaagaaagcttgtaccttaaaacaagaggatacaagaagctggagtggttgtctaaaggcttttgaactgcttgaagcattagtgtagctttggtgattttgtgactgatcagctctggagcagctagagtgatgtagttgtgggcttttgaacaatagctggagtgatatgaaacattagtgatgtggttgtgggcttttgaactgcttcaagctggagtgatgtcgctgtgttgcttttgtgactgatcatctctggagcttttgtgaatgatctaactagctatatgtaaatgatctagttgtgaatggtattataattgtgatgattttgtgaatatataattgtggtgcttttgtgtttatgtgatggatctatgactggtatactgattaactgtgtatgtctttatggtttgtgtataaaaatctgcgatttgtggtgcttaattaaatatatattattattactaac

SEQ ID NO: 213175 - DNA, 2367 bp, Zea Mays
cgagagcccgagaccgcccaggtgcccaccactccaccagccaaccctagagcctctccagtctccactgctcggccgccgcctgccgcagcccgccgtccactggtcccgcctcccggcgtccgctccacgcctccactgctcccggcgtccgctccattgctaccatcgtccggcgttctgctcctgcgccctccctttgattcgttgccagttgtagtgtccgggcagatttgagctgtggcagcaagcaaggattgacgaagcgtgcgttcccatcgcaccaccatgggctacacagagatcgacatccacccctctgggagcggcaagatgtgatagatattagtatgaaagataaaaactagaatgctatgcctgtcagaggagctttcttcagtttcagaacacacctctccatctttcggtgcttggtggatcaccgtctaaacgatccaccaccagaaccgcccaaccccaagatagctccatctcagtcgttgtacccgttcaatggcgagctggtggcagcgatgtaggagatgatccatgccgaggtgcacaagtacatgttagtggacggcacctgccaaagatacaccgtttctactggtacacattttattttttatgtttttcagttggagaaaacatttaagacaacattttcatcgtttgttctccatatggggcttgtttcacgccacttgaaggaagaagggaatggtggtgttaagttcggacaatacatctacacatcttggagcatcggcatcaatgttctcaatcttctcaaatttcaaattatactggtcattactttgaccattagaataaaatccctataaaacgtggccatgcaatcactggttgtaaactgatgggcagaatgttgtaggatggattggctcaagaactaatatagcttacttatgacaatgtagtaattcatgaagttattgttccttatgttcatggagtttgttctgctaggtttttatgcttttaatttctatttccttaacgaaacctcaggcaccttaaagacagcttggatgattggtttcatgaacagctagagaacttggatgatgattatcttgtgtttgattgccctaatatattctcaaatcatcttttcatgctttagttgtttcttaatagttgcacagtttcatctcactcatattcttgccacttacatgtatgtgacaaaacagacaatccgtcttttttattgcttatggcgttgtgcattatacatgtccaccaattatatacaaataccatttgtgggttacctctggtgtgtttaggtattcctcagattcctgacattttttctgtctttaaatgtcatatcactattaaaaaaattgatttttgttgtctaaaataccacaactacttttctaggtgcgagctgcaatcaaagttaaggcattagtcatcatttgcttcacctcttctggacaggctgcaaggtaattctgacataatgaggaagtccctcttcgtggtcggagaaattgggggcaatgactacaacctacctcttcactagagtgccatttgaaaaggtccgctcattcacaccaagtgtcattcttcactagagtgtcattcttcactttatgattccatggtttgaatgaccaatcatttatgatgtccgtgctcgactgattccttgtactatggtattcaatataaggtattcaatattttcattcatgctgctgaggatgaggtttatatcttatcttgtttatgtttatatttatatgagccatcaacttaatgatgattaaccttgattgcaccagctgaagttggtgcataagttttgcctcgcactaatttgatgtacttttttctagggtgttctggacaaagaaagcttgtaccttaaaacaagaggatacaagaagctggagtggttgtctaaaggcttttgaactgcttgaagcattagtgtagctttggtgattttgtgactgatcagctctggagcagctagagtgatgtagttgtgggcttttgaacaatagctggagtgatatgaaacattagtgatgtggttgtgggcttttgaactgcttcaagctggagtgatgtcgctgtgttgcttttgtgactgatcatctctggagcttttgtgaatgatctaactagctatatgtaaatgatctagttgtgaatggtattataattgtgatgattttgtgaatatataattgtggtgcttttgtgtttatgtgatggatctatgactggtatactgattaactgtgtatgtctttatggtttgtgtataaaaatctgcgatttgtggtgcttaattaaatatatattattattactaac

SEQ ID NO: 213176 - DNA, 1697 bp, Zea Mays
cgagagcccgagaccgcccaggtgcccaccactccaccagccaaccctagagcctctccagtctccactgctcggccgccgcctgccgcagcccgccgtccactggtcccgcctcccggcgtccgctccacgcctccactgctcccggcgtccgctccattgctaccatcgtccggcgttctgctcctgcgccctccctttgattcgttgccagttgtagtgtccgggcagatttgagctgtggcagcaagcaaggattgacgaagcgtgcgttcccatcgcaccaccatgggctacacagagatcgacatccacccctctgggagcggcaagctccatctcagtcgttgtacccgttcaatggcgagctggtggcagcgatgtaggagatgatccatgccgaggtgcacaagtacatgttagtggacggcacctgccaaagatacaccgtttctactgtttttcagttggagaaaacatttaagacaacattttcatcgtttgttctccatatggggcttgtttcacgccacttgaaggaagaagggaatggtggtgttaagttcggacaatacatctacacatcttggagcatcggcatcaatgttctcaatcttctcaaatttcaaattatactggtcattactttgaccattagaataaaatccctataaaacgtggccatgcaatcactggttgtaaactgatgggcagaatgttgtaggatggattggctcaagaactaatatagcttacttatgacaatgtagtaattcatgaagttattgttccttatgttcatggagtttgttctgctaggtttttatgcttttaatttctatttccttaacgaaacctcaggcaccttaaagacagcttggatgattggtttcatgaacagctagagaacttggatgatgattatcttgtgtttgattgccctaatatattctcaaatcatcttttcatgctttagttgtttcttaatagttgcacagtttcatctcactcatattcttgccacttacatgtatgtgacaaaacagacaatccgtcttttttattgcttatggcgttgtgcattatacatgtccaccaattatatacaaataccatttgtgggttacctctggtgtgtttaggtgcgagctgcaatcaaagttaaggcattagtcatcatttgcttcacctcttctggacaggctgcaagggtgttctggacaaagaaagcttgtaccttaaaacaagaggatacaagaagctggagtggttgtctaaaggcttttgaactgcttgaagcattagtgtagctttggtgattttgtgactgatcagctctggagcagctagagtgatgtagttgtgggcttttgaacaatagctggagtgatatgaaacattagtgatgtggttgtgggcttttgaactgcttcaagctggagtgatgtcgctgtgttgcttttgtgactgatcatctctggagcttttgtgaatgatctaactagctatatgtaaatgatctagttgtgaatggtattataattgtgatgattttgtgaatatataattgtggtgcttttgtgtttatgtgatggatctatgactggtatactgattaactgtgtatgtctttatggtttgtgtataaaaatctgcgatttgtggtgcttaattaaatatatattattattactaac

SEQ ID NO: 213177 - DNA, 2083 bp, Zea Mays
ctggccctccgccgtctgccatgacgagatccgcgtccccgagcgtggacgctccacgcctccgcctcccggacgccggcgaggtgcgtccggcgtccctgctgcacacaacctgacaacctacttctctcttctatctaccacaagatccttccgccgcctccccctcctgacagagcagaggcagagctgaggcccggcctggccgggcttcggcggcccagcccaaataacccgacgggtccgcatcctgagctccgcctccacacaccttggcacctcgccctcgcctccagctccgcacgtcccgtcgcccgcttccacctccacgcgacgcgacggctcgccttcacctcctcgccgccagacgcgcccgccgccacccagcgagccggcagccgcccgctatcccaggcttcgttttcttgttggctccgccactgtgacagatggctgcggggggcgggcggtgcttgctcgccttggcgctcgccgccgcttggatctccggcgcggtggtcgccgcctcatcgtcgggtgagcagagccggggccgtgatgcgcgttcatgtatagtgtctggaaagggctacggaaagcgttcgtttttagctcatgctgaattttaccgtacctgtaagctgaaggcggaagccgcacacccgtcaaatgcatgccctgctctagaacgtacattggtggtgcacatctggacaccttgacgggccagcttgctcagcgtcgtgacatagtggaaatgtctgattctggtgaattgtgcaaaggacttgctgatgatgtcgaagttcctatgctttcaaaactacgccggcaactggttggtaaaggttctcaccgccgtttagtctattctgtggattttggtgcccatgaaggtgctatggttaatttccttgatcactacgatgcccatctggtgatatttgaaaaacttcctgatggagtgtttgccgacccatttgagctacagcattttgttgagcgcaaagttttcgttgatgttgctgtttttggagacgccaaccttgaactgcccacagctctatccaatgggtcatctgttgagatccattttgatctcaggcgaatcatttcaatcaactgtaaccttgtaatagagatgcctctccatgctagatacccgcctcttgatgccagtggctatgccacagtggagtttggtagcgcagatctattcctccgctacagaaaaaaggacatccattctggttcctgtctttgggtgatcaataatctcaaagctgcacccctggagaaagctgcatggcgcataccctgtggagacgaggcccacataggatttgtatctagcatcacgtttctttcagctcttgtttgctccatgtccattgtcttggcttctctcattttttgacgtcttagggtcctatcagaccttttttttgtttacataaatactgaagtgcgagacaggagaattctcttcatgcatccacacatccttgcaaatgacaacccagttgccattaattttgctagctttagtggagtctttgcaagttccattgaacggagttgccaacttcgaatcacatacagaccagaaccagataagggtgttcctctttgtgatggaaaaaggagtcccaaaagaaaaatcatctacttcaagttcggtttgtgctcatgagtcatgaggcagtcagagccagaagctgaatgccaccatcatcttggaagaagacttgatccgctggctggaaagaaatcgaaacctaaccagtctgtcggatgctgacaaacattactgcagagcacctgatgtcctggttgatgcctgacagaaataacaaatactactaaaaagaatacaattttagatgcactcttaattgaaacgtgtaaaagtttgatcagatatatagatttaaaaggcactgatgtttatgacgccgaaagtaaatatgctatgaaaacatacctaatgacaaatttgatggtatttatttgatattagaattttctgttctttttaataatgttattacagatttaaagacattaacttggtgtattaaac

SEQ ID NO: 213178 - DNA, 1723 bp, Zea Mays
tttcctctaaacattgttagttaaactcctatgtatattgcagggcatgttgatcaatctagcagactttcctctaaatatattaacaattaactaggagtcatacaaatcaaatgctgtttgtgttatccagttgtttttctcatcattttatgcaagggatgctcactattagattggagcttaaatttgcctcttacctgtggaaataggttctttgtgacggagagattccattcactggcttggtagagaaagtggagcaagagctcttctggaaggctgagcgctcagatctgtcgtctagaccaaatctctataaggttctttattcatttgaagcacataggaacaaatggaggaaagcagctgcatacatgtacaggtactttgttagattgaatagagaagcttgttgatccctcatttgcatggctcgattctatttgtgaagccgatgataaaatttctccaagtaaaagaccccggaatcttttgatggagaactcggcttttggcacaaactcagaactttctagattgcaattttgtgttgacattgaaatccttgaaaaagaatacatattaacagaagcacagtatatgctcagcactttgaaatcaagttttgatttttcagaaagccaatctattgagtccctgatggatattcttataaatgagaaattgtatgatatagccttcacaattgtgctaaaattttggaaggagtcagaaataaaaaagcaattggaccgtgtattttcagtcattgcgcagcaatgctgctcgaacagatcagacaacaaatcaagtaaacaagtgccacttctgccttcttctgagaatgatgcatgggagatcaacaataggagtattgctgtgacccaacaattgcaggggagcaaccactgggaaacccttgaactatatttggataaatacaaagacctgcatcctaggttgccagtcattgttgctgagacgcttctttatactgatcctgagattgagctaccactttggttggttcagatgttcaaggctaataaggcagggaacaagatctcatggggcatgtctggaaaagaggcagatcctgctgctttattcagattgtacataaactacggacgccacgcagaagccaccaacctgctggtggagtatctagagtcgttcgcatcgtcgaggccagtggacgtcctccaccgcaagaagatgtccgccgtttggttcccctacaccgccgtcgagaggctctggtgccagcttggtgagatgcaacgggcagggcacagcgtggatcagtgcgaccggctcaagaagctgctgcacggagccctgatgagccacctgcagcaggtcgtggtcgactcggatgatgtgctgtcgtcagttggagatgggcaggggatggaggaccagagcagctgaagtcctgaagatcgtgttgttggcatgtgtagaaaacgatgtgccaccgctggatactatgtagaaggtggattgacgcatccattacagcactgctgcactggtattgtatcggttctgccttcggggtgtgtaatggggttgttgcgatcgggttcagattagtgttgagcgtcgtggcattagggcatgtacaataccattcaatatatggtcttttaaggggtttctaaagagttaattaaaaaaatacaagagattacctctttatgaaaagcttgtttac

SEQ ID NO: 213179 - DNA, 1697 bp, Zea Mays
tttcctctaaacattgttagttaaactcctatgtatattgcagggcatgttgatcaatctagcagactttcctctaaatatattaacaattaactaggagtcatacaaatcaaatgctgtttgtgttatccagttgtttttctcatcattttatgcaagggatgctcactattagattggagcttaaatttgcctcttacctgtggaaataggttctttgtgacggagagattccattcactggcttggtagagaaagtggagcaagagctcttctggaaggctgagcgctcagatctgtcgtctagaccaaatctctataaggttctttattcatttgaagcacataggaacaaatggaggaaagcagctgcatacatgtacagcttgttgatccctcatttgcatggctcgattctatttgtgaagccgatgataaaatttctccaagtaaaagaccccggaatcttttgatggagaactcggcttttggcacaaactcagaactttctagattgcaattttgtgttgacattgaaatccttgaaaaagaatacatattaacagaagcacagtatatgctcagcactttgaaatcaagttttgatttttcagaaagccaatctattgagtccctgatggatattcttataaatgagaaattgtatgatatagccttcacaattgtgctaaaattttggaaggagtcagaaataaaaaagcaattggaccgtgtattttcagtcattgcgcagcaatgctgctcgaacagatcagacaacaaatcaagtaaacaagtgccacttctgccttcttctgagaatgatgcatgggagatcaacaataggagtattgctgtgacccaacaattgcaggggagcaaccactgggaaacccttgaactatatttggataaatacaaagacctgcatcctaggttgccagtcattgttgctgagacgcttctttatactgatcctgagattgagctaccactttggttggttcagatgttcaaggctaataaggcagggaacaagatctcatggggcatgtctggaaaagaggcagatcctgctgctttattcagattgtacataaactacggacgccacgcagaagccaccaacctgctggtggagtatctagagtcgttcgcatcgtcgaggccagtggacgtcctccaccgcaagaagatgtccgccgtttggttcccctacaccgccgtcgagaggctctggtgccagcttggtgagatgcaacgggcagggcacagcgtggatcagtgcgaccggctcaagaagctgctgcacggagccctgatgagccacctgcagcaggtcgtggtcgactcggatgatgtgctgtcgtcagttggagatgggcaggggatggaggaccagagcagctgaagtcctgaagatcgtgttgttggcatgtgtagaaaacgatgtgccaccgctggatactatgtagaaggtggattgacgcatccattacagcactgctgcactggtattgtatcggttctgccttcggggtgtgtaatggggttgttgcgatcgggttcagattagtgttgagcgtcgtggcattagggcatgtacaataccattcaatatatggtcttttaaggggtttctaaagagttaattaaaaaaatacaagagattacctctttatgaaaagcttgtttac

SEQ ID NO: 213180 - DNA, 966 bp, Zea Mays
atggctttgaaggcccatcatggataaatacaaagacctgcatcctaggttgccagtcattgttgctgagacgcttctttatactgatcctgagattgagctaccactttggttggttcagatgttcaaggctaataaggcagggaacaagatctcatggggcatgtctggaaaagaggcagatcctgctgctttattcagattgtacataaactacggacgccacgcagaagccaccaacctgctggtggagtatctagagtcgttcgcatcgtcgaggccagtggacgtcctccaccgcaagaagatgtccgccgtttggttcccctacaccgccgtcgagaggctctggtgccagcttggtgagatgcaacgggcagggcacagcgtggatcagtgcgaccggctcaagaagctgctgcacggagccctgatgagccacctgcagcaggtcgtggtcgactcggatgatgtgctgtcgtcagttggagatgggcaggggatggaggaccagagcagctgaagtcctgaagatcgtgttgttggcatgtgtagaaaacgatgtgccaccgctggatactgtatgtgattgtttgtgtggtcagctgaccaagagttacgcctgtgtcttttatatagaattattattagatgaaaacaaagacggagcgatggctccatttgtaacgtgagcatggaactgtcgctgatgacgagctgttcacttcccatgtgtagatgtagaaggtggattgacgcatccattacagcactgctgcactggtattgtatcggttctgccttcggggtgtgtaatggggttgttgcgatcgggttcagattagtgttgagcgtcgtggcattagggcatgtacaataccattcaatatatggtcttttaaggggtttctaaagagttaattaaaaaaatacaagagattacctctttatgaaaagcttgtttac

SEQ ID NO: 213181 - DNA, 1027 bp, Zea Mays
caggaactatccttcccgattagaattttctaaacagaacctgaattttatgttctgaaagaagatgagtcaccctgtatttttggtccaatcgtgaaacaacgatggtcctatgcttgcgcgaagcaacttattgagagacttatatttgctgagggtgcagaaaatggccttgaattcacaatcgtgagaccttttaattggattgggccaaggatggatttcattcctggtgtcgatggtcctagtgagggtgtaccccgggtgctggcttgcttcagtaacaatctgctccgccgagagcctttgaagcttgtcgatgggggccagtctcagagaacctttgtatacatcaaggatgccatcgaagctgttgtgctgatgattgaaaatcctgctcgagccaatggtcacatcttcaatgttgggaatcctgacaatgaggttacggttagggagttggcccaaatgatgacagaggtctatgcaaacgtctcaggagaggcgccgctggatgagcctatgatcgacgtgagttcgagtcagttctacggtgaaggatacgatgacagtgataagagaattcctgacatgactataatcaacaagcagctaggttggaacccaaagacacctctcaaggatctgctggagacaacattgacgtaccagcacaagacatacaaagaagctgtgaagaggcaaatgtcgcaggcttcagcaacaagttaagttggcgctggctggggacggctcctcgtttagagccctagtcgcagcagctgtttcgcaagtcagaatacatatacgccggtaatcgttctgtttgaggccctagacgcgcccatgttttgtctgctaccaagggatgttatcctattgtgatataactactacctgtgtttggttgctcctagttttttttcttgcaattatatgtatttatattgaaaaactatatattatttaaaatacaattaaaaacaaacaagcaatatatattgtgtacaaagaatgaacaaccaat

SEQ ID NO: 213182 - DNA, 1026 bp, Zea Mays
gatgccgcatcatttatgaatggcaaccctcaagggaacctgaattttatgttctgaaagaagatgagtcaccctgtatttttggtccaatcgtgaaacaacgatggtcctatgcttgcgcgaagcaacttattgagagacttatatttgctgagggtgcagaaaatggccttgaattcacaatcgtgagaccttttaattggattgggccaaggatggatttcattcctggtgtcgatggtcctagtgagggtgtaccccgggtgctggcttgcttcagtaacaatctgctccgccgagagcctttgaagcttgtcgatgggggccagtctcagagaacctttgtatacatcaaggatgccatcgaagctgttgtgctgatgattgaaaatcctgctcgagccaatggtcacatcttcaatgttgggaatcctgacaatgaggttacggttagggagttggcccaaatgatgacagaggtctatgcaaacgtctcaggagaggcgccgctggatgagcctatgatcgacgtgagttcgagtcagttctacggtgaaggatacgatgacagtgataagagaattcctgacatgactataatcaacaagcagctaggttggaacccaaagacacctctcaaggatctgctggagacaacattgacgtaccagcacaagacatacaaagaagctgtgaagaggcaaatgtcgcaggcttcagcaacaagttaagttggcgctggctggggacggctcctcgtttagagccctagtcgcagcagctgtttcgcaagtcagaatacatatacgccggtaatcgttctgtttgaggccctagacgcgcccatgttttgtctgctaccaagggatgttatcctattgtgatataactactacctgtgtttggttgctcctagttttttttcttgcaattatatgtatttatattgaaaaactatatattatttaaaatacaattaaaaacaaacaagcaatatatattgtgtacaaagaatgaacaaccaat

SEQ ID NO: 213183 - DNA, 2629 bp, Zea Mays
cgcagtttcctcgtctctttcttctattttccacgctgttccgttgctgtctgcctccagcctcctgccgttacgagcgcgtcagggtttttccttggccagccggcggcggccgttgcacctcctccatccacccctagtcgaaggtcgccagttcattcatccaggctgctgcgcccgagtccctggccaccgtcgctgggcacctgccgtcctcggaagtcgcaaccggaggtgggatttattaaatttctgagatggcagaatgtcggatacaagactggaagcgcgcttcaactccagagtcagtttctagacatgaaacatcaataccaagaacaaagcaaagaaacatttttagtctattagctcagcgggagctctcacctcgaacaaaaaaccaagcaaaaaatctttggaccaaacctccaagacttgatgcttgtcctattgaatcgaaattttggggcacctatgctcagcatgatctcctttcttgggctgaagcagagttcttgcattggtggattcccaaatattgccctctcacgccttcttcgaaggcaactattgcagctgcatttagtacagatgggagagtacttgcatctacacatggtgaccatactgtcaaaataattgattggcaaactgggaaatgcttgaatgtactgcttggacatcaccgcactccatgggtggttagattccatcctcagcgttctgatattcttgctagtggaagtttggattgtgaagttcgtctctgggatgctaaaacatctcgctgcacagcagaactggtcttctataggccagttgcatcaattgcatttcatgcaactggggagcttctggcagttgcatcaggtcacaaattgtttttatgggactgcaataaacgatgggaaactttggaacttccaatcatactagaaacccgccgttcactgagagctgtgcagtttcacccccatggtgccccatatctacttacaggagaggttcacaaccttgattctgaagattcaacgatgacccctgcacttctgagcaattattccttcagagacacacctctccttggtggttctggggtagataacttgattagtgaactacaatacatgcagaattttgagcagtgttgggaggccccttctgggtactcatgctgctgaagctcctgccatctcattaagtgtcgggtcagaacaaactacgtctctgcttggtggtggcaccgaattaccttgtacggtgaagctaagaatatggcgccacgaaatgaagaatccatttatcacattagggcctgaggcatgcctcttgacaattcctcatgctgtactttgcagcgaaatgggtacccatgtttcaccctgtgggcgatttttggttgcttgtgttgcatgtgtgctgccacacagttatggtggccatggaagtcagttgcatgaacattatgactctactggggctggaacatcaccaactcgccaagcatttccgtctcgccaaattatatatgagcttcgggtttattctcttgaggacgcaacatttggaacagttcttgcaactagagcaataaaggctgctcactgtttaacttccatccagttttcacccacatcagaacacatactattggcatatggtcggcaacatagttcactgttgaggaccattttgatcaatggggagaccagagttcctgtgtacacagtcttggaggtgtatcgagtttcagacatggagcttgtaagagttcttcctagtgtaggagaggaagtcaatgttgcatgttttcatccttcccctggatcaggtcttgtttatgggactaagcaagggaaggttaggtttcttcggcaccatggtgcatcattcacttgctggggagaacgttcatgagatttagaggcatgtgctacaaatgcagttctggacataataactgaatttgagcatcgcattcttgtgctgctgaatcttatcttgattatggcttcggcaacatcctggaagaggaatttatggtcaactgagatcatctccaagaccgagagggctaacagaaaacatcagatttcagcatccaattactcttgactaacgttccactctttgcaaaaccattgtgccggcaaggagggctactattttaggtccggttaacgtgtgtaagtagccccgtctatgagaaaatggacaaggaatcgcagcctcattcagcatgaattaccaacgatggttgactactactagtacaaggagacctcaagggatacggtcgcctgtacgaatatggatgcgagccatatactgacggccggcctcccaaagatgcgatgtgttccttagttcgatgattttttttttgaaactgtatagaagcctgcgaagaaatgtagtggttggctgagtgaagtgagggaagggataggcattatttcccttgggtgacattgaccctgtttggatcagattctagccgcgagaatctgattttcgtaataaaaaaatcgaaatcgaagtggtttacggtctatttgttttggccgaataattctttccatttggcattaaatcgccaaaaaccaagaaaaaaagcatggtcctaaat

SEQ ID NO: 213184 - DNA, 2864 bp, Zea Mays
cctcgtctctttcttctattttccacgctgttccgttgctgtctgcctccagcctcctgccgttacgagcgcgtcagggtttttccttggccagccggcggcggccgttgcacctcctccatccacccctagtcgaaggtcgccagttcattcatccaggctgctgcgcccgagtccctggccaccgtcgctgggcacctgccgtcctcggaagtcgcaaccggaggtgggatttattaaatttctgagatggcagaatgtcggatacaagactggaagcgcgcttcaactccagagtcagtttctagacatgaaacatcaataccaagaacaaagcaaagaaacatttttagtctattagctcagcgggagctctcacctcgaacaaaaaaccaagcaaaaaatctttggaccaaacctccaagacttgatgcttgtcctattgaatcgaaattttggggcacctatgctcagcatgatctcctttcttgggctgaagcagagttcttgcattggtggattcccaaatattgccctctcacgccttcttcgaaggcaactattgcagctgcatttagtacagatgggagagtacttgcatctacacatggtgaccatactgtcaaaataattgattggcaaactgggaaatgcttgaatgtactgcttggacatcaccgcactccatgggtggttagattccatcctcagcgttctgatattcttgctagtggaagtttggattgtgaagttcgtctctgggatgctaaaacatctcgctgcacagcagaactggtcttctataggccagttgcatcaattgcatttcatgcaactggggagcttctggcagttgcatcaggtcacaaattgtttttatgggactgcaataaacgatgggaaactttggaacttccaatcatactagaaacccgccgttcactgagagctgtgcagtttcacccccatggtgccccatatctacttacaggagaggttcacaaccttgattctgaagattcaacgatgacccctgcacttctgagcaattattccttcagagacacacctctccttggtggttctggggtagataacttgattagtgaactacaatacatgcagaattttgagcaggttggtgcctcatcatcagttccagtcactactggcagttttgatgggtcaaggctacatgatacctctggccatcatctgatgacctctttacctagtgttgggaggccccttctgggtactcatgctgctgaagctcctgccatctcattaagtgtcgggtcagaacaaactacgtctctgcttggtggtggcaccgaattaccttgtacggtgaagctaagaatatggcgccacgaaatgaagaatccatttatcacattagggcctgaggcatgcctcttgacaattcctcatgctgtactttgcagcgaaatgggtacccatgtttcaccctgtgggcgatttttggttgcttgtgttgcatgtgtgctgccacacagttatggtggccatggaagtcagttgcatgaacattatgactctactggggctggaacatcaccaactcgccaagcatttccgtctcgccaaattatatatgagcttcgggtttattctcttgaggacgcaacatttggaacagttcttgcaactagagcaataaaggctgctcactgtttaacttccatccagttttcacccacatcagaacacatactattggcatatggtcggcaacatagttcactgttgaggaccattttgatcaatggggagaccagagttcctgtgtacacagtcttggaggtgtatcgagtttcagacatggagcttgtaagagttcttcctagtgtaggagaggaagtcaatgttgcatgttttcatccttcccctggatcaggtcttgtttatgggactaagcaagggaaggttaggtttcttcggcaccatggtgcatcattcacttgctggggagaacgttcatgaggtattactttcctaccattgaaggcttgtatggattaactattccacatgttttttttggggggggggtgtggacggattgaggggataattagttggagtccaatggccattggagttggatttatccaaacgagcctagagagatttagaggcatgtgctacaaatgcagttctggacataataactgaatttgagcatcgcattcttgtgctgctgaatcttatcttgattatggcttcggcaacatcctggaagaggaatttatggtcaactgagatcatctccaagaccgagagggctaacagaaaacatcagatttcagcatccaattactcttgactaacgttccactctttgcaaaaccattgtgccggcaaggagggctactattttaggtccggttaacgtgtgtaagtagccccgtctatgagaaaatggacaaggaatcgcagcctcattcagcatgaattaccaacgatggttgactactactagtacaaggagacctcaagggatacggtcgcctgtacgaatatggatgcgagccatatactgacggccggcctcccaaagatgcgatgtgttccttagttcgatgattttttttttgaaactgtatagaagcctgcgaagaaatgtagtggttggctgagtgaagtgagggaagggataggcattatttcccttgggtgacattgaccctgtttggatcagattctagccgcgagaatctgattttcgtaataaaaaaatcgaaatcgaagtggtttacggtctatttgttttggccgaataattctttccatttggcattaaatcgccaaaaaccaagaaaaaaagcatggtcctaaat

SEQ ID NO: 213185 - DNA, 3016 bp, Zea Mays
cgctgttccgttgctgtctgcctccagcctcctgccgttacgagcgcgtcagggtttttccttggccagccggcggcggccgttgcacctcctccatccacccctagtcgaaggtcgccagttcattcatccaggctgctgcgcccgagtccctggccaccgtcgctgggcacctgccgtcctcggaagtcgcaaccggaggtgggatttattaaatttctgagatggcagaatgtcggatacaagactggaagcgcgcttcaactccagagtcagtttctagacatgaaacatcaataccaagaacaaagcaaagaaacatttttagtctattagctcagcgggagctctcacctcgaacaaaaaaccaagcaaaaaatctttggaccaaacctccaagacttgatgcttgtcctattgaatcgaaattttggggcacctatgctcagcatgatctcctttcttgggctgaagcagagttcttgcattggtggattcccaaatattgccctctcacgccttcttcgaaggcaactattgcagctgcatttagtacagatgggagagtacttgcatctacacatggtgaccatactgtcaaaataattgattggcaaactgggaaatgcttgaatgtactgcttggacatcaccgcactccatgggtggttagattccatcctcagcgttctgatattcttgctagtggaagtttggattgtgaagttcgtctctgggatgctaaaacatctcgctgcacagcagaactggtcttctgtaattatccttgacaagccaattgtcatgatcactttttctctatttctaaagcaacacactttaattttttattaacatttcttccacagataggccagttgcatcaattgcatttcatgcaactggggagcttctggcagttgcatcaggtcacaaattgtttttatgggactgcaataaacgatgggaaactttggaacttccaatcatactagaaacccgccgttcactgagagctgtgcagtttcacccccatggtgccccatatctacttacaggagaggttcacaaccttgattctgaagattcaacgatgacccctgcacttctgagcaattattccttcagagacacacctctccttggtggttctggggtagataacttgattagtgaactacaatacatgcagaattttgagcagtgttgggaggccccttctgggtactcatgctgctgaagctcctgccatctcattaagtgtcgggtcagaacaaactacgtctctgcttggtggtggcaccgaattaccttgtacggtgaagctaagaatatggcgccacgaaatgaagaatccatttatcacattagggcctgaggcatgcctcttgacaattcctcatgctgtactttgcaggtgcccaatgttccttctttcccctaagtgttcctgtgtgtcaccaccactaactagatcttgtgctgccgcttcttaatgtatttaatgcacgacatgcaaaagtcttgttctttactctttttcatgctaattctgaactgctacaaaactgttggcaatcaacttctatatgtttggttacagcagaaaaacagtaacatctacaatttgtaccatctggatgtattggtaatattgagtagcacttatatcatctttgctagatttctatcgcacctgaagtttgagactcatttacttgaagtttctgttaaattttctgcagcgaaatgggtacccatgtttcaccctgtgggcgatttttggttgcttgtgttgcatgtgtgctgccacacagttatggtggccatggaagtcagttgcatgaacattatgactctactggggctggaacatcaccaactcgccaagcatttccgtctcgccaaattatatatgagcttcgggtttattctcttgaggacgcaacatttggaacagttcttgcaactagagcaataaaggctgctcactgtttaacttccatccagttttcacccacatcagaacacatactattggcatatggtcggcaacatagttcactgttgaggaccattttgatcaatggggagaccagagttcctgtgtacacagtcttggaggtgtatcgagtttcagacatggagcttgtaagagttcttcctagtgtaggagaggaagtcaatgttgcatgttttcatccttcccctggatcaggtcttgtttatgggactaagcaagggaaggttaggtttcttcggcaccatggtgcatcattcacttgctggggagaacgttcatgagatttagaggcatgtgctacaaatgcagttctggacataataactgaatttgagcatcgcattcttgtgctgctgaatcttatcttgattatggcttcggcaacatcctggaagaggaatttatggtcaactgagatcatctccaagaccgagagggctaacagaaaacatcagatttcagcatccaattactcttgactaacgttccactctttgcaaaaccattgtgccggcaaggagggctactattttaggtccggttaacgtgtgtaagtagccccgtctatgagaaaatggacaaggaatcgcagcctcattcagcatgaattaccaacgatggttgactactactagtacaaggagacctcaagggatacggtcgcctgtacgaatatggatgcgagccatatactgacggccggcctcccaaagatgcgatgtgttccttagttcgatgattttttttttgaaactgtatagaagcctgcgaagaaatgtagtggttggctgagtgaagtgagggaagggataggcattatttcccttgggtgacattgaccctgtttggatcagattctagccgcgagaatctgattttcgtaataaaaaaatcgaaatcgaagtggtttacggtctatttgttttggccgaataattctttccatttggcattaaatcgccaaaaaccaagaaaaaaagcatggtcctaaat

SEQ ID NO: 213186 - DNA, 2779 bp, Zea Mays
cgctgttccgttgctgtctgcctccagcctcctgccgttacgagcgcgtcagggtttttccttggccagccggcggcggccgttgcacctcctccatccacccctagtcgaaggtcgccagttcattcatccaggctgctgcgcccgagtccctggccaccgtcgctgggcacctgccgtcctcggaagtcgcaaccggaggtgggatttattaaatttctgagatggcagaatgtcggatacaagactggaagcgcgcttcaactccagagtcagtttctagacatgaaacatcaataccaagaacaaagcaaagaaacatttttagtctattagctcagcgggagctctcacctcgaacaaaaaaccaagcaaaaaatctttggaccaaacctccaagacttgatgcttgtcctattgaatcgaaattttggggcacctatgctcagcatgatctcctttcttgggctgaagcagagttcttgcattggtggattcccaaatattgccctctcacgccttcttcgaaggcaactattgcagctgcatttagtacagatgggagagtacttgcatctacacagtaggttaattaacttgctgaatgtatggtctataaataccaaaggacttatagactaacttggctttatccccagtggtgaccatactgtcaaaataattgattggcaaactgggaaatgcttgaatgtactgcttggacatcaccgcactccatgggtggtacattacgttagattccatcctcagcgttctgatattcttgctagtggaagtttggattgtgaagttcgtctctgggatgctaaaacatctcgctgcacagcagaactggtcttctataggccagttgcatcaattgcatttcatgcaactggggagcttctggcagttgcatcaggtcacaaattgtttttatgggactgcaataaacgatgggaaactttggaacttccaatcatactagaaacccgccgttcactgagagctgtgcagtttcacccccatggtgccccatatctacttacaggagaggttcacaaccttgattctgaagattcaacgatgacccctgcacttctgagcaattattccttcagagacacacctctccttggtggttctggggtagataacttgattagtgaactacaatacatgcagaattttgagcaggttggtgcctcatcatcagttccagtcactactggcagttttgatgggtcaaggctacatgatacctctggccatcatctgatgacctctttacctagtgttgggaggccccttctgggtactcatgctgctgaagctcctgccatctcattaagtgtcgggtcagaacaaactacgtctctgcttggtggtggcaccgaattaccttgtacggtgaagctaagaatatggcgccacgaaatgaagaatccatttatcacattagggcctgaggcatgcctcttgacaattcctcatgctgtactttgcagcgaaatgggtacccatgtttcaccctgtgggcgatttttggttgcttgtgttgcatgtgtgctgccacacagttatggtggccatggaagtcagttgcatgaacattatgactctactggggctggaacatcaccaactcgccaagcatttccgtctcgccaaattatatatgagcttcgggtttattctcttgaggacgcaacatttggaacagttcttgcaactagagcaataaaggctgctcactgtttaacttccatccagttttcacccacatcagaacacatactattggcatatggtcggcaacatagttcactgttgaggaccattttgatcaatggggagaccagagttcctgtgtacacagtcttggaggtgtatcgagtttcagacatggagcttgtaagagttcttcctagtgtaggagaggaagtcaatgttgcatgttttcatccttcccctggatcaggtcttgtttatgggactaagcaagggaaggttaggtttcttcggcaccatggtgcatcattcacttgctggggagaacgttcatgagatttagaggcatgtgctacaaatgcagttctggacataataactgaatttgagcatcgcattcttgtgctgctgaatcttatcttgattatggcttcggcaacatcctggaagaggaatttatggtcaactgagatcatctccaagaccgagagggctaacagaaaacatcagatttcagcatccaattactcttgactaacgttccactctttgcaaaaccattgtgccggcaaggagggctactattttaggtccggttaacgtgtgtaagtagccccgtctatgagaaaatggacaaggaatcgcagcctcattcagcatgaattaccaacgatggttgactactactagtacaaggagacctcaagggatacggtcgcctgtacgaatatggatgcgagccatatactgacggccggcctcccaaagatgcgatgtgttccttagttcgatgattttttttttgaaactgtatagaagcctgcgaagaaatgtagtggttggctgagtgaagtgagggaagggataggcattatttcccttgggtgacattgaccctgtttggatcagattctagccgcgagaatctgattttcgtaataaaaaaatcgaaatcgaagtggtttacggtctatttgttttggccgaataattctttccatttggcattaaatcgccaaaaaccaagaaaaaaagcatggtcctaaat

SEQ ID NO: 213187 - DNA, 2521 bp, Zea Mays
gttttttgggcaaacccatcattttgcaaatttctcagtttttacaatttgtattaagaatgtcggatacaagactggaagcgcgcttcaactccagagtcagtttctagacatgaaacatcaataccaagaacaaagcaaagaaacatttttagtctattagctcagcgggagctctcacctcgaacaaaaaaccaagcaaaaaatctttggaccaaacctccaagacttgatgcttgtcctattgaatcgaaattttggggcacctatgctcagcatgatctcctttcttgggctgaagcagagttcttgcattggtggattcccaaatattgccctctcacgccttcttcgaaggcaactattgcagctgcatttagtacagatgggagagtacttgcatctacacatggtgaccatactgtcaaaataattgattggcaaactgggaaatgcttgaatgtactgcttggacatcaccgcactccatgggtggttagattccatcctcagcgttctgatattcttgctagtggaagtttggattgtgaagttcgtctctgggatgctaaaacatctcgctgcacagcagaactggtcttctataggccagttgcatcaattgcatttcatgcaactggggagcttctggcagttgcatcaggtcacaaattgtttttatgggactgcaataaacgatgggaaactttggaacttccaatcatactagaaacccgccgttcactgagagctgtgcagtttcacccccatggtgccccatatctacttacaggagaggttcacaaccttgattctgaagattcaacgatgacccctgcacttctgagcaattattccttcagagacacacctctccttggtggttctggggtagataacttgattagtgaactacaatacatgcagaattttgagcaggttggtgcctcatcatcagttccagtcactactggcagttttgatgggtcaaggctacatgatacctctggccatcatctgatgacctctttacctagtgttgggaggccccttctgggtactcatgctgctgaagctcctgccatctcattaagtgtcgggtcagaacaaactacgtctctgcttggtggtggcaccgaattaccttgtacggtgaagctaagaatatggcgccacgaaatgaagaatccatttatcacattagggcctgaggcatgcctcttgacaattcctcatgctgtactttgcagcgaaatgggtacccatgtttcaccctgtgggcgatttttggttgcttgtgttgcatgtgtgctgccacacagttatggtggccatggaagtcagttgcatgaacattatgactctactggggctggaacatcaccaactcgccaagcatttccgtctcgccaaattatatatgagcttcgggtttattctcttgaggacgcaacatttggaacagttcttgcaactagagcaataaaggctgctcactgtttaacttccatccagttttcacccacatcagaacacatactattggcatatggtcggcaacatagttcactgttgaggaccattttgatcaatggggagaccagagttcctgtgtacacagtcttggaggtgtatcgagtttcagacatggagcttgtaagagttcttcctagtgtaggagaggaagtcaatgttgcatgttttcatccttcccctggatcaggtcttgtttatgggactaagcaagggaaggttaggtttcttcggcaccatggtgcatcattcacttgctggggagaacgttcatgagatttagaggcatgtgctacaaatgcagttctggacataataactgaatttgagcatcgcattcttgtgctgctgaatcttatcttgattatggcttcggcaacatcctggaagaggaatttatggtcaactgagatcatctccaagaccgagagggctaacagaaaacatcagatttcagcatccaattactcttgactaacgttccactctttgcaaaaccattgtgccggcaaggagggctactattttaggtccggttaacgtgtgtaagtagccccgtctatgagaaaatggacaaggaatcgcagcctcattcagcatgaattaccaacgatggttgactactactagtacaaggagacctcaagggatacggtcgcctgtacgaatatggatgcgagccatatactgacggccggcctcccaaagatgcgatgtgttccttagttcgatgattttttttttgaaactgtatagaagcctgcgaagaaatgtagtggttggctgagtgaagtgagggaagggataggcattatttcccttgggtgacattgaccctgtttggatcagattctagccgcgagaatctgattttcgtaataaaaaaatcgaaatcgaagtggtttacggtctatttgttttggccgaataattctttccatttggcattaaatcgccaaaaaccaagaaaaaaagcatggtcctaaat

SEQ ID NO: 213188 - DNA, 1992 bp, Zea Mays
ctccagttcaccggtgcacagcgggtctagttcacatgcgcgtgcatgagttcatcgtctggaggttagattccatcctcagcgttctgatattcttgctagtggaagtttggattgtgaagttcgtctctgggatgctaaaacatctcgctgcacagcagaactggtcttctataggccagttgcatcaattgcatttcatgcaactggggagcttctggcagttgcatcaggtcacaaattgtttttatgggactgcaataaacgatgggaaactttggaacttccaatcatactagaaacccgccgttcactgagagctgtgcagtttcacccccatggtgccccatatctacttacaggagaggttcacaaccttgattctgaagattcaacgatgacccctgcacttctgagcaattattccttcagagacacacctctccttggtggttctggggtagataacttgattagtgaactacaatacatgcagaattttgagcagtgttgggaggccccttctgggtactcatgctgctgaagctcctgccatctcattaagtgtcgggtcagaacaaactacgtctctgcttggtggtggcaccgaattaccttgtacggtgaagctaagaatatggcgccacgaaatgaagaatccatttatcacattagggcctgaggcatgcctcttgacaattcctcatgctgtactttgcagcgaaatgggtacccatgtttcaccctgtgggcgatttttggttgcttgtgttgcatgtgtgctgccacacagttatggtggccatggaagtcagttgcatgaacattatgactctactggggctggaacatcaccaactcgccaagcatttccgtctcgccaaattatatatgagcttcgggtttattctcttgaggacgcaacatttggaacagttcttgcaactagagcaataaaggctgctcactgtttaacttccatccagttttcacccacatcagaacacatactattggcatatggtcggcaacatagttcactgttgaggaccattttgatcaatggggagaccagagttcctgtgtacacagtcttggaggtgtatcgagtttcagacatggagcttgtaagagttcttcctagtgtaggagaggaagtcaatgttgcatgttttcatccttcccctggatcaggtcttgtttatgggactaagcaagggaaggttaggtttcttcggcaccatggtgcatcattcacttgctggggagaacgttcatgagatttagaggcatgtgctacaaatgcagttctggacataataactgaatttgagcatcgcattcttgtgctgctgaatcttatcttgattatggcttcggcaacatcctggaagaggaatttatggtcaactgagatcatctccaagaccgagagggctaacagaaaacatcagatttcagcatccaattactcttgactaacgttccactctttgcaaaaccattgtgccggcaaggagggctactattttaggtccggttaacgtgtgtaagtagccccgtctatgagaaaatggacaaggaatcgcagcctcattcagcatgaattaccaacgatggttgactactactagtacaaggagacctcaagggatacggtcgcctgtacgaatatggatgcgagccatatactgacggccggcctcccaaagatgcgatgtgttccttagttcgatgattttttttttgaaactgtatagaagcctgcgaagaaatgtagtggttggctgagtgaagtgagggaagggataggcattatttcccttgggtgacattgaccctgtttggatcagattctagccgcgagaatctgattttcgtaataaaaaaatcgaaatcgaagtggtttacggtctatttgttttggccgaataattctttccatttggcattaaatcgccaaaaaccaagaaaaaaagcatggtcctaaat

SEQ ID NO: 213189 - DNA, 2035 bp, Zea Mays
ggatgaaaggttagattccatcctcagcgttctgatattcttgctagtggaagtttggattgtgaagttcgtctctgggatgctaaaacatctcgctgcacagcagaactggtcttctataggccagttgcatcaattgcatttcatgcaactggggagcttctggcagttgcatcaggtcacaaattgtttttatgggactgcaataaacgatgggaaactttggaacttccaatcatactagaaacccgccgttcactgagagctgtgcagtttcacccccatggtgccccatatctacttacaggagaggttcacaaccttgattctgaagattcaacgatgacccctgcacttctgagcaattattccttcagagacacacctctccttggtggttctggggtagataacttgattagtgaactacaatacatgcagaattttgagcaggttggtgcctcatcatcagttccagtcactactggcagttttgatgggtcaaggctacatgatacctctggccatcatctgatgacctctttacctagtgttgggaggccccttctgggtactcatgctgctgaagctcctgccatctcattaagtgtcgggtcagaacaaactacgtctctgcttggtggtggcaccgaattaccttgtacggtgaagctaagaatatggcgccacgaaatgaagaatccatttatcacattagggcctgaggcatgcctcttgacaattcctcatgctgtactttgcagcgaaatgggtacccatgtttcaccctgtgggcgatttttggttgcttgtgttgcatgtgtgctgccacacagttatggtggccatggaagtcagttgcatgaacattatgactctactggggctggaacatcaccaactcgccaagcatttccgtctcgccaaattatatatgagcttcgggtttattctcttgaggacgcaacatttggaacagttcttgcaactagagcaataaaggctgctcactgtttaacttccatccagttttcacccacatcagaacacatactattggcatatggtcggcaacatagttcactgttgaggaccattttgatcaatggggagaccagagttcctgtgtacacagtcttggaggtgtatcgagtttcagacatggagcttgtaagagttcttcctagtgtaggagaggaagtcaatgttgcatgttttcatccttcccctggatcaggtcttgtttatgggactaagcaagggaaggttaggtttcttcggcaccatggtgcatcattcacttgctggggagaacgttcatgagatttagaggcatgtgctacaaatgcagttctggacataataactgaatttgagcatcgcattcttgtgctgctgaatcttatcttgattatggcttcggcaacatcctggaagaggaatttatggtcaactgagatcatctccaagaccgagagggctaacagaaaacatcagatttcagcatccaattactcttgactaacgttccactctttgcaaaaccattgtgccggcaaggagggctactattttaggtccggttaacgtgtgtaagtagccccgtctatgagaaaatggacaaggaatcgcagcctcattcagcatgaattaccaacgatggttgactactactagtacaaggagacctcaagggatacggtcgcctgtacgaatatggatgcgagccatatactgacggccggcctcccaaagatgcgatgtgttccttagttcgatgattttttttttgaaactgtatagaagcctgcgaagaaatgtagtggttggctgagtgaagtgagggaagggataggcattatttcccttgggtgacattgaccctgtttggatcagattctagccgcgagaatctgattttcgtaataaaaaaatcgaaatcgaagtggtttacggtctatttgttttggccgaataattctttccatttggcattaaatcgccaaaaaccaagaaaaaaagcatggtcctaaat

SEQ ID NO: 213190 - DNA, 3464 bp, Zea Mays
cgcatacgcccacagccgccccacgcgcgcatcccgcagccgcgcgatccgtccgcttcctcctccccgcgcccgcagcccccgccgccgatgccagccgccgcgcccgcgcaagggaagttgcttcccaaatcccgcagacaagatttaatcccgtgattcttcccatccatggcagccgtgcccgcaaaccgcgcctccccacgactcccacttccatggcgtcgcccccttccatccatggcagtcacgctccctctgcgcccttccatccatggctgcggctccctccgcgccgcaattcttcccatcctctccttccgcgcggtttgcggctaccaatcctctccctctgcgtcgtgttcttcccatcctctccctccgcgccggatctcgccccatgtccaccaacgccggtgtccgtgatggcgcgctcggggcagcggtggacgcagcctttgccaggcgtgtgctccaggccgaggccctcctcgggtacctctccgcgctggccaccagcccgcgtgccgagggcgacagggtggaccccgccgtcgccgcggcgcagctcggggcgctcggccggtggaagggctcggcgaggggccttcccgagtacacggtcgtccacggcatcgatggtgccgtcgtcgccgcccctgggagagccaaagccaagcagaggaggccgcagtcgaccggatttgggaatcctgctcctgccaaacgggatgaacggaaggaagcaaaatctttctggggttgatttggcttgaaggaagcgggatctttctggacaatggctgtctagcttcatccattctggtacagagggatggagtcttgtaagaaggtagctgcaagcttgaagtcgtgtgagccatgggggaacagggcatcctggacaaacgccgttgggccaggttggaagttgagctttgctgttgagccatggactaagggctttagcgcgtcgtgtgcggcgccatattctgctggagccacagagcatcaattatcgctcgatgagaaggtggataactccaccgttgcatctggttttgatgggtaaagttatctatcagctagattcatggcaggaaaggttttttctattgtcggtatccagcacctaagtaggcctaggatttttttcttctatctttaattagcaattgcctttttcagcaacccgttcttatgaatttcttttattgacaacatgaattagtctattttagttcatctctttcttgtcacaaatttaaatgaatataattgtttgtttcagtggcaattctgtgaagcccaaaggttccaagtcaccatgaaaaaattgaaatgacgagatctcttaatctaattgttgcaccttggaaggtctgaaccatcatagtttaattgtatcacccatttacacaagttcctaccatcagagttcaactgtatcacccatccataagcaattccttttgttgaaatttatgagaagacatatgcctctgttaagtctcaggaacttttttgctgggaagccaattccttactgatctgagggacaacatttttgtttgcctgatataaggtaaagtgtgaaagggaaacgcgaaaagaaacgtgtcctggtcccaagtcacctgccatactgaacacgattgatcgcagaaagaaacacgttctggtctagactgacagttttggagctggagccggccatgcgctcgatcagagttccgctgcagccacgacctctctcccgaacgcgcacgaggagaccaggtggaacatatgcaagcaggttctagagcaataaccccatgaatccagatcgggggtctgcatctacacgggcgtgtactccgcaccgctcccctccggccccgaccgccgtgtgctcgttgtagccggggtcgacctcaaccacgacgacgatgcggtctcctcgccccaggctcgacctcctcgctgacctcgccctgctccacctcaactcgcgatgaggattgtcggcacgttcacaccgcgccgttgcagaacgttggagcctctcagaactctagaagctgcctaccaccacgcaccctaagataggggcatatctgtgttagtcgcctgcacacatactgaaatatgggcatatccaccatgtattcttctcttagttatgttagataagacttttactctgtcatttactgatctggtctgtttttagctccattagcttgttcacaagcttatgttagagaaggcgttatggcttttctcaagattataacatttctgaataactgttctgcgtaggcatggtaccatcttcatcatgtagctgggatgagctggcaccatgaaagaattcaagtggttaaatcatgcatctgcagaaatattgtactctcaaatggtgggttgctgcgtcatgggagtttgggtgaaggcctgaaggatgtgatgcaaaacgtcgatgcaggtctgggatgtccgcctcattatggatcaaaattcatgacgttctaaaggtgtcggatgagtacctatatactccctcccagaaaacaaggcgcctcattacactattggaagctggacgacatggatgactctggcaagatgcggtgggagcacgacgacatggatgactccgaccatgagttcgacaggaagcctagcaacagtacgcagtagcaaggttgaccagaggggcagtggagactaacccaacaccccctcctccgaccgtcatagcgcttctttcctctggcttcatttcttacctatgtatggatggtcttcaccactggttacatctagcaagtcctcctaggggtgagctcaattttctcctgatttgctctctcctttgttttttattgattcatctatgcacatttaatgatctatggcgtgccttcaatgcaattggtggaggcagtgacatgaaggagattgtcatgctgccaaagcacatcaaggacaatgcaaacaaggacagaggaagaccggacatgccatttccagacccgtggatctaattgcttttgcaagggaaagagatatgccttctgattcagataggaccttaaatgaagacaagcgtttcatatcttgtagtatgccacaggagcatcaaaagatctttgaattgggctgaagaaaacatagaatatagtgtaatcttatagtataaaatttagagtctattgtcacccatacatataagtcttgtgaacgtttatggaaccagggaataagacattgttctgtatggccagtctgttggtagcagaccaacccttgatctagctattcgtttcaatcatgaagagatgtggtattaatcatagataagggatgtttagttccagagactaaagtttagtacgtgtcacatagaatatttgaatctcattttactatggatttatatatcatagtgacatttgtcgttatgtattgatgtttta

SEQ ID NO: 213191 - DNA, 3284 bp, Zea Mays
cgcatacgcccacagccgccccacgcgcgcatcccgcagccgcgcgatccgtccgcttcctcctccccgcgcccgcagcccccgccgccgatgccagccgccgcgcccgcgcaagggaagttgcttcccaaatcccgcagacaagatttaatcccgtgattcttcccatccatggcagccgtgcccgcaaaccgcgcctccccacgactcccacttccatggcgtcgcccccttccatccatggcagtcacgctccctctgcgcccttccatccatggctgcggctccctccgcgccgcaattcttcccatcctctccttccgcgcggtttgcggctaccaatcctctccctctgcgtcgtgttcttcccatcctctccctccgcgccggatctcgccccatgtccaccaacgccggtgtccgtgatggcgcgctcggggcagcggtggacgcagcctttgccaggcgtgtgctccaggccgaggccctcctcgggtacctctccgcgctggccaccagcccgcgtgccgagggcgacagggtggaccccgccgtcgccgcggcgcagctcggggcgctcggccggtggaagggctcggcgaggggccttcccgagtacacggtcgtccacggcatcgatggtgccgtcgtcgccgcccctgggagagccaaagccaagcagaggaggccgcagtcgaccggatttgggaatcctgctcctgccaaacgggatgaacggaaggaagcaaaatctttctggggttgatttggcttgaaggaagcgggatctttctggacaatggctgtctagcttcatccattctggtaacaaagaaaaaaacaagaaacatctggtatctgagtccagtagaaagttgtgcaaagagaagagcaaaatatctacaccagacgtctcttttaggtacagagggatggagtcttgtaagaaggtagctgcaagcttgaagtcgtgtgagccatgggggaacagggcatcctggacaaacgccgttgggccaggttggaagttgagctttgctgttgagccatggactaagggctttagcgcgtcgtgtgcggcgccatattctgctggagccacagagcatcaattatcgctcgatgagaaggtggataactccaccgttgcatctggttttgatgggtaaagttatctatcagctagattcatggcaggaaaggttttttctattgtcggtatccagcacctaatggcaattctgtgaagcccaaaggttccaagtcaccatgaaaaaattgaaatgacgagatctcttaatctaattgttgcaccttggaaggtctgaaccatcatagtttaattgtatcacccatttacacaagttcctaccatcagagttcaactgtatcacccatccataagcaattccttttgttgaaatttatgagaagacatatgcctctgttaagtctcaggaacttttttgctgggaagccaattccttactgatctgagggacaacatttttgtttgcctgatataaggtgatgaaggtggctggataacacgattatgggtaaagtgtgaaagggaaacgcgaaaagaaacgtgtcctggtcccaagtcacctgccatactgaacacgattgatcgcagaaagaaacacgttctggtctagactgacagttttggagctggagccggccatgcgctcgatcagagttccgctgcagccacgacctctctcccgaacgcgcacgaggagaccaggtggaacatatgcaagcaggttctagagcaataaccccatgaatccagatcgggggtctgcatctacacgggcgtgtactccgcaccgctcccctccggccccgaccgccgtgtgctcgttgtagccggggtcgacctcaaccacgacgacgatgcggtctcctcgccccaggctcgacctcctcgctgacctcgccctgctccacctcaactcgcgatgaggattgtcggcacgttcacaccgcgccgttgcagaacgttggagcctctcagaactctagaagctgcctaccaccacgcaccctaagataggggcatatctgtgttagtcgcctgcacacatactgaaatatgggcatatccaccatgtattcttctcttagttatgttagataagacttttactctgtcatttactgatctggtctgtttttagctccattagcttgttcacaagcttatgttagagaaggcgttatggcttttctcaagattataacatttctgaataactgttctgcgtaggcatggtaccatcttcatcatgtagctgggatgagctggcaccatgaaagaattcaagtggttaaatcatgcatctgcagaaatattgtactctcaaatggtgggttgctgcgtcatgggagtttgggtgaaggcctgaaggatgtgatgcaaaacgtcgatgcaggtctgggatgtccgcctcattatggatcaaaattcatgacgttctaaaggtgtcggatgagtacctatatactccctcccagaaaacaaggcgcctcattacactattggaagctggacgacatggatgactctggcaagatgcggtgggagcacgacgacatggatgactccgaccatgagttcgacaggaagcctagcaacagtacgcagtagcaaggttgaccagaggggcagtggagactaacccaacaccccctcctccgaccgtcatagcgcttctttcctctggcttcatttcttacctattgacatgaaggagattgtcatgctgccaaagcacatcaaggacaatgcaaacaaggacagaggaagaccggacatgccatttccagacccgtggatctaattgcttttgcaagggaaagagatatgccttctgattcagataggaccttaaatgaagacaagcgtttcatatcttgtagtatgccacaggagcatcaaaagatctttgaattgggctgaagaaaacatagaatatagtgtaatcttatagtataaaatttagagtctattgtcacccatacatataagtcttgtgaacgtttatggaaccagggaataagacattgttctgtatggccagtctgttggtagcagaccaacccttgatctagctattcgtttcaatcatgaagagatgtggtattaatcatagataagggatgtttagttccagagactaaagtttagtacgtgtcacatagaatatttgaatctcattttactatggatttatatatcatagtgacatttgtcgttatgtattgatgtttta

SEQ ID NO: 213192 - DNA, 3286 bp, Zea Mays
cgcatacgcccacagccgccccacgcgcgcatcccgcagccgcgcgatccgtccgcttcctcctccccgcgcccgcagcccccgccgccgatgccagccgccgcgcccgcgcaagggaagttgcttcccaaatcccgcagacaagatttaatcccgtgattcttcccatccatggcagccgtgcccgcaaaccgcgcctccccacgactcccacttccatggcgtcgcccccttccatccatggcagtcacgctccctctgcgcccttccatccatggctgcggctccctccgcgccgcaattcttcccatcctctccttccgcgcggtttgcggctaccaatcctctccctctgcgtcgtgttcttcccatcctctccctccgcgccggatctcgccccatgtccaccaacgccggtgtccgtgatggcgcgctcggggcagcggtggacgcagcctttgccaggcgtgtgctccaggccgaggccctcctcgggtacctctccgcgctggccaccagcccgcgtgccgagggcgacagggtggaccccgccgtcgccgcggcgcagctcggggcgctcggccggtggaagggctcggcgaggggccttcccgagtacacggtcgtccacggcatcgatggtgccgtcgtcgccgcccctgggagagccaaagccaagcagaggaggccgcagtcgaccggatttgggaatcctgctcctgccaaacgggatgaacggaaggaagcaaaatctttctggggttgatttggcttgaaggaagcgggatctttctggacaatggctgtctagcttcatccattctggtaacaaagaaaaaaacaagaaacatctggtatctgagtccagtagaaagttgtgcaaagagaagagcaaaatatctacaccagacgtctcttttaggtacagagggatggagtcttgtaagaaggtagctgcaagcttgaagtcgtgtgagccatgggggaacagggcatcctggacaaacgccgttgggccaggttggaagttgagctttgctgttgagccatggactaagggctttagcgcgtcgtgtgcggcgccatattctgctggagccacagagcatcaattatcgctcgatgagaaggtggataactccaccgttgcatctggttttgatgggtaaagttatctatcagctagattcatggcaggaaaggttttttctattgtcggtatccagcacctaagtaggcctaggatttttttcttctatctttaattagcaattgcctttttcagcaacccgttcttatgaatttcttttattgacaacatgaattagtctattttagttcatctctttcttgtcacaaatttaaatgaatataattgtttgtttcagtggcaattctgtgaagcccaaaggttccaagtcaccatgaaaaaattgaaatgacgagatctcttaatctaattgttgcaccttggaaggtctgaaccatcatagtttaattgtatcacccatttacacaagttcctaccatcagagttcaactgtatcacccatccataagcaattccttttgttgaaatttatgagaagacatatgcctctgttaagtctcaggaacttttttgctgggaagccaattccttactgatctgagggacaacatttttgtttgcctgatataaggtgatgaaggtggctggataacacgattatgggtaaagtgtgaaagggaaacgcgaaaagaaacgtgtcctggtcccaagtcacctgccatactgaacacgattgatcgcagaaagaaacacgttctggtctagactgacagttttggagctggagccggccatgcgctcgatcagagttccgctgcagccacgacctctctcccgaacgcgcacgaggagaccaggtggaacatatgcaagcaggttctagagcaataaccccatgaatccagatcgggggtctgcatctacacgggcgtgtactccgcaccgctcccctccggccccgaccgccgtgtgctcgttgtagccggggtcgacctcaaccacgacgacgatgcggtctcctcgccccaggctcgacctcctcgctgacctcgccctgctccacctcaactcgcgatgaggattgtcggcacgttcacaccgcgccgttgcagaacgttggagcctctcagaactctagaagctgcctaccaccacgcaccctaagataggggcatatctgtgcatggtaccatcttcatcatgtagctgggatgagctggcaccatgaaagaattcaagtggttaaatcatgcatctgcagaaatattgtactctcaaatggtgggttgctgcgtcatgggagtttgggtgaaggcctgaaggatgtgatgcaaaacgtcgatgcaggtctgggatgtccgcctcattatggatcaaaattcatgacgttctaaaggtgtcggatgagtacctatatactccctcccagaaaacaaggcgcctcattacactattggaagctggacgacatggatgactctggcaagatgcggtgggagcacgacgacatggatgactccgaccatgagttcgacaggaagcctagcaacagtacgcagtagcaaggttgaccagaggggcagtggagactaacccaacaccccctcctccgaccgtcatagcgcttctttcctctggcttcatttcttacctatgtatggatggtcttcaccactggttacatctagcaagtcctcctagggtgacatgaaggagattgtcatgctgccaaagcacatcaaggacaatgcaaacaaggacagaggaagaccggacatgccatttccagacccgtggatctaattgcttttgcaagggaaagagatatgccttctgattcagataggaccttaaatgaagacaagcgtttcatatcttgtagtatgccacaggagcatcaaaagatctttgaattgggctgaagaaaacatagaatatagtgtaatcttatagtataaaatttagagtctattgtcacccatacatataagtcttgtgaacgtttatggaaccagggaataagacattgttctgtatggccagtctgttggtagcagaccaacccttgatctagctattcgtttcaatcatgaagagatgtggtattaatcatagataagggatgtttagttccagagactaaagtttagtacgtgtcacatagaatatttgaatctcattttactatggatttatatatcatagtgacatttgtcgttatgtattgatgtttta

SEQ ID NO: 213193 - DNA, 3995 bp, Zea Mays
cgcatacgcccacagccgccccacgcgcgcatcccgcagccgcgcgatccgtccgcttcctcctccccgcgcccgcagcccccgccgccgatgccagccgccgcgcccgcgcaagggaagttgcttcccaaatcccgcagacaagatttaatcccgtgattcttcccatccatggcagccgtgcccgcaaaccgcgcctccccacgactcccacttccatggcgtcgcccccttccatccatggcagtcacgctccctctgcgcccttccatccatggctgcggctccctccgcgccgcaattcttcccatcctctccttccgcgcggtttgcggctaccaatcctctccctctgcgtcgtgttcttcccatcctctccctccgcgccggatctcgccccatgtccaccaacgccggtgtccgtgatggcgcgctcggggcagcggtggacgcagcctttgccaggcgtgtgctccaggccgaggccctcctcgggtacctctccgcgctggccaccagcccgcgtgccgagggcgacagggtggaccccgccgtcgccgcggcgcagctcggggcgctcggccggtggaagggctcggcgaggggccttcccgagtacacggtcgtccacggcatcgatggtgccgtcgtcgccgcccctgggagagccaaagccaagcagaggaggccgcagtcgaccggatttgggaatcctgctcctgccaaacgggatgaacggaaggaagcaaaatctttctggggttgatttggcttgaaggaagcgggatctttctggacaatggctgtctagcttcatccattctggtacagagggatggagtcttgtaagaaggtagctgcaagcttgaagtcgtgtgagccatgggggaacagggcatcctggacaaacgccgttgggccaggttggaagttgagctttgctgttgagccatggactaagggctttagcgcgtcgtgtgcggcgccatattctgctggagccacagagcatcaattatcgctcgatgagaaggtggataactccaccgttgcatctggttttgatgggtaaagttatctatcagctagattcatggcaggaaaggttttttctattgtcggtatccagcacctaagtaggcctaggatttttttcttctatctttaattagcaattgcctttttcagcaacccgttcttatgaatttcttttattgacaacatgaattagtctattttagttcatctctttcttgtcacaaatttaaatgaatataattgtttgtttcagtggcaattctgtgaagcccaaaggttccaagtcaccatgaaaaaattgaaatgacgagatctcttaatctaattgttgcaccttggaaggtctgaaccatcatagtttaattgtatcacccatttacacaagttcctaccatcagagttcaactgtatcacccatccataagcaattccttttgttgaaatttatgagaagacatatgcctctgttaagtctcaggaacttttttgctgggaagccaattccttactgatctgagggacaacatttttgtttgcctgatataaggtaaagtgtgaaagggaaacgcgaaaagaaacgtgtcctggtcccaagtcacctgccatactgaacacgattgatcgcagaaagaaacacgttctggtctagactgacagttttggagctggagccggccatgcgctcgatcagagttccgctgcagccacgacctctctcccgaacgcgcacgaggagaccaggtggaacatatgcaagcaggttctagagcaataaccccatgaatccagatcgggggtctgcatctacacgggcgtgtactccgcaccgctcccctccggccccgaccgccgtgtgctcgttgtagccggggtcgacctcaaccacgacgacgatgcggtctcctcgccccaggctcgacctcctcgctgacctcgccctgctccacctcaactcgcgatgaggattgtcggcacgttcacaccgcgccgttgcagaacgttggagcctctcagaactctagaagctgcctaccaccacgcaccctaagataggggcatatctgtaaatattgtactctcaaatggtgggttgctgcgtcatgggagtttgggtgaaggcctgaaggatgtgatgcaaaacgtcgatgcaggtctgggatgtccgcctcattatggatcaaaattcatgacgttctaaaggtgtcggatgagtacctatatactccctcccagaaaacaaggcgcctcattacactattggaagctggacgacatggatgactctggcaagatgcggtgggagcacgacgacatggatgactccgaccatgagttcgacaggaagcctagcaacagtacgcagtagcaaggttgaccagaggggcagtggagactaacccaacaccccctcctccgaccgtcatagcgcttctttcctctggcttcatttcttacctatgtatggatggtcttcaccactggttacatctagcaagtcctcctagggtgacatgaaggagattgtcatgctgccaaagcacatcaaggacaatgcaaacaaggacagaggaagaccggacatgccatttccaggtggtgacatttctattctcacgcgcccacccaacatttttgcttttactaaatgactatgtgcgcgaatgctttgtggatgttgagagggattatctgtgcttgacaaaacagtatcccagacttgcaattactccagaattttctaaggttgggcattttgtacattgaacttttgttgctgatcgatattcaatgtggcttttggcattctctgtcactctagctaggtccttggatgagccacactattgacatgggtttaggtgagtgactcatcacggtgcctttatatggctcgatcaattccaaatttgctatagtctagttgtcactagaatttcctcatttggcatgcaataattacaattgatttgcctggtactctgattgaaatgggaaagttgagtgcttacatatgttgatccacaatatttctttattgtcaagggcagagttaaagtgaattgtgtggattcacaccaactgcacctttggatctcttctgggtcgtttcatttcaaaaaatactggccatatccccctctatatctggtaaacatagattgaggactagatagatcaggataaacaaggcgtgttaattgttgacaaatacaataaaagtaaaatcacagtaatgacgagtgaacaaacatgccttcgctgcttcatctgtttgaaactagagatatcaacctttaagtgcagcttaaggttttttgggatgattctttgtttatcatcgcaggatataatgcacatgggttagttcatctctttttcttttgcacccaagtatgccattttggggatttctccactatgtatgtttaaatgagcacattatttagaagccttttattatcatgttgttatgttctatgttgtttactgcttgcttggtgtaatctctagacccgtggatctaattgcttttgcaagggaaagagatatgccttctgattcagataggaccttaaatgaagacaagcgtttcatatcttgtagtatgccacaggagcatcaaaagatctttgaattgggctgaagaaaacatagaatatagtgtaatcttatagtataaaatttagagtctattgtcacccatacatataagtcttgtgaacgtttatggaaccagggaataagacattgttctgtatggccagtctgttggtagcagaccaacccttgatctagctattcgtttcaatcatgaagagatgtggtattaatcatagataagggatgtttagttccagagactaaagtttagtacgtgtcacatagaatatttgaatctcattttactatggatttatatatcatagtgacatttgtcgttatgtattgatgtttta

SEQ ID NO: 213194 - DNA, 3797 bp, Zea Mays
cgcatacgcccacagccgccccacgcgcgcatcccgcagccgcgcgatccgtccgcttcctcctccccgcgcccgcagcccccgccgccgatgccagccgccgcgcccgcgcaagggaagttgcttcccaaatcccgcagacaagatttaatcccgtgattcttcccatccatggcagccgtgcccgcaaaccgcgcctccccacgactcccacttccatggcgtcgcccccttccatccatggcagtcacgctccctctgcgcccttccatccatggctgcggctccctccgcgccgcaattcttcccatcctctccttccgcgcggtttgcggctaccaatcctctccctctgcgtcgtgttcttcccatcctctccctccgcgccggatctcgccccatgtccaccaacgccggtgtccgtgatggcgcgctcggggcagcggtggacgcagcctttgccaggcgtgtgctccaggccgaggccctcctcgggtacctctccgcgctggccaccagcccgcgtgccgagggcgacagggtggaccccgccgtcgccgcggcgcagctcggggcgctcggccggtggaagggctcggcgaggggccttcccgagtacacggtcgtccacggcatcgatggtgccgtcgtcgccgcccctgggagagccaaagccaagcagaggaggccgcagtcgaccggatttgggaatcctgctcctgccaaacgggatgaacggaaggaagcaaaatctttctggggttgatttggcttgaaggaagcgggatctttctggacaatggctgtctagcttcatccattctggtaacaaagaaaaaaacaagaaacatctggtatctgagtccagtagaaagttgtgcaaagagaagagcaaaatatctacaccagacgtctcttttaggtacagagggatggagtcttgtaagaaggtagctgcaagcttgaagtcgtgtgagccatgggggaacagggcatcctggacaaacgccgttgggccaggttggaagttgagctttgctgttgagccatggactaagggctttagcgcgtcgtgtgcggcgccatattctgctggagccacagagcatcaattatcgctcgatgagaaggtggataactccaccgttgcatctggttttgatgggtaaagttatctatcagctagattcatggcaggaaaggttttttctattgtcggtatccagcacctaagtaggcctaggatttttttcttctatctttaattagcaattgcctttttcagcaacccgttcttatgaatttcttttattgacaacatgaattagtctattttagttcatctctttcttgtcacaaatttaaatgaatataattgtttgtttcagtggcaattctgtgaagcccaaaggttccaagtcaccatgaaaaaattgaaatgacgagatctcttaatctaattgttgcaccttggaaggtctgaaccatcatagtttaattgtatcacccatttacacaagttcctaccatcagagttcaactgtatcacccatccataagcaattccttttgttgaaatttatgagaagacatatgcctctgttaagtctcaggaacttttttgctgggaagccaattccttactgatctgagggacaacatttttgtttgcctgatataaggtaaagtgtgaaagggaaacgcgaaaagaaacgtgtcctggtcccaagtcacctgccatactgaacacgattgatcgcagaaagaaacacgttctggtctagactgacagttttggagctggagccggccatgcgctcgatcagagttccgctgcagccacgacctctctcccgaacgcgcacgaggagaccaggtggaacatatgcaagcaggttctagagcaataaccccatgaatccagatcgggggtctgcatctacacgggcgtgtactccgcaccgctcccctccggccccgaccgccgtgtgctcgttgtagccggggtcgacctcaaccacgacgacgatgcggtctcctcgccccaggctcgacctcctcgctgacctcgccctgctccacctcaactcgcgatgaggattgtcggcacgttcacaccgcgccgttgcagaacgttggagcctctcagaactctagaagctgcctaccaccacgcaccctaagataggggcatatctgtgttagtcgcctgcacacatactgaaatatgggcatatccaccatgtattcttctcttagttatgttagataagacttttactctgtcatttactgatctggtctgtttttagctccattagcttgttcacaagcttatgttagagaaggcgttatggcttttctcaagattataacatttctgaataactgttctgcgtaggcatggtaccatcttcatcatgtagctgggatgagctggcaccatgaaagaattcaagtggttaaatcatgcatctgcagaaatattgtactctcaaatggtgggttgctgcgtcatgggagtttgggtgaaggcctgaaggatgtgatgcaaaacgtcgatgcaggtctgggatgtccgcctcattatggatcaaaattcatgacgttctaaaggtgtcggatgagtacctatatactccctcccagaaaacaaggcgcctcattacactattggaagctggacgacatggatgactctggcaagatgcggtgggagcacgacgacatggatgactccgaccatgagttcgacaggaagcctagcaacagtacgcagtagcaaggttgaccagaggggcagtggagactaacccaacaccccctcctccgaccgtcatagcgcttctttcctctggcttcatttcttacctatgtatggatggtcttcaccactggttacatctagcaagtcctcctagggtgacatgaaggagattgtcatgctgccaaagcacatcaaggacaatgcaaacaaggacagaggaagaccggacatgccatttccaggtggtgacatttctattctcacgcgcccacccaacatttttgcttttactaaatgactatgtgcgcgaatgctttgtggatgttgagagggattatctgtgcttgacaaaacagtatcccagacttgcaattactccagaattttctaaggttgggcattttgtacattgaacttttgttgctgatcgatattcaatgtggcttttggcattctctgtcactctagctaggtccttggatgagccacactattgacatgggtttaggatataatgcacatgggttagttcatctctttttcttttgcacccaagtatgccattttggggatttctccactatacccgtggatctaattgcttttgcaagggaaagagatatgccttctgattcagataggaccttaaatgaagacaagcgtttcatatcttgtagtatgccacaggagcatcaaaagatctttgaattgggctgaagaaaacatagaatatagtgtaatcttatagtataaaatttagagtctattgtcacccatacatataagtcttgtgaacgtttatggaaccagggaataagacattgttctgtatggccagtctgttggtagcagaccaacccttgatctagctattcgtttcaatcatgaagagatgtggtattaatcatagataagggatgtttagttccagagactaaagtttagtacgtgtcacatagaatatttgaatctcattttactatggatttatatatcatagtgacatttgtcgttatgtattgatgtttta

SEQ ID NO: 213195 - DNA, 3038 bp, Zea Mays
cgcatacgcccacagccgccccacgcgcgcatcccgcagccgcgcgatccgtccgcttcctcctccccgcgcccgcagcccccgccgccgatgccagccgccgcgcccgcgcaagggaagttgcttcccaaatcccgcagacaagatttaatcccgtgattcttcccatccatggcagccgtgcccgcaaaccgcgcctccccacgactcccacttccatggcgtcgcccccttccatccatggcagtcacgctccctctgcgcccttccatccatggctgcggctccctccgcgccgcaattcttcccatcctctccttccgcgcggtttgcggctaccaatcctctccctctgcgtcgtgttcttcccatcctctccctccgcgccggatctcgccccatgtccaccaacgccggtgtccgtgatggcgcgctcggggcagcggtggacgcagcctttgccaggcgtgtgctccaggccgaggccctcctcgggtacctctccgcgctggccaccagcccgcgtgccgagggcgacagggtggaccccgccgtcgccgcggcgcagctcggggcgctcggccggtggaagggctcggcgaggggccttcccgagtacacggtcgtccacggcatcgatggtgccgtcgtcgccgcccctgggagagccaaagccaagcagaggaggccgcagtcgaccggatttgggaatcctgctcctgccaaacgggatgaacggaaggaagcaaaatctttctggggttgatttggcttgaaggaagcgggatctttctggacaatggctgtctagcttcatccattctggtacagagggatggagtcttgtaagaaggtagctgcaagcttgaagtcgtgtgagccatgggggaacagggcatcctggacaaacgccgttgggccaggttggaagttgagctttgctgttgagccatggactaagggctttagcgcgtcgtgtgcggcgccatattctgctggagccacagagcatcaattatcgctcgatgagaaggtggataactccaccgttgcatctggttttgatgggtaaagttatctatcagctagattcatggcaggaaaggttttttctattgtcggtatccagcacctaagtaggcctaggatttttttcttctatctttaattagcaattgcctttttcagcaacccgttcttatgaatttcttttattgacaacatgaattagtctattttagttcatctctttcttgtcacaaatttaaatgaatataattgtttgtttcagtggcaattctgtgaagcccaaaggttccaagtcaccatgaaaaaattgaaatgacgagatctcttaatctaattgttgcaccttggaaggtctgaaccatcatagtttaattgtatcacccatttacacaagttcctaccatcagagttcaactgtatcacccatccataagcaattccttttgttgaaatttatgagaagacatatgcctctgttaagtctcaggaacttttttgctgggaagccaattccttactgatctgagggacaacatttttgtttgcctgatataaggtaaagtgtgaaagggaaacgcgaaaagaaacgtgtcctggtcccaagtcacctgccatactgaacacgattgatcgcagaaagaaacacgttctggtctagactgacagttttggagctggagccggccatgcgctcgatcagagttccgctgcagccacgacctctctcccgaacgcgcacgaggagaccaggtggaacatatgcaagcaggttctagagcaataaccccatgaatccagatcgggggtctgcatctacacgggcgtgtactccgcaccgctcccctccggccccgaccgccgtgtgctcgttgtagccggggtcgacctcaaccacgacgacgatgcggtctcctcgccccaggctcgacctcctcgctgacctcgccctgctccacctcaactcgcgatgaggattgtcggcacgttcacaccgcgccgttgcagaacgttggagcctctcagaactctagaagctgcctaccaccacgcaccctaagataggggcatatctgtgcatggtaccatcttcatcatgtagctgggatgagctggcaccatgaaagaattcaagtggttaaatcatgcatctgcagaaatattgtactctcaaatggtgggttgctgcgtcatgggagtttgggtgaaggcctgaaggatgtgatgcaaaacgtcgatgcaggtctgggatgtccgcctcattatggatcaaaattcatgacgttctaaaggtgtcggatgagtacctatatactccctcccagaaaacaaggcgcctcattacactattggaagctggacgacatggatgactctggcaagatgcggtgggagcacgacgacatggatgactccgaccatgagttcgacaggaagcctagcaacagtacgcagtagcaaggttgaccagaggggcagtggagactaacccaacaccccctcctccgaccgtcatagcgcttctttcctctggcttcatttcttacctatgtatggatggtcttcaccactggttacatctagcaagtcctcctagggtgacatgaaggagattgtcatgctgccaaagcacatcaaggacaatgcaaacaaggacagaggaagaccggacatgccatttccaggtggtgacatttctattctcacgcgcccacccaacatttttgcttttactaaatgactatgtgcgcgaatgctttgtggatgttgagagggattatctgtgcttgacaaaacagtatcccagacttgcaattactccagaattttctaaggttgggcattttgtacattgaacttttgttgctgatcgatattcaatgtggcttttggcattctctgtcactctagctaggtccttggatgagccacactattgacatgggtttagagaacttctcaagggcccgctgtattatgcctgtgctataactctgacaacaatagttttc

SEQ ID NO: 213196 - DNA, 2982 bp, Zea Mays
cgcatacgcccacagccgccccacgcgcgcatcccgcagccgcgcgatccgtccgcttcctcctccccgcgcccgcagcccccgccgccgatgccagccgccgcgcccgcgcaagggaagttgcttcccaaatcccgcagacaagatttaatcccgtgattcttcccatccatggcagccgtgcccgcaaaccgcgcctccccacgactcccacttccatggcgtcgcccccttccatccatggcagtcacgctccctctgcgcccttccatccatggctgcggctccctccgcgccgcaattcttcccatcctctccttccgcgcggtttgcggctaccaatcctctccctctgcgtcgtgttcttcccatcctctccctccgcgccggatctcgccccatgtccaccaacgccggtgtccgtgatggcgcgctcggggcagcggtggacgcagcctttgccaggcgtgtgctccaggccgaggccctcctcgggtacctctccgcgctggccaccagcccgcgtgccgagggcgacagggtggaccccgccgtcgccgcggcgcagctcggggcgctcggccggtggaagggctcggcgaggggccttcccgagtacacggtcgtccacggcatcgatggtgccgtcgtcgccgcccctgggagagccaaagccaagcagaggaggccgcagtcgaccggatttgggaatcctgctcctgccaaacgggatgaacggaaggaagcaaaatctttctggggttgatttggcttgaaggaagcgggatctttctggacaatggctgtctagcttcatccattctggtacagagggatggagtcttgtaagaaggtagctgcaagcttgaagtcgtgtgagccatgggggaacagggcatcctggacaaacgccgttgggccaggttggaagttgagctttgctgttgagccatggactaagggctttagcgcgtcgtgtgcggcgccatattctgctggagccacagagcatcaattatcgctcgatgagaaggtggataactccaccgttgcatctggttttgatgggtaaagttatctatcagctagattcatggcaggaaaggttttttctattgtcggtatccagcacctaagtaggcctaggatttttttcttctatctttaattagcaattgcctttttcagcaacccgttcttatgaatttcttttattgacaacatgaattagtctattttagttcatctctttcttgtcacaaatttaaatgaatataattgtttgtttcagtggcaattctgtgaagcccaaaggttccaagtcaccatgaaaaaattgaaatgacgagatctcttaatctaattgttgcaccttggaaggtctgaaccatcatagtttaattgtatcacccatttacacaagttcctaccatcagagttcaactgtatcacccatccataagcaattccttttgttgaaatttatgagaagacatatgcctctgttaagtctcaggaacttttttgctgggaagccaattccttactgatctgagggacaacatttttgtttgcctgatataaggtgatgaaggtaaagtgtgaaagggaaacgcgaaaagaaacgtgtcctggtcccaagtcacctgccatactgaacacgattgatcgcagaaagaaacacgttctggtctagactgacagttttggagctggagccggccatgcgctcgatcagagttccgctgcagccacgacctctctcccgaacgcgcacgaggagaccaggtggaacatatgcaagcaggttctagagcaataaccccatgaatccagatcgggggtctgcatctacacgggcgtgtactccgcaccgctcccctccggccccgaccgccgtgtgctcgttgtagccggggtcgacctcaaccacgacgacgatgcggtctcctcgccccaggctcgacctcctcgctgacctcgccctgctccacctcaactcgcgatgaggattgtcggcacgttcacaccgcgccgttgcagaacgttggagcctctcagaactctagaagctgcctaccaccacgcaccctaagataggggcatatctgtgttagtcgcctgcacacatactgaaatatgggcatatccaccatgtattcttctcttagttatgttagataagacttttactctgtcatttactgatctggtctgtttttagctccattagcttgttcacaagcttatgttagagaaggcgttatggcttttctcaagattataacatttctgaataactgttctgcgtaggcatggtaccatcttcatcatgtagctgggatgagctggcaccatgaaagaattcaagtggttaaatcatgcatctgcagaaatattgtactctcaaatggtgggttgctgcgtcatgggagtttgggtgaaggcctgaaggatgtgatgcaaaacgtcgatgcaggtctgggatgtccgcctcattatggatcaaaattcatgacgttctaaaggtgtcggatgagtacctatatactccctcccagaaaacaaggcgcctcattacactattggaagctggacgacatggatgactctggcaagatgcggtgggagcacgacgacatggatgactccgaccatgagttcgacaggaagcctagcaacagtacgcagtagcaaggttgaccagaggggcagtggagactaacccaacaccccctcctccgaccgtcatagcgcttctttcctctggcttcatttcttacctatgtatggatggtcttcaccactggttacatctagcaagtcctcctagggtgacatgaaggagattgtcatgctgccaaagcacatcaaggacaatgcaaacaaggacagaggaagaccggacatgccatttccagagaacttctcaagggcccgctgtattatgcctgtgctataactctgacaacaatagttttc

SEQ ID NO: 213197 - DNA, 3234 bp, Zea Mays
cgcatacgcccacagccgccccacgcgcgcatcccgcagccgcgcgatccgtccgcttcctcctccccgcgcccgcagcccccgccgccgatgccagccgccgcgcccgcgcaagggaagttgcttcccaaatcccgcagacaagatttaatcccgtgattcttcccatccatggcagccgtgcccgcaaaccgcgcctccccacgactcccacttccatggcgtcgcccccttccatccatggcagtcacgctccctctgcgcccttccatccatggctgcggctccctccgcgccgcaattcttcccatcctctccttccgcgcggtttgcggctaccaatcctctccctctgcgtcgtgttcttcccatcctctccctccgcgccggatctcgccccatgtccaccaacgccggtgtccgtgatggcgcgctcggggcagcggtggacgcagcctttgccaggcgtgtgctccaggccgaggccctcctcgggtacctctccgcgctggccaccagcccgcgtgccgagggcgacagggtggaccccgccgtcgccgcggcgcagctcggggcgctcggccggtggaagggctcggcgaggggccttcccgagtacacggtcgtccacggcatcgatggtgccgtcgtcgccgcccctgggagagccaaagccaagcagaggaggccgcagtcgaccggatttgggaatcctgctcctgccaaacgggatgaacggaaggaagcaaaatctttctggggttgatttggcttgaaggaagcgggatctttctggacaatggctgtctagcttcatccattctggtacagagggatggagtcttgtaagaaggtagctgcaagcttgaagtcgtgtgagccatgggggaacagggcatcctggacaaacgccgttgggccaggttggaagttgagctttgctgttgagccatggactaagggctttagcgcgtcgtgtgcggcgccatattctgctggagccacagagcatcaattatcgctcgatgagaaggtggataactccaccgttgcatctggttttgatgggtaaagttatctatcagctagattcatggcaggaaaggttttttctattgtcggtatccagcacctaagtaggcctaggatttttttcttctatctttaattagcaattgcctttttcagcaacccgttcttatgaatttcttttattgacaacatgaattagtctattttagttcatctctttcttgtcacaaatttaaatgaatataattgtttgtttcagtggcaattctgtgaagcccaaaggttccaagtcaccatgaaaaaattgaaatgacgagatctcttaatctaattgttgcaccttggaaggtctgaaccatcatagtttaattgtatcacccatttacacaagttcctaccatcagagttcaactgtatcacccatccataagcaattccttttgttgaaatttatgagaagacatatgcctctgttaagtctcaggaacttttttgctgggaagccaattccttactgatctgagggacaacatttttgtttgcctgatataaggtgatgaaggtaaagtgtgaaagggaaacgcgaaaagaaacgtgtcctggtcccaagtcacctgccatactgaacacgattgatcgcagaaagaaacacgttctggtctagactgacagttttggagctggagccggccatgcgctcgatcagagttccgctgcagccacgacctctctcccgaacgcgcacgaggagaccaggtggaacatatgcaagcaggttctagagcaataaccccatgaatccagatcgggggtctgcatctacacgggcgtgtactccgcaccgctcccctccggccccgaccgccgtgtgctcgttgtagccggggtcgacctcaaccacgacgacgatgcggtctcctcgccccaggctcgacctcctcgctgacctcgccctgctccacctcaactcgcgatgaggattgtcggcacgttcacaccgcgccgttgcagaacgttggagcctctcagaactctagaagctgcctaccaccacgcaccctaagataggggcatatctgtgttagtcgcctgcacacatactgaaatatgggcatatccaccatgtattcttctcttagttatgttagataagacttttactctgtcatttactgatctggtctgtttttagctccattagcttgttcacaagcttatgttagagaaggcgttatggcttttctcaagattataacatttctgaataactgttctgcgtaggcatggtaccatcttcatcatgtagctgggatgagctggcaccatgaaagaattcaagtggttaaatcatgcatctgcagaaatattgtactctcaaatggtgggttgctgcgtcatgggagtttgggtgaaggcctgaaggatgtgatgcaaaacgtcgatgcaggtctgggatgtccgcctcattatggatcaaaattcatgacgttctaaaggtgtcggatgagtacctatatactccctcccagaaaacaaggcgcctcattacactattggaagctggacgacatggatgactctggcaagatgcggtgggagcacgacgacatggatgactccgaccatgagttcgacaggaagcctagcaacagtacgcagtagcaaggttgaccagaggggcagtggagactaacccaacaccccctcctccgaccgtcatagcgcttctttcctctggcttcatttcttacctatgtatggatggtcttcaccactggttacatctagcaagtcctcctagggtgacatgaaggagattgtcatgctgccaaagcacatcaaggacaatgcaaacaaggacagaggaagaccggacatgccatttccaggaaatggaggcagcatgctgctgacaagcgattacttagggagcagaagaatgctcttgctgttgcagcattgtgttctctatcacttggcccaccagttcataaaagtacaacggttgataaatccagtggcgatgagctccacctgctgctgcttataaggtaggtggagatggtcgagaaattgagacacatggttctgctgtcctgggtaacttctgcgacaagcgcattcgatggtacaaaagacataatggaagctcttagcaacaaacatactaatctagccaatgagcttgaggtaaatatcata

SEQ ID NO: 213198 - DNA, 4010 bp, Zea Mays
cgcatacgcccacagccgccccacgcgcgcatcccgcagccgcgcgatccgtccgcttcctcctccccgcgcccgcagcccccgccgccgatgccagccgccgcgcccgcgcaagggaagttgcttcccaaatcccgcagacaagatttaatcccgtgattcttcccatccatggcagccgtgcccgcaaaccgcgcctccccacgactcccacttccatggcgtcgcccccttccatccatggcagtcacgctccctctgcgcccttccatccatggctgcggctccctccgcgccgcaattcttcccatcctctccttccgcgcggtttgcggctaccaatcctctccctctgcgtcgtgttcttcccatcctctccctccgcgccggatctcgccccatgtccaccaacgccggtgtccgtgatggcgcgctcggggcagcggtggacgcagcctttgccaggcgtgtgctccaggccgaggccctcctcgggtacctctccgcgctggccaccagcccgcgtgccgagggcgacagggtggaccccgccgtcgccgcggcgcagctcggggcgctcggccggtggaagggctcggcgaggggccttcccgagtacacggtcgtccacggcatcgatggtgccgtcgtcgccgcccctgggagagccaaagccaagcagaggaggccgcagtcgaccggatttgggaatcctgctcctgccaaacgggatgaacggaaggaagcaaaatctttctggggttgatttggcttgaaggaagcgggatctttctggacaatggctgtctagcttcatccattctggtacagagggatggagtcttgtaagaaggtagctgcaagcttgaagtcgtgtgagccatgggggaacagggcatcctggacaaacgccgttgggccaggttggaagttgagctttgctgttgagccatggactaagggctttagcgcgtcgtgtgcggcgccatattctgctggagccacagagcatcaattatcgctcgatgagaaggtggataactccaccgttgcatctggttttgatgggtaaagttatctatcagctagattcatggcaggaaaggttttttctattgtcggtatccagcacctaatggcaattctgtgaagcccaaaggttccaagtcaccatgaaaaaattgaaatgacgagatctcttaatctaattgttgcaccttggaaggtctgaaccatcatagtttaattgtatcacccatttacacaagttcctaccatcagagttcaactgtatcacccatccataagcaattccttttgttgaaatttatgagaagacatatgcctctgttaagtctcaggaacttttttgctgggaagccaattccttactgatctgagggacaacatttttgtttgcctgatataaggtgatgaaggtggctggataacacgattatgggtaaagtgtgaaagggaaacgcgaaaagaaacgtgtcctggtcccaagtcacctgccatactgaacacgattgatcgcagaaagaaacacgttctggtctagactgacagttttggagctggagccggccatgcgctcgatcagagttccgctgcagccacgacctctctcccgaacgcgcacgaggagaccaggtggaacatatgcaagcaggttctagagcaataaccccatgaatccagatcgggggtctgcatctacacgggcgtgtactccgcaccgctcccctccggccccgaccgccgtgtgctcgttgtagccggggtcgacctcaaccacgacgacgatgcggtctcctcgccccaggctcgacctcctcgctgacctcgccctgctccacctcaactcgcgatgaggattgtcggcacgttcacaccgcgccgttgcagaacgttggagcctctcagaactctagaagctgcctaccaccacgcaccctaagataggggcatatctgtgcatggtaccatcttcatcatgtagctgggatgagctggcaccatgaaagaattcaagtggttaaatcatgcatctgcagaaatattgtactctcaaatggtgggttgctgcgtcatgggagtttgggtgaaggcctgaaggatgtgatgcaaaacgtcgatgcaggtctgggatgtccgcctcattatggatcaaaattcatgacgttctaaaggtgtcggatgagtacctatatactccctcccagaaaacaaggcgcctcattacactattggaagctggacgacatggatgactctggcaagatgcggtgggagcacgacgacatggatgactccgaccatgagttcgacaggaagcctagcaacagtacgcagtagcaaggttgaccagaggggcagtggagactaacccaacaccccctcctccgaccgtcatagcgcttctttcctctggcttcatttcttacctatgtatggatggtcttcaccactggttacatctagcaagtcctcctagggtgacatgaaggagattgtcatgctgccaaagcacatcaaggacaatgcaaacaaggacagaggaagaccggacatgccatttccaggaaatggaggcagcatgctgctgacaagcgattacttagggagcagaagaatgctcttgctgttgcagcattgtgttctctatcacttggcccaccagttcataaaagtacaacggtgtctaagctagcagttgaagaactagatattggccacgcctttaaagaaagacaagcaagaaagcaaaggtcctggtcacggctaaatgtttcggagttgtctggtcccattctaaatgaaaataaccctgatgctagatgcctctgctggatgttgcttgtacttgttccaccgggcctatcaatttggacagagtggatcagttttccaaatgcatgttgtttgtctgttgttagggccagcgatcagcaagttattgataatgatatttggtcgtgttttggtcagtatgacatggcggcagtggtatccacaatgttgctcgtcaccggggtgactacattgctgcacatgtttgttggaacgagactatccacttgtgcagggtccatcctttttatacctggctcctgcccttgcgatcatcaactcacaagaattctttgggatcaatgataataattctaaacacataatgaagcacctgcagggagctataataattggaggtgcattccaagtgtttttgggatatagaggcctcatgtcactatttcttaggttgataaatccagtggcgatgagctccacctgctgctgcttataaggtaggtggagatggtcgagaaattgagacacatggttctgctgtcctgggtaacttctgcgacaagcgcattcgatggtacaaaagacataatggaagctcttagcaacaaacatactaatctagccaatgagcttgaggtcacttgacatccaagagcaatgtgtgcagctttagggtggtgctgctggagctcatgataggcagacggtcaatggacaagagccgatcagcagggtattatgcaccagctttggggttcttgatgtttgctgttggtgtaaactcaagcgccaaggatttgattgaaacaataaaaaggccagatgctattgctgcgggctatatcagacagtttgtcaagctcgtcaccgtcgacgaccctttcatcaccacggactacatggtttcgggaggatcaacgggctcgtggccagggtccccctctagaaatgtggggaaaattgatgaggcatcagaactgaggagaactgtgagtgatatcaagcacaatgttcagacacagcttagcgagaatgctaagaccaataaacgagtgattgggattcacaaagaattgcagaaactgcatagagaagctattcagaacaccatcaattcagtcaccatggtagcaaacctgatgcctccattgccttcgttgtcatatcaattgccagacgaatctctgggatcg

SEQ ID NO: 213199 - DNA, 4046 bp, Zea Mays
cgcatacgcccacagccgccccacgcgcgcatcccgcagccgcgcgatccgtccgcttcctcctccccgcgcccgcagcccccgccgccgatgccagccgccgcgcccgcgcaagggaagttgcttcccaaatcccgcagacaagatttaatcccgtgattcttcccatccatggcagccgtgcccgcaaaccgcgcctccccacgactcccacttccatggcgtcgcccccttccatccatggcagtcacgctccctctgcgcccttccatccatggctgcggctccctccgcgccgcaattcttcccatcctctccttccgcgcggtttgcggctaccaatcctctccctctgcgtcgtgttcttcccatcctctccctccgcgccggatctcgccccatgtccaccaacgccggtgtccgtgatggcgcgctcggggcagcggtggacgcagcctttgccaggcgtgtgctccaggccgaggccctcctcgggtacctctccgcgctggccaccagcccgcgtgccgagggcgacagggtggaccccgccgtcgccgcggcgcagctcggggcgctcggccggtggaagggctcggcgaggggccttcccgagtacacggtcgtccacggcatcgatggtgccgtcgtcgccgcccctgggagagccaaagccaagcagaggaggccgcagtcgaccggatttgggaatcctgctcctgccaaacgggatgaacggaaggaagcaaaatctttctggggttgatttggcttgaaggaagcgggatctttctggacaatggctgtctagcttcatccattctggtacagagggatggagtcttgtaagaaggtagctgcaagcttgaagtcgtgtgagccatgggggaacagggcatcctggacaaacgccgttgggccaggttggaagttgagctttgctgttgagccatggactaagggctttagcgcgtcgtgtgcggcgccatattctgctggagccacagagcatcaattatcgctcgatgagaaggtggataactccaccgttgcatctggttttgatgggtaaagttatctatcagctagattcatggcaggaaaggttttttctattgtcggtatccagcacctaatggcaattctgtgaagcccaaaggttccaagtcaccatgaaaaaattgaaatgacgagatctcttaatctaattgttgcaccttggaaggtctgaaccatcatagtttaattgtatcacccatttacacaagttcctaccatcagagttcaactgtatcacccatccataagcaattccttttgttgaaatttatgagaagacatatgcctctgttaagtctcaggaacttttttgctgggaagccaattccttactgatctgagggacaacatttttgtttgcctgatataaggtaaagtgtgaaagggaaacgcgaaaagaaacgtgtcctggtcccaagtcacctgccatactgaacacgattgatcgcagaaagaaacacgttctggtctagactgacagttttggagctggagccggccatgcgctcgatcagagttccgctgcagccacgacctctctcccgaacgcgcacgaggagaccaggtggaacatatgcaagcaggttctagagcaataaccccatgaatccagatcgggggtctgcatctacacgggcgtgtactccgcaccgctcccctccggccccgaccgccgtgtgctcgttgtagccggggtcgacctcaaccacgacgacgatgcggtctcctcgccccaggctcgacctcctcgctgacctcgccctgctccacctcaactcgcgatgaggattgtcggcacgttcacaccgcgccgttgcagaacgttggagcctctcagaactctagaagctgcctaccaccacgcaccctaagataggggcatatctgtgcatggtaccatcttcatcatgtagctgggatgagctggcaccatgaaagaattcaagtggttaaatcatgcatctgcagaaatattgtactctcaaatggtgggttgctgcgtcatgggagtttgggtgaaggcctgaaggatgtgatgcaaaacgtcgatgcaggtctgggatgtccgcctcattatggatcaaaattcatgacgttctaaaggtgtcggatgagtacctatatactccctcccagaaaacaaggcgcctcattacactattggaagctggacgacatggatgactctggcaagatgcggtgggagcacgacgacatggatgactccgaccatgagttcgacaggaagcctagcaacagtacgcagtagcaaggttgaccagaggggcagtggagactaacccaacaccccctcctccgaccgtcatagcgcttctttcctctggcttcatttcttacctatgtatggatggtcttcaccactggttacatctagcaagtcctcctagggtgacatgaaggagattgtcatgctgccaaagcacatcaaggacaatgcaaacaaggacagaggaagaccggacatgccatttccaggaaatggaggcagcatgctgctgacaagcgattacttagggagcagaagaatgctcttgctgttgcagcattgtgttctctatcacttggcccaccagttcataaaagtacaacggtgtctaagctagcagttgaagaactagatattggccacgcctttaaagaaagacaagcaagaaagcaaaggtcctggtcacggctaaatgtttcggagttgtctggtcccattctaaatgaaaataaccctgatgctagatgcctctgctggatgttgcttgtacttgttccaccgggtatggaatcccagaccaacagttttgtctcaaaatggttacttagaaagctcatgggttatggaaccggatatattggattggttgtttcttcagcaggcctatcaatttggacagagtggatcagttttccaaatgcatgttgtttgtctgttgttagggccagcgatcagcaagttattgataatgatatttggtcgtgttttggtcagtatgacatggcggcagtggtatccacaatgttgctcgtcaccggggtgactacattgctgcacatgtttgttggaacgagactatccacttgtgcagggtccatcctttttatacctggctcctgcccttgcgatcatcaactcacaagaattctttgggatcaatgataataattctaaacacataatgaagcacctgcagggagctataataattggaggtgcattccaagtgtttttgggatatagaggcctcatgtcactatttcttaggttgataaatccagtggcgatgagctccacctgctgctgcttataaggtaggtggagatggtcgagaaattgagacacatggttctgctgtcctgggtaacttctgcgacaagcgcattcgatggtacaaaagacataatggaagctcttagcaacaaacatactaatctagccaatgagcttgagctttagggtggtgctgctggagctcatgataggcagacggtcaatggacaagagccgatcagcagggtattatgcaccagctttggggttcttgatgtttgctgttggtgtaaactcaagcgccaaggatttgattgaaacaataaaaaggccagatgctattgctgcgggctatatcagacagtttgtcaagctcgtcaccgtcgacgaccctttcatcaccacggactacatggtttcgggaggatcaacgggctcgtggccagggtccccctctagaaatgtggggaaaattgatgaggcatcagaactgaggagaactgtgagtgatatcaagcacaatgttcagacacagcttagcgagaatgctaagaccaataaacgagtgattgggattcacaaagaattgcagaaactgcatagagaagctattcagaacaccatcaattcagtcaccatggtagcaaacctgatgcctccattgccttcgttgtcatatcaattgccagacgaatctctgggatcg

SEQ ID NO: 213200 - DNA, 4299 bp, Zea Mays
cgcatacgcccacagccgccccacgcgcgcatcccgcagccgcgcgatccgtccgcttcctcctccccgcgcccgcagcccccgccgccgatgccagccgccgcgcccgcgcaagggaagttgcttcccaaatcccgcagacaagatttaatcccgtgattcttcccatccatggcagccgtgcccgcaaaccgcgcctccccacgactcccacttccatggcgtcgcccccttccatccatggcagtcacgctccctctgcgcccttccatccatggctgcggctccctccgcgccgcaattcttcccatcctctccttccgcgcggtttgcggctaccaatcctctccctctgcgtcgtgttcttcccatcctctccctccgcgccggatctcgccccatgtccaccaacgccggtgtccgtgatggcgcgctcggggcagcggtggacgcagcctttgccaggcgtgtgctccaggccgaggccctcctcgggtacctctccgcgctggccaccagcccgcgtgccgagggcgacagggtggaccccgccgtcgccgcggcgcagctcggggcgctcggccggtggaagggctcggcgaggggccttcccgagtacacggtcgtccacggcatcgatggtgccgtcgtcgccgcccctgggagagccaaagccaagcagaggaggccgcagtcgaccggatttgggaatcctgctcctgccaaacgggatgaacggaaggaagcaaaatctttctggggttgatttggcttgaaggaagcgggatctttctggacaatggctgtctagcttcatccattctggtacagagggatggagtcttgtaagaaggtagctgcaagcttgaagtcgtgtgagccatgggggaacagggcatcctggacaaacgccgttgggccaggttggaagttgagctttgctgttgagccatggactaagggctttagcgcgtcgtgtgcggcgccatattctgctggagccacagagcatcaattatcgctcgatgagaaggtggataactccaccgttgcatctggttttgatgggtaaagttatctatcagctagattcatggcaggaaaggttttttctattgtcggtatccagcacctaagtaggcctaggatttttttcttctatctttaattagcaattgcctttttcagcaacccgttcttatgaatttcttttattgacaacatgaattagtctattttagttcatctctttcttgtcacaaatttaaatgaatataattgtttgtttcagtggcaattctgtgaagcccaaaggttccaagtcaccatgaaaaaattgaaatgacgagatctcttaatctaattgttgcaccttggaaggtctgaaccatcatagtttaattgtatcacccatttacacaagttcctaccatcagagttcaactgtatcacccatccataagcaattccttttgttgaaatttatgagaagacatatgcctctgttaagtctcaggaacttttttgctgggaagccaattccttactgatctgagggacaacatttttgtttgcctgatataaggtgatgaaggtggctggataacacgattatgggtaaagtgtgaaagggaaacgcgaaaagaaacgtgtcctggtcccaagtcacctgccatactgaacacgattgatcgcagaaagaaacacgttctggtctagactgacagttttggagctggagccggccatgcgctcgatcagagttccgctgcagccacgacctctctcccgaacgcgcacgaggagaccaggtggaacatatgcaagcaggttctagagcaataaccccatgaatccagatcgggggtctgcatctacacgggcgtgtactccgcaccgctcccctccggccccgaccgccgtgtgctcgttgtagccggggtcgacctcaaccacgacgacgatgcggtctcctcgccccaggctcgacctcctcgctgacctcgccctgctccacctcaactcgcgatgaggattgtcggcacgttcacaccgcgccgttgcagaacgttggagcctctcagaactctagaagctgcctaccaccacgcaccctaagataggggcatatctgtgcatggtaccatcttcatcatgtagctgggatgagctggcaccatgaaagaattcaagtggttaaatcatgcatctgcagaaatattgtactctcaaatggtgggttgctgcgtcatgggagtttgggtgaaggcctgaaggatgtgatgcaaaacgtcgatgcaggtctgggatgtccgcctcattatggatcaaaattcatgacgttctaaaggtgtcggatgagtacctatatactccctcccagaaaacaaggcgcctcattacactattggaagctggacgacatggatgactctggcaagatgcggtgggagcacgacgacatggatgactccgaccatgagttcgacaggaagcctagcaacagtacgcagtagcaaggttgaccagaggggcagtggagactaacccaacaccccctcctccgaccgtcatagcgcttctttcctctggcttcatttcttacctatgtatggatggtcttcaccactggttacatctagcaagtcctcctagggtgacatgaaggagattgtcatgctgccaaagcacatcaaggacaatgcaaacaaggacagaggaagaccggacatgccatttccaggaaatggaggcagcatgctgctgacaagcgattacttagggagcagaagaatgctcttgctgttgcagcattgtgttctctatcacttggcccaccagttcataaaagtacaacggtgtctaagctagcagttgaagaactagatattggccacgcctttaaagaaagacaagcaagaaagcaaaggtcctggtcacggctaaatgtttcggagttgtctggtcccattctaaatgaaaataaccctgatgctagatgcctctgctggatgttgcttgtacttgttccaccgggtatggaatcccagaccaacagttttgtctcaaaatggttacttagaaagctcatgggttatggaaccggatatattggattggttgtttcttcagcaggcctatcaatttggacagagtggatcagttttccaaatgcatgttgtttgtctgttgttagggccagcgatcagcaagttattgataatgatatttggtcgtgttttggtcagtatgacatggcggcagtggtatccacaatgttgctcgtcaccggggtgactacattgctgcacatgtttgttggaacgagactatccacttgtgcagggtccatcctttttatacctggctcctgcccttgcgatcatcaactcacaagaattctttgggatcaatgataataattctaaacacataatgaagcacctgcagggagctataataattggaggttgataaatccagtggcgatgagctccacctgctgctgcttataaggtaggtggagatggtcgagaaattgagacacatggttctgctgtcctgggtaacttctgcgacaagcgcattcgatggtacaaaagacataatggaagctcttagcaacaaacatactaatctagccaatgagcttgagcgcaatactttttgtttgcgcttgctgggggcaagctgatagagcgtattcgtgccttgtcatttcaaagcattgtgcgctaggaaatttcttggtttgactatgtctcaaattccagctttagggtggtgctgctggagctcatgataggcagacggtcaatggacaagagccgatcagcagggtattatgcaccagctttggggttcttgatgtttgctgttggtgtaaactcaagcgccaaggatttgattgaaacaataaaaaggccagatgctattgctgcgggctatatcagacagtttgtcaagctcgtcaccgtcgacgaccctttcatcaccacggactacatggtttcgggaggatcaacgggctcgtggccagggtccccctctagaaatgtggggaaaattgatgaggcatcagaactgaggagaactgtgagtgatatcaagcacaatgttcagacacagcttagcgagaatgctaagaccaataaacgagtgattgggattcacaaagaattgcagaaactgcatagagaagctattcagaacaccatcaattcagtcaccatggtagcaaacctgatgcctccattgccttcgttgtcatatcaattgccagacgaatctctgggatcg

SEQ ID NO: 213201 - DNA, 3474 bp, Zea Mays
atccattctgacgtctcttttaggtacagagggatggagtcttgtaagaaggtagctgcaagcttgaagtcgtgtgagccatgggggaacagggcatcctggacaaacgccgttgggccaggttggaagttgagctttgctgttgagccatggactaagggctttagcgcgtcgtgtgcggcgccatattctgctggagccacagagcatcaattatcgctcgatgagaaggtggataactccaccgttgcatctggttttgatgggtaaagttatctatcagctagattcatggcaggaaaggttttttctattgtcggtatccagcacctaagtaggcctaggatttttttcttctatctttaattagcaattgcctttttcagcaacccgttcttatgaatttcttttattgacaacatgaattagtctattttagttcatctctttcttgtcacaaatttaaatgaatataattgtttgtttcagtggcaattctgtgaagcccaaaggttccaagtcaccatgaaaaaattgaaatgacgagatctcttaatctaattgttgcaccttggaaggtctgaaccatcatagtttaattgtatcacccatttacacaagttcctaccatcagagttcaactgtatcacccatccataagcaattccttttgttgaaatttatgagaagacatatgcctctgttaagtctcaggaacttttttgctgggaagccaattccttactgatctgagggacaacatttttgtttgcctgatataaggtaaagtgtgaaagggaaacgcgaaaagaaacgtgtcctggtcccaagtcacctgccatactgaacacgattgatcgcagaaagaaacacgttctggtctagactgacagttttggagctggagccggccatgcgctcgatcagagttccgctgcagccacgacctctctcccgaacgcgcacgaggagaccaggtggaacatatgcaagcaggttctagagcaataaccccatgaatccagatcgggggtctgcatctacacgggcgtgtactccgcaccgctcccctccggccccgaccgccgtgtgctcgttgtagccggggtcgacctcaaccacgacgacgatgcggtctcctcgccccaggctcgacctcctcgctgacctcgccctgctccacctcaactcgcgatgaggattgtcggcacgttcacaccgcgccgttgcagaacgttggagcctctcagaactctagaagctgcctaccaccacgcaccctaagataggggcatatctgtgttagtcgcctgcacacatactgaaatatgggcatatccaccatgtattcttctcttagttatgttagataagacttttactctgtcatttactgatctggtctgtttttagctccattagcttgttcacaagcttatgttagagaaggcgttatggcttttctcaagattataacatttctgaataactgttctgcgtaggcatggtaccatcttcatcatgtagctgggatgagctggcaccatgaaagaattcaagtggttaaatcatgcatctgcagaaatattgtactctcaaatggtgggttgctgcgtcatgggagtttgggtgaaggcctgaaggatgtgatgcaaaacgtcgatgcaggtctgggatgtccgcctcattatggatcaaaattcatgacgttctaaaggtgtcggatgagtacctatatactccctcccagaaaacaaggcgcctcattacactattggaagctggacgacatggatgactctggcaagatgcggtgggagcacgacgacatggatgactccgaccatgagttcgacaggaagcctagcaacagtacgcagtagcaaggttgaccagaggggcagtggagactaacccaacaccccctcctccgaccgtcatagcgcttctttcctctggcttcatttcttacctatgtatggatggtcttcaccactggttacatctagcaagtcctcctagggtgacatgaaggagattgtcatgctgccaaagcacatcaaggacaatgcaaacaaggacagaggaagaccggacatgccatttccaggtggtgacatttctattctcacgcgcccacccaacatttttgcttttactaaatgactatgtgcgcgaatgctttgtggatgttgagagggattatctgtgcttgacaaaacagtatcccagacttgcaattactccagaattttctaaggttgggcattttgtacattgaacttttgttgctgatcgatattcaatgtggcttttggcattctctgtcactctagctaggtccttggatgagccacactattgacatgggtttaggtgagtgactcatcacggtgcctttatatggctcgatcaattccaaatttgctatagtctagttgtcactagaatttcctcatttggcatgcaataattacaattgatttgcctggtactctgattgaaatgggaaagttgagtgcttacatatgttgatccacaatatttctttattgtcaagggcagagttaaagtgaattgtgtggattcacaccaactgcacctttggatctcttctgggtcgtttcatttcaaaaaatactggccatatccccctctatatctggtaaacatagattgaggactagatagatcaggataaacaaggcgtgttaattgttgacaaatacaataaaagtaaaatcacagtaatgacgagtgaacaaacatgccttcgctgcttcatctgtttgaaactagagatatcaacctttaagtgcagcttaaggttttttgggatgattctttgtttatcatcgcaggatataatgcacatgggttagttcatctctttttcttttgcacccaagtatgccattttggggatttctccactatgtatgtttaaatgagcacattatttagaagccttttattatcatgttgttatgttctatgttgtttactgcttgcttggtgtaatctctagacccgtggatctaattgcttttgcaagggaaagagatatgccttctgattcagataggaccttaaatgaagacaagcgtttcatatcttgtagtatgccacaggagcatcaaaagatctttgaattgggctgaagaaaacatagaatatagtgtaatcttatagtataaaatttagagtctattgtcacccatacatataagtcttgtgaacgtttatggaaccagggaataagacattgttctgtatggccagtctgttggtagcagaccaacccttgatctagctattcgtttcaatcatgaagagatgtggtattaatcatagataagggatgtttagttccagagactaaagtttagtacgtgtcacatagaatatttgaatctcattttactatggatttatatatcatagtgacatttgtcgttatgtattgatgtttta

SEQ ID NO: 213202 - DNA, 1376 bp, Zea Mays
ttccgctcgtcccgccaatcgccattattaacagctccgcggtccctccctccctcggtcggtcggcgtcggtccctccctccccacccagttagtcctcagcctatcccgtgcccgcgcagagcaccgcctctgctcgacccaccaccctctgtgcagagttaattaaccttgaggtttccgattgcccttcccttccgctcctctcgcccattcgcggcgagattcagcggcaaggatgcgcctgcacgcggaggtgcgggatgagatggaggaggggagcgaggagggggctgtgacggcttcggcggggctgtcgccaccgccactcatcggtgcggcggcgccggttccccggctagtggtggggttcgccctcacgaagaagaaggtgaagagcttcctgcagcccaagctgctcctgctggccaggaagaatggaatcagttttgtatctattgatgagtctcttcccctctcagaacaaggcccttttgatgttattttacacaagattactaggaaggagtggcagaaggttctggaggactatcacgaagaacatccagaagttactgtccttgacccaccaaatgctatcgagcatctgaacaatcgacaatcaatgcttgaagaagtagctgatttgaacctgtcaaatttctatggagaagtttgtatcccacgccagctggtcattacgaaagatccatcctctataccaacttctgtagctatggctggactaactttgcccttggttgccaagccattggttgttgatgggacgtctaaaggtcatgaactatatcttgcatatgacgaggcatccttgtcaatgcttgatccgcctctggttctacaggaattcataaaccatggcgggatcctctttaaggtgtatatcattggtgaaacaatacaggttgtccgcaggttctctcttcctgatgttaacacatatgacttactaaacaacgttggcatctatcgattgccaagagtttcatgtgctgcagctagtgcggatgatgcagatcttgaccctcttattgcagagcttcctccaaggccacttctagagaaactgggcagggagcttcgtggccggcttggtttgagattgttcaatatagatatgattagagaacttggaaccaaagatcggtactacataattgatatcaactacttcccaggttacggcaaaatgccaggatatgagcgcatgttcacagacttcttactaagtctcgcacaaagcaagtacaaaaggtacttaagcgggacatgaggtgcaaggaagtttgtgaagaccatgctactgacgagatggcatataacggtggcaggttgacgcagttccacttgttgga

SEQ ID NO: 213203 - DNA, 781 bp, Zea Mays
tatcaccaaaacgaaaagataaggtctgaaagccgacccttgatgtagtcctatgttaattggaaagtcatcggtgtctccatcacttgttcggacacttgtcacaacattaatgtacaagggcttcactgtctaagtctaaaagaagaatattgtatcagatacaacattctcctaacagtatcttctcgacacaatttaactcacagtttgcaattattattttttacaatagcgtctcctaccattatcttcttgacacaatttaaccgtgcaggttacggcaaaatgccaggatatgagcgcatgttcacagacttcttactaagtctcgcacaaagcaagtacaaaaggtatgcttccccaccgcgccaatgtacatttgctggagacataagcataagcgggaggcttgaggaagttggcaagtctcagtgtgtgtgttcaaaatcggtggcacatgctggactggagtaggaaataaccaaggaaacgcttggatgcgctgtactcatgttgtaaaatgtttaactgaatgaacaccttcctcgtgatggctccctccatcgtaatttggcaaccatgagaattaattctgcagcttggtagtgaacggtgttttgttgtgtgtatttggtaggtttgaggtctacgcaagtcaggagaccaccaaatagctgttgatgatcggatcatattaatctacatacaatctttctagcagtcatactaatacaaccatcatgggtttgtgctggagctctgtaaattgaaaaatgac

SEQ ID NO: 213204 - DNA, 954 bp, Zea Mays
tgcttgagcaattcttttgaaatcatcagttgccaagccattggttgttgatgggacgtctaaaggtcatgaactatatcttgcatatgacgaggcatccttgtcaatgcttgatccgcctctggttctacaggaattcataaaccatggtgtatatcattggtgaaacaatacaggttgtccgcaggttctctcttcctgatgttaacacatatgacttactaaacaacgttggcatctatcgattgccaagagtttcatgtgctgcagctagtgcggatgatgcagatcttgaccctcttattgcagagcttcctccaaggccacttctagagaaactgggcagggagcttcgtggccggcttggtttgagattgttcaatatagatatgattagagaacttggaaccaaagatcggtactacataattgatatcaactacttcccaggttacggcaaaatgccaggatatgagcgcatgttcacagacttcttactaagtctcgcacaaagcaagtacaaaaggtatgcttccccaccgcgccaatgtacatttgctggagacataagcataagcgggaggcttgaggaagttggcaagtctcagtgtgtgtgttcaaaatcggtggcacatgctggactggagtaggaaataaccaaggaaacgcttggatgcgctgtactcatgttgtaaaatgtttaactgaatgaacaccttcctcgtgatggctccctccatcgtaatttggcaaccatgagaattaattctgcagcttggtagtgaacggtgttttgttgtgtgtatttggtaggtttgaggtctacgcaagtcaggagaccaccaaatagctgttgatgatcggatcatattaatctacatacaatctttctagcagtcatactaatacaaccatcatgggtttgtgctggagctctgtaaattgaaaaatgac

SEQ ID NO: 213205 - DNA, 877 bp, Zea Mays
tgcttgagcaattcttttgaaatcatcagttgccaagccattggttgttgatgggacgtctaaaggtcatgaactatatcttgcatatgacgaggcatccttgtcaatgcttgatccgcctctggttctacaggaattcataaaccatggcgggatcctctttaaggtgtatatcattggtgaaacaatacagctagtgcggatgatgcagatcttgaccctcttattgcagagcttcctccaaggccacttctagagaaactgggcagggagcttcgtggccggcttggtttgagattgttcaatatagatatgattagagaacttggaaccaaagatcggtactacataattgatatcaactacttcccaggttacggcaaaatgccaggatatgagcgcatgttcacagacttcttactaagtctcgcacaaagcaagtacaaaaggtatgcttccccaccgcgccaatgtacatttgctggagacataagcataagcgggaggcttgaggaagttggcaagtctcagtgtgtgtgttcaaaatcggtggcacatgctggactggagtaggaaataaccaaggaaacgcttggatgcgctgtactcatgttgtaaaatgtttaactgaatgaacaccttcctcgtgatggctccctccatcgtaatttggcaaccatgagaattaattctgcagcttggtagtgaacggtgttttgttgtgtgtatttggtaggtttgaggtctacgcaagtcaggagaccaccaaatagctgttgatgatcggatcatattaatctacatacaatctttctagcagtcatactaatacaaccatcatgggtttgtgctggagctctgtaaattgaaaaatgac

SEQ ID NO: 213206 - DNA, 1818 bp, Zea Mays
caagtccagtcctctccctcccctcaacctagcaccgccacttgcgcccaccacgccgccgcaccgccgctggtgaacgaatccgtccatcccgtacaccagccatgtcctgacacactgacacacacctggtggaggaggaggcgctacctccgtccgccggcggtgcaggggaggagccggccatcctcagggcggcgttgggctccggcaagctgcgcatcgaggggtcgctgagcttcaagcgggcgcagaccgcactgcaggtggagaccgagatctccatccggaccgctgccatgcccgcgccgggaccgggacccctacccaggggaacccccgagaggaacacacaacaacgtctcaccagtcagccaccaccgtgctccatttcctttctctctctcggctcctccgctctcttgcccgagtcgctagcttccctgccccgcctcctcccatccccgtggacagacaaccccccacctccgcttccatagcatccgagctaaggtcaactcctccatcggcggagcgagagcggggaagagacgggagggtcccgaatccgagccgagctgcgctccccgcgcgaccgacactcaggtcttgtcgtcccatgcagatctgctcttcctcctgaggccatccatgaatccgtggcacacaggaagttaagattaatctagacatgataatctacaggcttatgagggcttacataagttcatcttctctacggaaatctgcattgagggctcttgcaaaggcactgacgacagatcaactcttcaacctaagagagcagtttacattattcggtccaaacaagagtggccatatatcattgcaaaatatgaagacggccttgatgaaaaattcctcgggtgcaatgaatgattctaggattcttgactttgttaactcaatatgcaatatccaatatggcatgattgattttgaagagttctctgctacggccattagtgtatatcaaatggaaggcctggagacctgggaagaacatgctcaacaagcatatgaattgtttgacaaggagggcaaccgaccaattgtgattgaagaacttgcatcggaacttggacttggcccttcgatctcatttcatgttgttctcaaagattggatcagacattcagatggacacccaggaagttgagttgccccttgaccaggaggaatccacctaccgtctggacgaaaaacgatcccatccatggggcagcgccaggttggaaaggggttgctgaaggacgagaatgctcagaagcttgcgttgcagcactggctggaagcggccgcacttgaagaaatcttatatcagtttgaggaaaaactccaagctgaaagagaggaagctgctaggaagcaggaagagttgcaagcacaactacaagctcaacaggccgcacttgaagaaaaccaaagtttgctgcgccaggcccaagaggaagtgaaggggatgcataccaagtttgaagagaccaatgcactgctacgagctgtcctgaaacttcagaaagattgaggtagggatgcataccaagtctggggatgatgcctttgcttaaggtttttctaccttgctagaacatatctgtggttagaactttgtcagaactacgtgcaatctgtttgaatgcttcaaacctttgtggtggaacctttgtatgtttgaacctctgttgtggaagaactagtgtgctggaattgtgtatgacttgtgatgagaatgttgtgtatgatggcttttctgtgtattatgattctgtgagctgtcatgagagctcagtgtgt
